United States Patent Application Publication US 2024/0398993 A1 - sequence listing, part 6

SEQ ID NO: 16643 - protein, 1054 aa, Homo sapiens
MGEIEGTYRVLQTAGMRLGAQTPVGVSTLEPGQTLLPRMQEKHLHLRVKLLDNTMEIFDIEPKCDGQVLLTQVWKRLNLVECDYFGMEFQNTQSYWIWLEPMKPIIRQIRRPKNVVLRLAVKFFPPDPGQLQEEYTRYLFALQLKRDLLEERLTCADTTAALLTSHLLQSEIGDYDETLDREHLKVNEYLPGQQHCLEKILEFHQKHVGQTPAESDFQVLEIARKLEMYGIRFHMASDREGTKIQLAVSHMGVLVFQGTTKINTFNWSKVRKLSFKRKRFLIKLHPEVHGPYQDTLEFLLGSRDECKNFWKICVEYHTFFRLLDQPKPKAKAVFFSRGSSFRYSGRTQKQLVDYFKDSGMKRIPYERRHSKTHTSVRALTADLPKQSISFPEGLRTPASPSSANAFYSLSPSTLVPSGLPEFKDSSSSLTDPQVSYVKSPAAERRSGAVAGGPDTPSAQPLGPPALQPGPGLSTKSPQPSPSSRKSPLSLSPAFQVPLGPAEQGSSPLLSPVLSDAGGAGMDCEEPRHKRVPADEAYFIVKEILATERTYLKDLEVITVWFRSAVVKEDAMPATLMTLLFSNIDPIYEFHRGFLREVEQRLALWEGPSKAHTKGSHQRIGDILLRNMRQLKEFTSYFQRHDEVLTELEKATKRCKKLEAVYKEFELQKVCYLPLNTFLLKPIQRLLHYRLLLRRLCGHYSPGHHDYADCHDALKAITEVTTTLQHILIRLENLQKLTELQRDLVGIENLIAPGREFIREGCLHKLTKKGLQQRMFFLFSDMLLYTSKGVAGTSHFRIRGLLPLQGMLVEESDNEWSVPHCFTIYAAQKTIVVAASTRLEKEKWMLDLNSAIQAAKSGGDTAPALPGRTVCTRPPRSPNEVSLEQESEDDARGVRSSLEGHGQHRANTTMHVCWYRNTSVSRADHSAAVENQLSGYLLRKFKNSHGWQKLWVVFTNFCLFFYKTHQDDYPLASLPLLGYSVSIPREADGIHKDYVFKLQFKSHVYFFRAESKYTFERWMEVIQGASSSAGRAPSIVQDGPQPSSGLEGMVRGKEE

SEQ ID NO: 16644 - protein, 647 aa, Homo sapiens
MGEIEGTYRVLQTAGMRLGAQTPVGVSTLEPGQTLLPRMQEKHLHLRVKLLDNTMEIFDIEPKCDGQVLLTQVWKRLNLVECDYFGMEFQNTQSYWIWLEPMKPIIRQIRRPKNVVLRLAVKFFPPDPGQLQEEYTRYLFALQLKRDLLEERLTCADTTAALLTSHLLQSEIGDYDETLDREHLKVNEYLPGQQHCLEKILEFHQKHVGQTPAESDFQVLEIARKLEMYGIRFHMASDREGTKIQLAVSHMGVLVFQGTTKINTFNWSKVRKLSFKRKRFLIKLHPEVHGPYQDTLEFLLGSRDECKNFWKICVEYHTFFRLLDQPKPKAKAVFFSRGSSFRYSGRTQKQLVDYFKDSGMKRIPYERRHSKTHTSVRALTADLPKQSISFPEGLRTPASPSSANAFYSLSPSTLVPSGLPEFKDSSSSLTDPQVSYVKSPAAERRSGAVAGGPDTPSAQPLGPPALQPGPGLSTKSPQPSPSSRKSPLSLSPAFQVPLGPAEQGSSPLLSPVLSDAGGAGMDCEEPRHKRVPADEAYFIVKEILATERTYLKDLEVITVWFRSAVVKEDAMPATLMTLLFSNIDPIYEFHRGFLREVEQRLALWEGPSKAHTKGSHQRIGDILLRNMRQLKVFQLHEGHVAGVTKME

SEQ ID NO: 16645 - protein, 638 aa, Homo sapiens
MGEIEGTYRVLQTAGMRLGAQTPVGVSTLEPGQTLLPRMQEKHLHLRVKLLDNTMEIFDIEPKCDGQVLLTQVWKRLNLVECDYFGMEFQNTQSYWIWLEPMKPIIRQIRRPKNVVLRLAVKFFPPDPGQLQEEYTRYLFALQLKRDLLEERLTCADTTAALLTSHLLQSEIGDYDETLDREHLKVNEYLPGQQHCLEKILEFHQKHVGQTPAESDFQVLEIARKLEMYGIRFHMASDREGTKIQLAVSHMGVLVFQGTTKINTFNWSKVRKLSFKRKRFLIKLHPEVHGPYQDTLEFLLGSRDECKNFWKICVEYHTFFRLLDQPKPKAKAVFFSRGSSFRYSGRTQKQLVDYFKDSGMKRIPYERRHSKTHTSVRALTADLPKQSISFPEGLRTPASPSSANAFYSLSPSTLVPSGLPEFKDSSSSLTDPQVSYVKSPAAERRSGAVAGGPDTPSAQPLGPPALQPGPGLSTKSPQPSPSSRKSPLSLSPAFQVPLGPAEQGSSPLLSPVLSDAGGAGMDCEEPRHKRVPADEAYFIVKEILATERTYLKDLEVITVWFRSAVVKEDAMPATLMTLLFSNIDPIYEFHRGFLREVEQRLALWEGPSKAHTKGSHQRIGDILLRNMRQLKAAHEFTT

SEQ ID NO: 16646 - protein, 375 aa, Homo sapiens
MAVTEASLLRQCPLLLPQNRSKTVYEGFISAQGRDFHLRIVLPEDLQLKNARLLCSWQLRTILSGYHRIVQQRMQHSPDLMSFMMELKMLLEVALKNRQELYALPPPPQFYSSLIEEIGTLGWDKLVYADTCFSTIKLKAEDASGREHLITLKLKAKYPAESPDYFVDFPVPFCASWTPQSSLISIYSQFLAAIESLKAFWDVMDEIDEKTWVLEPEKPPRSATARRIALGNNVSINIEVDPRHPTMLPECFFLGADHVVKPLGIKLSRNIHLWDPENSVLQNLKDVLEIDFPARAILEKSDFTMDCGICYAYQLDGTIPDQVCDNSQCGQPFHQICLYEWLRGLLTSRQSFNIIFGECPYCSKPITLKMSGRKH

SEQ ID NO: 16647 - protein, 380 aa, Homo sapiens
MAVTEASLLRQCPLLLPQNRSKTVYEGFISAQGRDFHLRIVLPEDLQLKNARLLCSWQLRTILSGYHRIVQQRMQHSPDLMSFMMELKMLLEVALKNRQELYALPPPPQFYSSLIEEIGTLGWDKLVYADTCFSTIKLKAEDASGREHLITLKLKAKYPAESPDYFVDFPVPFCASWTPQVNSPQSSLISIYSQFLAAIESLKAFWDVMDEIDEKTWVLEPEKPPRSATARRIALGNNVSINIEVDPRHPTMLPECFFLGADHVVKPLGIKLSRNIHLWDPENSVLQNLKDVLEIDFPARAILEKSDFTMDCGICYAYQLDGTIPDQVCDNSQCGQPFHQICLYEWLRGLLTSRQSFNIIFGECPYCSKPITLKMSGRKH

SEQ ID NO: 16648 - protein, 4349 aa, Homo sapiens
MTIALLGFAIFLLHCATCEKPLEGILSSSAWHFTHSHYNATIYENSSPKTYVESFEKMGIYLAEPQWAVRYRIISGDVANVFKTEEYVVGNFCFLRIRTKSSNTALLNREVRDSYTLIIQATEKTLELEALTRVVVHILDQNDLKPLFSPPSYRVTISEDMPLKSPICKVTATDADLGQNAEFYYAFNTRSEMFAIHPTSGVVTVAGKLNVTWRGKHELQVLAVDRMRKISEGNGFGSLAALVVHVEPALRKPPAIASVVVTPPDSNDGTTYATVLVDANSSGAEVESVEVVGGDPGKHFKAIKSYARSNEFSLVSVKDINWMEYLHGFNLSLQARSGSGPYFYSQIRGFHLPPSKLSSLKFEKAVYRVQLSEFSPPGSRVVMVRVTPAFPNLQYVLKPSSENVGFKLNARTGLITTTKLMDFHDRAHYQLHIRTSPGQASTVVVIDIVDCNNHAPLFNRSSYDGTLDENIPPGTSVLAVTATDRDHGENGYVTYSIAGPKALPFSIDPYLGIISTSKPMDYELMKRIYTFRVRASDWGSPFRREKEVSIFLQLRNLNDNQPMFEEVNCTGSIRQDWPVGKSIMTMSAIDVDELQNLKYEIVSGNELEYFDLNHFSGVISLKRPFINLTAGQPTSYSLKITASDGKNYASPTTLNITVVKDPHFEVPVTCDKTGVLTQFTKTILHFIGLQNQESSDEEFTSLSTYQINHYTPQFEDHFPQSIDVLESVPINTPLARLAATDPDAGFNGKLVYVIADGNEEGCFDIELETGLLTVAAPLDYEATNFYILNVTVYDLGTPQKSSWKLLTVNVKDWNDNAPRFPPGGYQLTISEDTEVGTTIAELTTKDADSEDNGRVRYTLLSPTEKFSLHPLTGELVVTGHLDRESEPRYILKVEARDQPSKGHQLFSVTDLIITLEDVNDNSPQCITEHNRLKVPEDLPPGTVLTFLDASDPDLGPAGEVRYVLMDGAHGTFRVDLMTGALILERELDFERRAGYNLSLWASDGGRPLARRTLCHVEVIVLDVNENLHPPHFASFVHQGQVQENSPSGTQVIVVAAQDDDSGLDGELQYFLRAGTGLAAFSINQDTGMIQTLAPLDREFASYYWLTVLAVDRGSVPLSSVTEVYIEVTDANDNPPQMSQAVFYPSIQEDAPVGTSVLQLDAWDPDSSSKGKLTFNITSGNYMGFFMIHPVTGLLSTAQQLDRENKDEHILEVTVLDNGEPSLKSTSRVVVGILDVNDNPPIFSHKLFNVRLPERLSPVSPGPVYRLVASDLDEGLNGRVTYSIEDSDEEAFSIDLVTGVVSSSSTFTAGEYNILTIKATDSGQPPLSASVRLHIEWIPWPRPSSIPLAFDETYYSFTVMETDPVNHMVGVISVEGRPGLFWFNISGGDKDMDFDIEKTTGSIVIARPLDTRRRSNYNLTVEVTDGSRTIATQVHIFMIANINHHRPQFLETRYEVRVPQDTVPGVELLRVQAIDQDKGKSLIYTIHGSQDPGSASLFQLDPSSGVLVTVGKLDLGSGPSQHTLTVMVRDQEIPIKRNFVWVTIHVEDGNLHPPRFTQLHYEASVPDTIAPGTELLQVRAMDADRGVNAEVHYSLLKGNSEGFFNINALLGIITLAQKLDQANHAPHTLTVKAEDQGSPQWHDLATVIIHVYPSDRSAPIFSKSEYFVEIPESIPVGSPILLVSAMSPSEVTYELREGNKDGVFSMNSYSGLISTQKKLDHEKISSYQLKIRGSNMAGAFTDVMVVVDIIDENDNAPMFLKSTFVGQISEAAPLYSMIMDKNNNPFVIHASDSDKEANSLLVYKILEPEALKFFKIDPSMGTLTIVSEMDYESMPSFQFCVYVHDQGSPVLFAPRPAQVIIHVRDVNDSPPRFSEQIYEVAIVGPIHPGMELLMVRASDEDSEVNYSIKTGNADEAVTIHPVTGSISVLNPAFLGLSRKLTIRASDGLYQDTALVKISLTQVLDKSLQFDQDVYWAAVKENLQDRKALVILGAQGNHLNDTLSYFLLNGTDMFHMVQSAGVLQTRGVAFDREQQDTHELAVEVRDNRTPQRVAQGLVRVSIEDVNDNPPKFKHLPYYTIIQDGTEPGDVLFQVSATDEDLGTNGAVTYEFAEDYTYFRIDPYLGDISLKKPFDYQALNKYHLKVIARDGGTPSLQSEEEVLVTVRNKSNPLFQSPYYKVRVPENITLYTPILHTQARSPEGLRLIYNIVEEEPLMLFTTDFKTGVLTVTGPLDYESKTKHVFTVRATDTALGSFSEATVEVLVEDVNDNPPTFSQLVYTTSISEGLPAQTPVIQLLASDQDSGRNRDVSYQIVEDGSDVSKFFQINGSTGEMSTVQELDYEAQQHFHVKVRAMDKGDPPLTGETLVVVNVSDINDNPPEFRQPQYEANVSELATCGHLVLKVQAIDPDSRDTSRLEYLILSGNQDRHFFINSSSGIISMFNLCKKHLDSSYNLRVGASDGVFRATVPVYINTTNANKYSPEFQQHLYEAELAENAMVGTKVIDLLAIDKDSGPYGTIDYTIINKLASEKFSINPNGQIATLQKLDRENSTERVIAIKVMARDGGGRVAFCTVKIILTDENDNPPQFKASEYTVSIQSNVSKDSPVIQVLAYDADEGQNADVTYSVNPEDLVKDVIEINPVTGVVKVKDSLVGLENQTLDFFIKAQDGGPPHWNSLVPVRLQVVPKKVSLPKFSEPLYTFSAPEDLPEGSEIGIVKAVAAQDPVIYSLVRGTTPESNKDGVFSLDPDTGVIKVRKPMDHESTKLYQIDVMAHCLQNTDVVSLVSVNIQVGDVNDNRPVFEADPYKAVLTENMPVGTSVIQVTAIDKDTGRDGQVSYRLSADPGSNVHELFAIDSESGWITTLQELDCETCQTYHFHVVAYDHGQTIQLSSQALVQVSITDENDNAPRFASEEYRGSVVENSEPGELVATLKTLDADISEQNRQVTCYITEGDPLGQFGISQVGDEWRISSRKTLDREHTAKYLLRVTASDGKFQASVTVEIFVLDVNDNSPQCSQLLYTGKVHEDVFPGHFILKVSATDLDTDTNAQITYSLHGPGAHEFKLDPHTGELTTLTALDRERKDVFNLVAKATDGGGRSCQADITLHVEDVNDNAPRFFPSHCAVAVFDNTTVKTPVAVVFARDPDQGANAQVVYSLPDSAEGHFSIDATTGVIRLEKPLQVRPQAPLELTVRASDLGTPIPLSTLGTVTVSVVGLEDYLPVFLNTEHSVQVPEDAPPGTEVLQLATLTRPGAEKTGYRVVSGNEQGRFRLDARTGILYVNASLDFETSPKYFLSIECSRKSSSSLSDVTTVMVNITDVNEHRPQFPQDPYSTRVLENALVGDVILTVSATDEDGPLNSDITYSLIGGNQLGHFTIHPKKGELQVAKALDREQASSYSLKLRATDSGQPPLHEDTDIAIQVADVNDNPPRFFQLNYSTTVQENSPIGSKVLQLILSDPDSPENGPPYSFRITKGNNGSAFRVTPDGWLVTAEGLSRRAQEWYQLQIQASDSGIPPLSSLTSVRVHVTEQSHYAPSALPLEIFITVGEDEFQGGMVGKIHATDRDPQDTLTYSLAEEETLGRHFSVGAPDGKIIAAQGLPRGHYSFNVTVSDGTFTTTAGVHVYVWHVGQEALQQAMWMGFYQLTPEELVSDHWRNLQRFLSHKLDIKRANIHLASLQPAEAVAGVDVLLVFEGHSGTFYEFQELASIITHSAKEMEHSVGVQMRSAMPMVPCQGPTCQGQICHNTVHLDPKVGPTYSTARLSILTPRHHLQRSCSCNGTATRFSGQSYVRYRAPAARNWHIHFYLKTLQPQAILLFTNETASVSLKLASGVPQLEYHCLGGFYGNLSSQRHVNDHEWHSILVEEMDASIRLMVDSMGNTSLVVPENCRGLRPERHLLLGGLILLHSSSNVSQGFEGCLDAVVVNEEALDLLAPGKTVAGLLETQALTQCCLHSDYCSQNTCLNGGKCSWTHGAGYVCKCPPQFSGKHCEQGRENCTFAPCLEGGTCILSPKGASCNCPHPYTGDRCEMEARGCSEGHCLVTPEIQRGDWGQQELLIITVAVAFIIISTVGLLFYCRRCKSHKPVAMEDPDLLARSVGVDTQAMPAIELNPLSASSCNNLNQPEPSKASVPNELVTFGPNSKQRPVVCSVPPRLPPAAVPSHSDNEPVIKRTWSSEEMVYPGGAMVWPPTYSRNERWEYPHSEVTQGPLPPSAHRHSTPVVMPEPNGLYGGFPFPLEMENKRAPLPPRYSNQNLEDLMPSRPPSPRERLVAPCLNEYTAISYYHSQFRQGGGGPCLADGGYKGVGMRLSRAGPSYAVCEVEGAPLAGQGQPRVPPNYEGSDMVESDYGSCEEVMF

SEQ ID NO: 16649 - protein, 443 aa, Homo sapiens
MLPCASCLPGSLLLWALLLLLLGSASPQDSEEPDSYTECTDGYEWDPDSQHCRDVNECLTIPEACKGEMKCINHYGGYLCLPRSAAVINDLHGEGPPPPVPPAQHPNPCPPGYEPDDQDSCVDVDECAQALHDCRPSQDCHNLPGSYQCTCPDGYRKIGPECVDIDECRYRYCQHRCVNLPGSFRCQCEPGFQLGPNNRSCVDVNECDMGAPCEQRCFNSYGTFLCRCHQGYELHRDGFSCSDIDECSYSSYLCQYRCINEPGRFSCHCPQGYQLLATRLCQDIDECESGAHQCSEAQTCVNFHGGYRCVDTNRCVEPYIQVSENRCLCPASNPLCREQPSSIVHRYMTITSERSVPADVFQIQATSVYPGAYNAFQIRAGNSQGDFYIRQINNVSAMLVLARPVTGPREYVLDLEMVTMNSLMSYRASSVLRLTVFVGAYTF

SEQ ID NO: 16650 - protein, 847 aa, Homo sapiens
MKKTPVFLESLVTNMLRLRAICPFSWRVFQFRPISCEPLIIQMNKCTDEEQMFGFIERNKAILSEKQVGCAFDMLWKLQKQKTSLLKNAEYVRDHPQFLTLHNLATNKFKLMNDDTLVNVLYVTQQFAGEAHDPLVEALVTEAWRRLERFDIKLLSEFSSCLADQHLYFSPLMGKIADIVHRNLETTQDLSSLSVLMVNISSLISRHFQQQLVNKTELLFDTIDSSEVNVAKSIAKFLRNVRYRYQPLLERCNNVFLSNVDHLDLDSISKILSVYKFLQFNSFEFIIMAKKKLTEMIPLCNHPASFVKLFVALGPIAGPEEKKQLKSTMLLMSEDLTGEQALAVLGAMGDMESRNSCLIKRVTSVLHKHLDGYKPLELLKITQELTFLHFQRKEFFAKLRELLLSYLKNSFIPTEVSVLVRAISLLPSPHLDEVGISRIEAVLPQCDLNNLSSFATSVLRWIQHDHMYLDNMTAKQLKLLQKLDHYGRQRLQHSNSLDLLRKELKSLKGNTFPESLLEEMIATLQHFMDDINYINVGEIASFISSTDYLSTLLLDRIASVAVQQIEKIHPFTIPAIIRPFSVLNYDPPQRDEFLGTCVQHLNSYLGILDPFILVFLGFSLATLEYFPEDLLKAIFNIKFLARLDSQLEILSPSRSARVQFHLMELNRSVCLECPEFQIPWFHDRFCQQYNKGIGGMDGTQQQIFKMLAEVLGGINCVKASVLTPYYHKVDFECILDKRKKPLPYGSHNIALGQLPEMPWESNIEIVGSRLPPGAERIALEFLDSKALCRNIPHMKGKSAMKKRHLEILGYRVIQISQFEWNSMALSTKDARMDYLRECIFGEVKSCL

SEQ ID NO: 16651 - protein, 804 aa, Homo sapiens
MKKTPVFLESLVTNMLRLRAICPFSWRVFQFRPISCEPLIIQMNKCTDEEQMFGFIERNKAILSEKQVGCAFDMLWKLQKQKTSLLKNAEYVRDHPQFLTLHNLATNKFKLMNDDTLVNVLYVTQQFAGEAHDPLVEALVTEAWRRLERFDIKLLSEFSSCLADQHLYFSPLMGKIADIVHRNLETTQDLSSLSVLMVNISSLISRHFQQQLVNKTELLFDTIDSSEVNVAKSIAKFLRNVRYRYQPLLERCNNVFLSNVDHLDLDSISKILSVYKFLQFNSFEFIIMAKKKLTEMIPLCNHPASFVKLFVALGPIAGPEEKKQLKSTMLLMSEDLTGEQALAVLGAMGDMESRNSCLIKRVTSVLHKHLDGYKPLELLKITQELTFLHFQRKEFFAKLRELLLSYLKNSFIPTEVSVLVRAISLLPSPHLDEVGISRIEAVLPQCDLNNLSSFATSVLRWIQHDHMYLDNMTAKQLKLLQKLDHYGRQRLQHSNSLDLLRKELKSLKGNTFPESLLEEMIATLQHFMDDINYINVGEIASFISSTDYLSTLLLDRIASVAVQQIEKIHPFTIPAIIRPFSVLNYDPPQRDEFLGTCVQHLNSYLGILDPFILVFLGFSLATLEYFPEDLLKAIFNIKFLARLDSQLESIGGMDGTQQQIFKMLAEVLGGINCVKASVLTPYYHKVDFECILDKRKKPLPYGSHNIALGQLPEMPWESNIEIVGSRLPPGAERIALEFLDSKALCRNIPHMKGKSAMKKRHLEILGYRVIQISQFEWNSMALSTKDARMDYLRECIFGEVKSCL

SEQ ID NO: 16652 - protein, 2048 aa, Homo sapiens
MSGRQRTLFQTWGSSISRSSGTPGCSSGTERPQSPGSSKAPLPAAAEAQLESDDDVLLVAAYEAERQLCLENGGFCTSAGALWIYPTNCPVRDYQLHISRAALFCNTLVCLPTGLGKTFIAAVVMYNFYRWFPSGKVVFMAPTKPLVTQQIEACYQVMGIPQSHMAEMTGSTQASTRKEIWCSKRVLFLTPQVMVNDLSRGACPAAEIKCLVIDEAHKALGNYAYCQVVRELVKYTNHFRILALSATPGSDIKAVQQVITNLLIGQIELRSEDSPDILTYSHERKVEKLIVPLGEELAAIQKTYIQILESFARSLIQRNVLMRRDIPNLTKYQIILARDQFRKNPSPNIVGIQQGIIEGEFAICISLYHGYELLQQMGMRSLYFFLCGIMDGTKGMTRSKNELGRNEDFMKLYNHLECMFARTRSTSANGISAIQQGDKNKKFVYSHPKLKKLEEVVIEHFKSWNAENTTEKKRDETRVMIFSSFRDSVQEIAEMLSQHQPIIRVMTFVGHASGKSTKGFTQKEQLEVVKQFRDGGYNTLVSTCVGEEGLDIGEVDLIICFDSQKSPIRLVQRMGRTGRKRQGRIVIILSEGREERIYNQSQSNKRSIYKAISSNRQVLHFYQRSPRMVPDGINPKLHKMFITHGVYEPEKPSRNLQRKSSIFSYRDGMRQSSLKKDWFLSEEEFKLWNRLYRLRDSDEIKEITLPQVQFSSLQNEENKPAQESTTGIHQLSLSEWRLWQDHPLPTHQVDHSDRCRHFIGLMQMIEGMRHEEGECSYELEVESYLQMEDVTSTFIAPRNESNNLASDTFITHKKSSFIKNINQGSSSSVIESDEECAEIVKQTHIKPTKIVSLKKKVSKEIKKDQLKKENNHGIIDSVDNDRNSTVENIFQEDLPNDKRTSDTDEIAATCTINENVIKEPCVLLTECQFTNKSTSSLAGNVLDSGYNSFNDEKSVSSNLFLPFEEELYIVRTDDQFYNCHSLTKEVLANVERFLSYSPPPLSGLSDLEYEIAKGTALENLLFLPCAEHLRSDKCTCLLSHSAVNSQQNLELNSLKCINYPSEKSCLYDIPNDNISDEPSLCDCDVHKHNQNENLVPNNRVQIHRSPAQNLVGENNHDVDNSDLPVLSTDQDESLLLFEDVNTEFDDVSLSPLNSKSESLPVSDKTAISETPLVSQFLISDELLLDNNSELQDQITRDANSFKSRDQRGVQEEKVKNHEDIFDCSRDLFSVTFDLGFCSPDSDDEILEHTSDSNRPLDDLYGRYLEIKEISDANYVSNQALIPRDHSKNFTSGTVIIPSNEDMQNPNYVHLPLSAAKNEELLSPGYSQFSLPVQKKVMSTPLSKSNTLNSFSKIRKEILKTPDSSKEKVNLQRFKEALNSTFDYSEFSLEKSKSSGPMYLHKSCHSVEDGQLLTSNESEDDEIFRRKVKRAKGNVLNSPEDQKNSEVDSPLHAVKKRRFPINRSELSSSDESENFPKPCSQLEDFKVCNGNARRGIKVPKRQSHLKHVARKFLDDEAELSEEDAEYVSSDENDESENEQDSSLLDFLNDETQLSQAINDSEMRAIYMKSLRSPMMNNKYKMIHKTHKNINIFSQIPEQDETYLEDSFCVDEEESCKGQSSEEEVCVDFNLITDDCFANSKKYKTRRAVMLKEMMEQNCAHSKKKLSRIILPDDSSEEENNVNDKRESNIAVNPSTVKKNKQQDHCLNSVPSGSSAQSKVRSTPRVNPLAKQSKQTSLNLKDTISEVSDFKPQNHNEVQSTTPPFTTVDSQKDCRKFPVPQKDGSALEDSSTSGASCSKSRPHLAGTHTSLRLPQEGKGTCILVGGHEITSGLEVISSLRAIHGLQVEVCPLNGCDYIVSNRMVVERRSQSEMLNSVNKNKFIEQIQHLQSMFERICVIVEKDREKTGDTSRMFRRTKSYDSLLTTLIGAGIRILFSSCQEETADLLKELSLVEQRKNVGIHVPTVVNSNKSEALQFYLSIPNISYITALNMCHQFSSVKRMANSSLQEISMYAQVTHQKAEEIYRYIHYVFDIQMLPNDLNQDRLKSDI

SEQ ID NO: 16653 - protein, 669 aa, Homo sapiens
MSGRQRTLFQTWGSSISRSSGTPGCSSGTERPQSPGSSKAPLPAAAEAQLESDDDVLLVAAYEAERQLCLENGGFCTSAGALWIYPTNCPVRDYQLHISRAALFCNTLVCLPTGLGKTFIAAVVMYNFYRWFPSGKVVFMAPTKPLVTQQIEACYQVMGIPQSHMAEMTGSTQASTRKEIWCSKRVLFLTPQVMVNDLSRGACPAAEIKCLVIDEAHKALGNYAYCQVVRELVKYTNHFRILALSATPGSDIKAVQQVITNLLIGQIELRSEDSPDILTYSHERKVEKLIVPLGEELAAIQKTYIQILESFARSLIQRNVLMRRDIPNLTKYQIILARDQFRKNPSPNIVGIQQGIIEGEFAICISLYHGYELLQQMGMRSLYFFLCGIMDGTKGMTRSKNELGRNEDFMKLYNHLECMFARTRSTSANGISAIQQGDKNKKFVYSHPKLKKLEEVVIEHFKSWNAENTTEKKRDETRVMIFSSFRDSVQEIAEMLSQHQPIIRVMTFVGHASGKSTKGFTQKEQLEVVKQFRDGGYNTLVSTCVGEEGLDIGEVDLIICFDSQKSPIRLVQRMGRTGRKRQGRIVIILSEGREERIYNQSQSNKRSIYKAISSNRQVLHFYQRSPRMVPDGINPKLHKMFITHGVYEPEKPSRNLQRKSSIFSYRDGK

SEQ ID NO: 16654 - protein, 2022 aa, Homo sapiens
MSGRQRTLFQTWGSSISRSSGTPGCSSGTERPQSPGSSKAPLPAAAEAQLESDDDVLLVAAYEAERQLCLENGGFCTSAGALWIYPTNCPVRDYQLHISRAALFCNTLVCLPTGLGKTFIAAVVMYNFYRWFPSGKVVFMAPTKPLVTQQIEACYQVMGIPQSHMAEMTGSTQASTRKEIWCSKRVLFLTPQVMVNDLSRGACPAAEIKCLVIDEAHKALGNYAYCQAVQQVITNLLIGQIELRSEDSPDILTYSHERKVEKLIVPLGEELAAIQKTYIQILESFARSLIQRNVLMRRDIPNLTKYQIILARDQFRKNPSPNIVGIQQGIIEGEFAICISLYHGYELLQQMGMRSLYFFLCGIMDGTKGMTRSKNELGRNEDFMKLYNHLECMFARTRSTSANGISAIQQGDKNKKFVYSHPKLKKLEEVVIEHFKSWNAENTTEKKRDETRVMIFSSFRDSVQEIAEMLSQHQPIIRVMTFVGHASGKSTKGFTQKEQLEVVKQFRDGGYNTLVSTCVGEEGLDIGEVDLIICFDSQKSPIRLVQRMGRTGRKRQGRIVIILSEGREERIYNQSQSNKRSIYKAISSNRQVLHFYQRSPRMVPDGINPKLHKMFITHGVYEPEKPSRNLQRKSSIFSYRDGMRQSSLKKDWFLSEEEFKLWNRLYRLRDSDEIKEITLPQVQFSSLQNEENKPAQESTTGIHQLSLSEWRLWQDHPLPTHQVDHSDRCRHFIGLMQMIEGMRHEEGECSYELEVESYLQMEDVTSTFIAPRNESNNLASDTFITHKKSSFIKNINQGSSSSVIESDEECAEIVKQTHIKPTKIVSLKKKVSKEIKKDQLKKENNHGIIDSVDNDRNSTVENIFQEDLPNDKRTSDTDEIAATCTINENVIKEPCVLLTECQFTNKSTSSLAGNVLDSGYNSFNDEKSVSSNLFLPFEEELYIVRTDDQFYNCHSLTKEVLANVERFLSYSPPPLSGLSDLEYEIAKGTALENLLFLPCAEHLRSDKCTCLLSHSAVNSQQNLELNSLKCINYPSEKSCLYDIPNDNISDEPSLCDCDVHKHNQNENLVPNNRVQIHRSPAQNLVGENNHDVDNSDLPVLSTDQDESLLLFEDVNTEFDDVSLSPLNSKSESLPVSDKTAISETPLVSQFLISDELLLDNNSELQDQITRDANSFKSRDQRGVQEEKVKNHEDIFDCSRDLFSVTFDLGFCSPDSDDEILEHTSDSNRPLDDLYGRYLEIKEISDANYVSNQALIPRDHSKNFTSGTVIIPSNEDMQNPNYVHLPLSAAKNEELLSPGYSQFSLPVQKKVMSTPLSKSNTLNSFSKIRKEILKTPDSSKEKVNLQRFKEALNSTFDYSEFSLEKSKSSGPMYLHKSCHSVEDGQLLTSNESEDDEIFRRKVKRAKGNVLNSPEDQKNSEVDSPLHAVKKRRFPINRSELSSSDESENFPKPCSQLEDFKVCNGNARRGIKVPKRQSHLKHVARKFLDDEAELSEEDAEYVSSDENDESENEQDSSLLDFLNDETQLSQAINDSEMRAIYMKSLRSPMMNNKYKMIHKTHKNINIFSQIPEQDETYLEDSFCVDEEESCKGQSSEEEVCVDFNLITDDCFANSKKYKTRRAVMLKEMMEQNCAHSKKKLSRIILPDDSSEEENNVNDKRESNIAVNPSTVKKNKQQDHCLNSVPSGSSAQSKVRSTPRVNPLAKQSKQTSLNLKDTISEVSDFKPQNHNEVQSTTPPFTTVDSQKDCRKFPVPQKDGSALEDSSTSGASCSKSRPHLAGTHTSLRLPQEGKGTCILVGGHEITSGLEVISSLRAIHGLQVEVCPLNGCDYIVSNRMVVERRSQSEMLNSVNKNKFIEQIQHLQSMFERICVIVEKDREKTGDTSRMFRRTKSYDSLLTTLIGAGIRILFSSCQEETADLLKELSLVEQRKNVGIHVPTVVNSNKSEALQFYLSIPNISYITALNMCHQFSSVKRMANSSLQEISMYAQVTHQKAEEIYRYIHYVFDIQMLPNDLNQDRLKSDI

SEQ ID NO: 16655 - protein, 666 aa, Homo sapiens
MGQTKSKIKSKYASYLSFIKILLKRGGVKVSTKNLIKLFQIIEQFCPWFPEQGTLDLKDWKRIGKELKQAGRKGNIIPLTVWNDWAIIKAALEPFQTEEDSVSVSDAPGSCIIDCNENTRKKSQKETEGLHCEYVAEPVMAQSTQNVDYNQLQEVIYPETLKLEGKGPELVGPSESKPRGTSPLPAGQVPVTLQPQKQVKENKTQPPVAYQYWPPAELQYRPPPESQYGYPGMPPAPQGRAPYPQPPTRRLNPTAPPSRQGSKLHEIIDKSRKEGDTEAWQFPVTLEPMPPGEGAQEGEPPTVEARYKSFSIKKLKDMKEGVKQYGPNSPYMRTLLDSIAHGHRLIPYDWEILAKSSLSPSQFLQFKTWWIDGVQEQVRRNRAANPPVNIDADQLLGIGQNWSTISQQALMQNEAIEQVRAICLRAWEKIQDPGSTCPSFNTVRQGSKEPYPDFVARLQDVAQKSIADEKARKVIVELMAYENANPECQSAIKPLKGKVPAGSDVISEYVKACDGIGGAMHKAMLMAQAITGVVLGGQVRTFGRKCYNCGQIGHLKKNCPVLNKQNITIQATTTGREPPDLCPRCKKGKHWASQCRSKFDKNGQPLSGNEQRGQPQAPQQTGAFPIQPFVPQGFQGQQPPLSQVFQGISQLPQYNNCPPPQAAVQQ

SEQ ID NO: 16656 - protein, 716 aa, Homo sapiens
MPLPEPSEQEGESVKAGQEPSPKPGTDVIPAAPRKPREFSKLVLLTASDQDEDGVGSKPQEVHCVLSLEMAGPATLASTLQILPVEEQGGVVQPALEMPEQKCSKLDAAAPQSLEFLRTPFGGRLLVLESFLYKQEKAVGDKVYWKCRQHAELGCRGRAITRGLRATVMRGHCHAPDEQGLEARRQREKLPSLALPEGLGEPQGPEGPGGRVEEPLEGVGPWQCPEEPEPTPGLVLSKPALEEEEAPRALSLLSLPPKKRSILGLGQARPLEFLRTCYGGSFLVHESFLYKREKAVGDKVYWTCRDHALHGCRSRAITQGQRVTVMRGHCHQPDMEGLEARRQQEKAVETLQAGQDGPGSQVDTLLRGVDSLLYRRGPGPLTLTRPRPRKRAKVEDQELPTQPEAPDEHQDMDADPGGPEFLKTPLGGSFLVYESFLYRREKAAGEKVYWTCRDQARMGCRSRAITQGRRVTVMRGHCHPPDLGGLEALRQREKRPNTAQRGSPGGPEFLKTPLGGSFLVYESFLYRREKAAGEKVYWTCRDQARMGCRSRAITQGRRVMVMRRHCHPPDLGGLEALRQREHFPNLAQWDSPDPLRPLEFLRTSLGGRFLVHESFLYRKEKAAGEKVYWMCRDQARLGCRSRAITQGHRIMVMRSHCHQPDLAGLEALRQRERLPTTAQQEDPEKIQVQLCFKTCSPESQQIYGDIKDVRLDGESQ

SEQ ID NO: 16657 - protein, 715 aa, Homo sapiens
MPLPEPSEQEGESVKAGQEPSPKPGTDVIPAAPRKPREFSKLVLLTASDQDEDGVGSKPQEVHCVLSLEMAGPATLASTLQILPVEEQGGVVQPALEMPEQKCSKLDAAPQSLEFLRTPFGGRLLVLESFLYKQEKAVGDKVYWKCRQHAELGCRGRAITRGLRATVMRGHCHAPDEQGLEARRQREKLPSLALPEGLGEPQGPEGPGGRVEEPLEGVGPWQCPEEPEPTPGLVLSKPALEEEEAPRALSLLSLPPKKRSILGLGQARPLEFLRTCYGGSFLVHESFLYKREKAVGDKVYWTCRDHALHGCRSRAITQGQRVTVMRGHCHQPDMEGLEARRQQEKAVETLQAGQDGPGSQVDTLLRGVDSLLYRRGPGPLTLTRPRPRKRAKVEDQELPTQPEAPDEHQDMDADPGGPEFLKTPLGGSFLVYESFLYRREKAAGEKVYWTCRDQARMGCRSRAITQGRRVTVMRGHCHPPDLGGLEALRQREKRPNTAQRGSPGGPEFLKTPLGGSFLVYESFLYRREKAAGEKVYWTCRDQARMGCRSRAITQGRRVMVMRRHCHPPDLGGLEALRQREHFPNLAQWDSPDPLRPLEFLRTSLGGRFLVHESFLYRKEKAAGEKVYWMCRDQARLGCRSRAITQGHRIMVMRSHCHQPDLAGLEALRQRERLPTTAQQEDPEKIQVQLCFKTCSPESQQIYGDIKDVRLDGESQ

SEQ ID NO: 16658 - protein, 765 aa, Homo sapiens
MPLPEPSEQEGESVKAGQEPSPKPGTDVIPAAPRKPREFSKLVLLTASDQDEDGVGSKPQEVHCVLSLEMAGPATLASTLQILPVEEQGGVVQPALEMPEQKCSKLDAAAPQSLEFLRTPFGGRLLVLESFLYKQEKAVGDKVYWKCRQHAELGCRGRAITRGLRATVMRGHCHAPDEQGLEARRQREKLPSLALPEGLGEPQGPEGPGGRVEEPLEGVGPWQCPEEPEPTPGLVLSKPALEEEEAPRALSLLSLPPKKRSILGLGQARPLEFLRTCYGGSFLVHESFLYKREKAVGDKVYWTCRDHALHGCRSRAITQGQRVTVMRGHCHQPDMEGLEARRQQEKAVETLQAGQDGPGSQVDTLLRGVDSLLYRRGPGPLTLTRPRPRKRAKVEDQELPTQPEAPDEHQDMDADPGGPEFLKTPLGGSFLVYESFLYRREKAAGEKVYWTCRDQARMGCRSRAITQGRRVTVMRGHCHPPDLGGLEALRQREKRPNTAQRGSPGAGLSFQWLFRILQLLGHAPVLLCPSGSSCLPSLPAPHGPCPALSIPLEGGPEFLKTPLGGSFLVYESFLYRREKAAGEKVYWTCRDQARMGCRSRAITQGRRVMVMRRHCHPPDLGGLEALRQREHFPNLAQWDSPDPLRPLEFLRTSLGGRFLVHESFLYRKEKAAGEKVYWMCRDQARLGCRSRAITQGHRIMVMRSHCHQPDLAGLEALRQRERLPTTAQQEDPEKIQVQLCFKTCSPESQQIYGDIKDVRLDGESQ

SEQ ID NO: 16659 - protein, 391 aa, Homo sapiens
MRGHCHQPDMEGLEARRQQEKAVETLQAGQDGPGSQVDTLLRGVDSLLYRRGPGPLTLTRPRPRKRAKVEDQELPTQPEAPDEHQDMDADPGGPEFLKTPLGGSFLVYESFLYRREKAAGEKVYWTCRDQARMGCRSRAITQGRRVTVMRGHCHPPDLGGLEALRQREKRPNTAQRGSPGGPEFLKTPLGGSFLVYESFLYRREKAAGEKVYWTCRDQARMGCRSRAITQGRRVMVMRRHCHPPDLGGLEALRQREHFPNLAQWDSPDPLRPLEFLRTSLGGRFLVHESFLYRKEKAAGEKVYWMCRDQARLGCRSRAITQGHRIMVMRSHCHQPDLAGLEALRQRERLPTTAQQEDPEKIQVQLCFKTCSPESQQIYGDIKDVRLDGESQ

SEQ ID NO: 16660 - protein, 328 aa, Homo sapiens
MPQATSPPLWPLSLHGGKGILWARHSHPPGPPSHHIQDSGRCSLPLPQSPGVTPLPARLSGATPLSPIRLLSSFVPRGPRVIPLTNQARRTLHASLGGCWGRTSDAADTASLKAWQGGPEFLKTPLGGSFLVYESFLYRREKAAGEKVYWTCRDQARMGCRSRAITQGRRVMVMRRHCHPPDLGGLEALRQREHFPNLAQWDSPDPLRPLEFLRTSLGGRFLVHESFLYRKEKAAGEKVYWMCRDQARLGCRSRAITQGHRIMVMRSHCHQPDLAGLEALRQRERLPTTAQQEDPEKIQVQLCFKTCSPESQQIYGDIKDVRLDGESQ

SEQ ID NO: 16661 - protein, 408 aa, Homo sapiens
MNLPRAERPRSTPQRSLRDSDGEDGKIDVLGEEEDEDEVEDEEEEASQKFLEQSLQPGLQVARWGGVALPREHIEGGGPSDPSEFGTEFRAPPRSAAASEDARQPAKPPYSYIALITMAILQSPHKRLTLSGICAFISGRFPYYRRKFPAWQNSIRHNLSLNDCFVKIPREPGHPGKGTYWSLDPASQDMFDNGSFLRRRKRFKRHQLTPGAHLPHPFPLPAAHAALHNPRPGPLLGAPALPQPVPGAYPNTAPGRRPYALLHPHPPRYLLLSAPAYAGAPKKAEGADLATPGTLPVLQPSLGPQPWEEGKGLASPPGGGCISFSIESIMQGVRGAGTGAAQSLSPTAWSYCPLLQRPSSLSDNFAATAAASGGGLRQRLRSHQGRGAGRAPVGRVGAAAVSGGGRGL

SEQ ID NO: 16662 - protein, 417 aa, Homo sapiens
MNLPRAERLRSTPQRSLRDSDGEDGKIDVLGEEEDEDEVEDEEEAASQQFLEQSLQPGLQVARWGGVALPREHIEGGGGPSDPSEFGTKFRAPPRSAAASEDARQPAKPPYSYIALITMAILQNPHKRLTLSGICAFISGRFPYYRRKFPAWQNSIRHNLSLNDCFVKIPREPGHPGKGNYWSLDPASQDMFDNGSFLRRRKRFKRHQLTPGAHLPHPFPLPAAHAALHNPRPGPLLGAPAPPQPVPGAYPNTAPGRRPYALLHPHPLRYLLLSAPVYAGAPKKAEGAALATPAPFPCCSPHLVLSLGRRARVWRRHREADASLSALRVLCKGSGERVQGLRRICPRPRGATATCSSDHQACCIPRPLPLCCKCPPPPLLGQFCSNSSSIRRRTAPTAALPPRARCWAGTCRPRRPC

SEQ ID NO: 16663 - protein, 398 aa, Homo sapiens
MMSMLGGLQRYFRVILLLLLALTLLLLAGFLHSDLELDTPLFGGQAEGPPVTNIMFLKTHKTASSTVLNILYRFAETHNLSVALPAGSRVHLGYPWLFLARYVEGVGSQQRFNIMCNHLRFNLPQVQKVMPNDTFYFSILRNPVFQLESSFIYYKTYAPAFRGAPSLDAFLASPRTFYNDSRHLRNVYAKNNMWFDFGFDPNAQCEEGYVRARIAEVERRFRLVLIAEHLDESLVLLRRRLRWALDDVVAFRLNSRSARSVARLSPETRERARSWCALDWRLYEHFNRTLWAQLRAELGPRRLRGEVERLRARRRELASLCLQDGGALKNHTQIRDPRLRPYQSGKADILGYNLRPGLDNQTLGVCQRLVMPELQYMARLYALQFPEKPLKNIPFLGA

SEQ ID NO: 16664 - protein, 486 aa, Homo sapiens
MWKSVVGHDVSVSVETQGDDWDTDPDFVNDISEKEQRWGAKTIEGSGRTEHINIHQLRNKVSEEHDVLRKKEMESGPKASHGYGGRFGVERDRMDKSAVGHEYVAEVEKHSSQTDAAKGFGGKYGVERDRADKSAVGFDYKGEVEKHTSQKDYSRGFGGRYGVEKDKWDKAALGYDYKGETEKHESQRDYAKGFGGQYGIQKDRVDKSAVGFNEMEAPTTAYKKTTPIEAASSGTRGLKAKFESMAEEKRKREEEEKAQQVARRQQERKAVTKRSPEAPQPVIAMEEPAVPAPLPKKISSEAWPPVGTPPSSESEPVRTSREHPVPLLPIRQTLPEDNEEPPALPPRTLEGLQVEEEPVYEAEPEPEPEPEPEPENDYEDVEEMDRHEQEDEPEGDYEEVLEPEDSSFSSALAGSSGCPAGAGAGAVALGISAVAVYDYQGEGSDELSFDPDDVITDIEMVDEGWWRGRCHGHFGLFPANYVKLLE

SEQ ID NO: 16665 - protein, 209 aa, Homo sapiens
MWKSVVGHDVSVSVETQGDDWDTDPDFVNDISEKEQRWGAKTIEGSGRTEHINIHQLRNKVSEEHDVLRKKEMESGPKASHGYGGRFGVERDRMDKSAVGHEYVAEVEKHSSQTDAAKGFGGKYGVERDRADKITLVALVAGTGWRRINGTKQLWDMTTRERRRNTSPREIMPRALVASMESRRTEWIRALSASMKWRPRPQLIRRRRP

SEQ ID NO: 16666 - protein, 890 aa, Homo sapiens
MEGGGKPNSSSNSRDDGNSVFPAKASATGAGPAAAEKRLGTPPGGGGAGAKEHGNSVCFKVDGGGGGGGGGGGGEEPAGGFEDAEGPRRQYGFMQRQFTSMLQPGVNKFSLRMFGSQKAVEKEQERVKTAGFWIIHPYSDFRFYWDLIMLIMMVGNLVIIPVGITFFTEQTTTPWIIFNVASDTVFLLDLIMNFRTGTVNEDSSEIILDPKVIKMNYLKSWFVVDFISSIPVDYIFLIVEKGMDSEVYKTARALRIVRFTKILSLLRLLRLSRLIRYIHQWEEIFHMTYDLASAVVRIFNLIGMMLLLCHWDGCLQFLVPLLQDFPPDCWVSLNEMVNDSWGKQYSYALFKAMSHMLCIGYGAQAPVSMSDLWITMLSMIVGATCYAMFVGHATALIQSLDSSRRQYQEKYKQVEQYMSFHKLPADMRQKIHDYYEHRYQGKIFDEENILNELNDPLREEIVNFNCRKLVATMPLFANADPNFVTAMLSKLRFEVFQPGDYIIREGAVGKKMYFIQHGVAGVITKSSKEMKLTDGSYFGEICLLTKGRRTASVRADTYCRLYSLSVDNFNEVLEEYPMMRRAFETVAIDRLDRIGKKNSILLQKFQKDLNTGVFNNQENEILKQIVKHDREMVQAIAPINYPQMTTLNSTSSTTTPTSRMRTQSPPVYTATSLSHSNLHSPSPSTQTPQPSAILSPCSYTTAVCSPPVQSPLAARTFHYASPTASQLSLMQQQPQQQVQQSQPPQTQPQQPSPQPQTPGSSTPKNEVHKSTQALHNTNLTREVRPLSASQPSLPHEVSTLISRPHPTVGESLASIPQPVTAVPGTGLQAGGRSTVPQRVTLFRQMSSGAIPPNRGVPPAPPPPAAALPRESSSVLNTDPDAEKPRFASNL

SEQ ID NO: 16667 - protein, 889 aa, Homo sapiens
MDARGGGGRPGESPGATPAPGPPPPPPPAPPQQQPPPPPPPAPPPGPGPAPPQHPPRAEALPPEAADEGGPRGRLRSRDSSCGRPGTPGAASTAKGSPNGECGRGEPQCSPAGPEGPARGPKVSFSCRGAASGPAPGPGPAEEAGSEEAGPAGEPRGSQASFMQRQFGALLQPGVNKFSLRMFGSQKAVEREQERVKSAGAWIIHPYSDFRFYWDFTMLLFMVGNLIIIPVGITFFKDETTAPWIVFNVVSDTFFLMDLVLNFRTGIVIEDNTEIILDPEKIKKKYLRTWFVVDFVSSIPVDYIFLIVEKGIDSEVYKTARALRIVRFTKILSLLRLLRLSRLIRYIHQWEEIFHMTYDLASAVMRICNLISMMLLLCHWDGCLQFLVPMLQDFPRNCWVSINGMVNHSWSELYSFALFKAMSHMLCIGYGRQAPESMTDIWLTMLSMIVGATCYAMFIGHATALIQSLDSSRRQYQEKYKQVEQYMSFHKLPADFRQKIHDYYEHRYQGKMFDEDSILGELNGPLREEIVNFNCRKLVASMPLFANADPNFVTAMLTKLKFEVFQPGDYIIREGTIGKKMYFIQHGVVSVLTKGNKEMKLSDGSYFGEICLLTRGRRTASVRADTYCRLYSLSVDNFNEVLEEYPMMRRAFETVAIDRLDRIGKKNSILLHKVQHDLNSGVFNNQENAIIQEIVKYDREMVQQAELGQRVGLFPPPPPPPQVTSAIATLQQAAAMSFCPQVARPLVGPLALGSPRLVRRPPPGPAPAAASPGPPPPASPPGAPASPRAPRTSPYGGLPAAPLAGPALPARRLSRASRPLSASQPSLPHGAPGPAASTRPASSSTPRLGPTPAARAAAPSPDRRDSASPGAAGGLDPQDSARSRLSSNL

SEQ ID NO: 16668 - protein, 774 aa, Homo sapiens
MEAEQRPAAGASEGATPGLEAVPPVAPPPATAASGPIPKSGPEPKRRHLGTLLQPTVNKFSLRVFGSHKAVEIEQERVKSAGAWIIHPYSDFRFYWDLIMLLLMVGNLIVLPVGITFFKEENSPPWIVFNVLSDTFFLLDLVLNFRTGIVVEEGAEILLAPRAIRTRYLRTWFLVDLISSIPVDYIFLVVELEPRLDAEVYKTARALRIVRFTKILSLLRLLRLSRLIRYIHQWEEIFHMTYDLASAVVRIFNLIGMMLLLCHWDGCLQFLVPMLQDFPPDCWVSINHMVNHSWGRQYSHALFKAMSHMLCIGYGQQAPVGMPDVWLTMLSMIVGATCYAMFIGHATALIQSLDSSRRQYQEKYKQVEQYMSFHKLPADTRQRIHEYYEHRYQGKMFDEESILGELSEPLREEIINFTCRGLVAHMPLFAHADPSFVTAVLTKLRFEVFQPGDLVVREGSVGRKMYFIQHGLLSVLARGARDTRLTDGSYFGEICLLTRGRRTASVRADTYCRLYSLSVDHFNAVLEEFPMMRRAFETVAMDRLLRIGKKNSILQRKRSEPSPGSSGGIMEQHLVQHDRDMARGVRGRAPSTGAQLSGKPVLWEPLVHAPLQAAAVTSNVAIALTHQRGPLPLSPDSPATLLARSAWRSAGSPASPLVPVRAGPWASTSRLPAPPARTLHASLSRAGRSQVSLLGPPPGGGGRRLGPRGRPLSASQPSLPQRATGDGSPGRKGSGSERLPPSGLLAKPPRTAQPPRPPVPEPATPRGLQLSANM

SEQ ID NO: 16669 - protein, 1203 aa, Homo sapiens
MDKLPPSMRKRLYSLPQQVGAKAWIMDEEEDAEEEGAGGRQDPSRRSIRLRPLPSPSPSAAAGGTESRSSALGAADSEGPARGAGKSSTNGDCRRFRGSLASLGSRGGGSGGTGSGSSHGHLHDSAEERRLIAEGDASPGEDRTPPGLAAEPERPGASAQPAASPPPPQQPPQPASASCEQPSVDTAIKVEGGAAAGDQILPEAEVRLGQAGFMQRQFGAMLQPGVNKFSLRMFGSQKAVEREQERVKSAGFWIIHPYSDFRFYWDLTMLLLMVGNLIIIPVGITFFKDENTTPWIVFNVVSDTFFLIDLVLNFRTGIVVEDNTEIILDPQRIKMKYLKSWFMVDFISSIPVDYIFLIVETRIDSEVYKTARALRIVRFTKILSLLRLLRLSRLIRYIHQWEEIFHMTYDLASAVVRIVNLIGMMLLLCHWDGCLQFLVPMLQDFPDDCWVSINNMVNNSWGKQYSYALFKAMSHMLCIGYGRQAPVGMSDVWLTMLSMIVGATCYAMFIGHATALIQSLDSSRRQYQEKYKQVEQYMSFHKLPPDTRQRIHDYYEHRYQGKMFDEESILGELSEPLREEIINFNCRKLVASMPLFANADPNFVTSMLTKLRFEVFQPGDYIIREGTIGKKMYFIQHGVVSVLTKGNKETKLADGSYFGEICLLTRGRRTASVRADTYCRLYSLSVDNFNEVLEEYPMMRRAFETVALDRLDRIGKKNSILLHKVQHDLNSGVFNYQENEIIQQIVQHDREMAHCAHRVQAAASATPTPTPVIWTPLIQAPLQAAAATTSVAIALTHHPRLPAAIFRPPPGSGLGNLGAGQTPRHLKRLQSLIPSALGSASPASSPSQVDTPSSSSFHIQQLAGFSAPAGLSPLLPSSSSSPPPGACGSPSAPTPSAGVAATTIAGFGHFHKALGGSLSSSDSPLLTPLQPGARSPQAAQPSPAPPGARGGLGLPEHFLPPPPSSRSPSSSPGQLGQPPGELSLGLATGPLSTPETPPRQPEPPSLVAGASGGASPVGFTPRGGLSPPGHSPGPPRTFPSAPPRASGSHGSLLLPPASSPPPPQVPQRRGTPPLTPGRLTQDLKLISASQPALPQDGAQTLRRASPHSSGESMAAFPLFPRAGGGSGGSGSSGGLGPPGRPYGAIPGQHVTLPRKTSSGSLPPPLSLFGARATSSGGPPLTAGPQREPGARPEPVRSKLPSNL

SEQ ID NO: 16670 - protein, 132 aa, Homo sapiens
MLLRMSEHRNEALGNYLEMRLKSSFLRGLGSWKSNPLRLGGWTILLTLTMGQGEPGGPQGDPWVPHELLLPSLCDSSHASSWGSGSITCAWRGGDSSSHPLVSGHILSNSPVAAVMCSSMGTHLSPFKGTLL

SEQ ID NO: 16671 - protein, 354 aa, Homo sapiens
MGEQPIFSTRAHVFQIDPNTKKNWVPTSKHAVTVSYFYDSTRNVYRIISLDGSKAIINSTITPNMTFTKTSQKFGQWADSRANTVYGLGFSSEHHLSKFAEKFQEFKEAARLAKEKSQEKMELTSTPSQESAGGDLQSPLTPESINGTDDERTPDVTQNSEPRAEPTQNALPFSHSSAISKHWEAELATLKGNNAKLTAALLESTANVKQWKQQLAAYQEEAERLHKRVTELECVSSQANAVHTHKTELNQTIQELEETLKLKEEEIERLKQEIDNARELQEQRDSLTQKLQEVEIRNKDLEGQLSDLEQRLEKSQNEQEAFRNNLKTLLEILDGKIFELTELRDNLAKLLECS

SEQ ID NO: 16672 - protein, 224 aa, Homo sapiens
MGEQPIFSTRAHVFQIDPNTKKNWVPTSKHAVTVSYFYDSTRNVYRIISLDGSKAIINSTITPNMTFTKTSQKFGQWADSRANTVYGLGFSSEHHLSKVTELECVSSQANAVHTHKTELNQTIQELEETLKLKEEEIERLKQEIDNARELQEQRDSLTQKLQEVEIRNKDLEGQLSDLEQRLEKSQNEQEAFRNNLKTLLEILDGKIFELTELRDNLAKLLECS

SEQ ID NO: 16673 - protein, 177 aa, Homo sapiens
MGEQPIFSTRAHVFQIDPNTKKNWVPTSKHAVTVSYFYDSTRNVYRIISLDGSKAIINSTITPNMTFTKTSQKFGQWADSRANTVYGLGFSSEHHLSKFAEKFQEFKEAARLAKEKSQEKMELTSTPSQESAGGDLQSPLTPESINGTDDERTPDVTQNSEPRAEPTQNALPFSHRK

SEQ ID NO: 16674 - protein, 354 aa, Homo sapiens
MGEQPIFTTRAHVFQIDPNTKKNWMPASKQAVTVSYFYDVTRNSYRIISVDGAKVIINSTITPNMTFTKTSQKFGQWADSRANTVFGLGFSSEQQLTKFAEKFQEVKEAAKIAKDKTQEKIETSSNHSQESGRETPSSTQASSVNGTDDEKASHAGPANTHLKSENDKLKIALTQSAANVKKWEIELQTLRESNARLTTALQESAASVEQWKRQFSICRDENDRLRNKIDELEEQCSEINREKEKNTQLKRRIEELEAELREKETELKDLRKQSEIIPQLMSECEYVSEKLEAAERDNQNLEDKVRSLKTDIEESKYRQRHLKVELKSFLEVLDGKIDDLHDFRRGLSKLGTDN

SEQ ID NO: 16675 - protein, 343 aa, Homo sapiens
MGEQPIFTTRAHVFQIDPNTKKNWMPASKQAVTVSYFYDVTRNSYRIISVDGAKVIINSTITPNMTFTKTSQKFGQWADSRANTVFGLGFSSEQQLTKFAEKFQEVKEAAKIAKDKTQEKIETSSNHSQASSVNGTDDEKASHAGPANTHLKSENDKLKIALTQSAANVKKWEIELQTLRESNARLTTALQESAASVEQWKRQFSICRDENDRLRNKIDELEEQCSEINREKEKNTQLKRRIEELEAELREKETELKDLRKQSEIIPQLMSECEYVSEKLEAAERDNQNLEDKVRSLKTDIEESKYRQRHLKVELKSFLEVLDGKIDDLHDFRRGLSKLGTDN

SEQ ID NO: 16676 - protein, 361 aa, Homo sapiens
MSTAREQPIFSTRAHVFQIDPATKRNWIPAGKHALTVSYFYDATRNVYRIISIGGAKAIINSTVTPNMTFTKTSQKFGQWADSRANTVYGLGFASEQHLTQFAEKFQEVKEAARLAREKSQDGGELTSPALGLASHQVPPSPLVSANGPGEEKLFRSQSADAPGPTERERLKKMLSEGSVGEVQWEAEFFALQDSNNKLAGALREANAAAAQWRQQLEAQRAEAERLRQRVAELEAQAASEVTPTGEKEGLGQGQSLEQLEALVQTKDQEIQTLKSQTGGPREALEAAEREETQQKVQDLETRNAELEHQLRAMERSLEEARAERERARAEVGRAAQLLDVSLFELSELREGLARLAEAAP

SEQ ID NO: 16677 - protein, 358 aa, Homo sapiens
MSTAREQPIFSTRAHVFQIDPATKRNWIPAGKHALTVSYFYDATRNVYRIISIGGAKAIINSTVTPNMTFTKTSQKFGQWADSRANTVYGLGFASEQHLTQFAEKFQEVKEAARLAREKSQDGGELTSPALGLASHQVPPSPLVSANGPGEEKLFRSQSADAPGPTERERLKKMLSEGSVGEVQWEAEFFALQDSNNKLAGALREANAAAAQWRQQLEAQRAEAERLRQRVAELEAQAASEVTPTGEKEGLGQGQSLEQLEALVQTKDQEIQTLKSQTGGPREALEAAEREETQQKVQTRNAELEHQLRAMERSLEEARAERERARAEVGRAAQLLDVSLFELSELREGLARLAEAAP

SEQ ID NO: 16678 - protein, 145 aa, Homo sapiens
MSTAREQPIFSTRAHVFQIDPATKRNWIPAGKHALTVSYFYDATRNVYRIISIGGAKAIINSTVTPNMTFTKTSQKFGQWADSRANTVYGLGFASEQHLTQFAEKFQEVKEAARLAREKSQDGWGGPQSALVVGSFGAVFELLIV

SEQ ID NO: 16679 - protein, 121 aa, Homo sapiens
MSTAREQPIFSTRAHVFQIDPATKRNWIPAGKHALTVSYFYDATRNVYRIISIGGAKAIINSTVTPNMTFTKTSQKFGQWADSRANTVYGLGFASEQHLTQFAEKFQEVKEAARLARQLQR

SEQ ID NO: 16680 - protein, 325 aa, Homo sapiens
MSTAREQPIFSTRAHVFQIDPATKRNWIPAGKHALTVSYFYDATRNVYRIISIGGAKAIINSTVTPNMTFTKTSQKFGQWADSRANTVYGLGFASEQHLTQVPPSPLVSANGPGEEKLFRSQSADAPGPTERERLKKMLSEGSVGEVQWEAEFFALQDSNNKLAGALREANAAAAQWRQQLEAQRAEAERLRQRVAELEAQAASEVTPTGEKEGLGQGQSLEQLEALVQTKDQEIQTLKSQTGGPREALEAAEREETQQKVQDLETRNAELEHQLRAMERSLEEARAERERARAEVGRAAQLLDVSLFELSELREGLARLAEAAP

SEQ ID NO: 16681 - protein, 550 aa, Homo sapiens
MVRGWEPPPGLDCAISEGHKSEGTMPPNKEASGLSSSPAGLICLPPISEELQLVWTQAAQTSELDSNEHLLKTFSYFPYPSLADIALLCLRYGLQMEKVKTWFMAQRLRCGISWSSEEIEETRARVVYRRDQLHFKSLLSFTHHAGRPPEEVPPPPVPAPEQVGIGIGPPTLSKPTQTKGLKVEPEEPSQMPPLPQSHQKLKESLMTPGSGAFPYQSDFWQHLQSSGLSKEQAGRGPNQSHGIGTASWNHSTTVPQPQARDKPPPIALIASSCKEESASSVTPSSSSTSSSFQVLANGATAASKPLQPLGCVPQSVSPSEQALPPHLEPAWPQGLRHNSVPGRVGPTEYLSPDMQRQRKTKRKTKEQLAILKSFFLQCQWARREDYQKLEQITGLPRPEIIQWFGDTRYALKHGQLKWFRDNAVPGAPSFQDPAIPTPPPSTRSLNERAETPPLPIPPPPPDIQPLERYWAAHQQLRETDIPQLSQASRLSTQQVLDWFDSRLPQPAEVVVCLDEEEEEEEEELPEDDEEEEEEEEEDDDDDDDDVIIQD

SEQ ID NO: 16682 - protein, 552 aa, Homo sapiens
MLKSRISMRSRHPRRAISEGHKSEGTMPPNKEASGLSSSPAGLICLPPISEELQLVWTQAAQTSELDSNEHLLKTFSYFPYPSLADIALLCLRYGLQMEKVKTWFMAQRLRCGISWSSEEIEETRARVVYRRDQLHFKSLLSFTHHAGRPPEEVPPPPVPAPEQVGIGIGPPTLSKPTQTKGLKVEPEEPSQMPPLPQSHQKLKESLMTPGSGAFPYQSDFWQHLQSSGLSKEQAGRGPNQSHGIGTASWNHSTTVPQPQARDKPPPIALIASSCKEESASSVTPSSSSTSSSFQVLANGATAASKPLQPLGCVPQSVSPSEQALPPHLEPAWPQGLRHNSVPGRVGPTEYLSPDMQRQRKTKRKTKEQLAILKSFFLQCQWARREDYQKLEQITGLPRPEIIQWFGDTRYALKHGQLKWFRDNAVPGAPSFQDPAIPTPPPSTRSLNERAETPPLPIPPPPPDIQPLERYWAAHQQLRETDIPQLSQASRLSTQQVLDWFDSRLPQPAEVVVCLDEEEEEEEEELPEDDEEEEEEEEEDDDDDDDDVIIQD

SEQ ID NO: 16683 - protein, 728 aa, Homo sapiens
MEETQPPPQPKLPLCDSLMIWLQTFNTASPCQDVKQLTSGVAMAQVLHQIDAAWFNESWLSRIKEDVGDNWRIKASNVKKVLQGIMSYYHEFLGQQISEALIPDLNQITECSDPVELGRLLQLILGCAINCEKKQEHIQNIMTLEESVQHVVMTAIQELMSKEILSSPPNDAVGELEQQLKRALEELQEALAEKEELRQRCEELDMQVTTLQDEKNSLVSENEMMNEKLDQLDGSFDDPNTVVAKKYFHAQLQLEQLQEENFRLEAAKDDYRVHCEELEKQLIEFQHRNDELTSLAEETRALKDEIDVLRATSDKANKLESTVEIYRQKLQDLNDLRKQVKTLQETNMMYMHNTVSLEEELKKANAARTQLETYKRQVQDLHVKLSSESKRADTLAFEMKRLEEKHEALLKEKERLIEQRDTLKETNEELRCSQVQQDHLNQTDASATKSYENLAAEIMPVEYREVFIRLQHENKMLRLQQEGSENERIEELQEQLEQKHRKMNELETEQRLSKERIRELQQQIEDLQKSLQEQGSKSEGESSSKLKQKLEAHMEKLTEVHEELQKKQELIEDLQPDINQNVQKINELEAALQKKDEDMKAMEERYKMYLEKARNVIKTLDPKLNPASAEIMLLRKQLAEKERRIEILESECKVAKFRDYEEKLIVSAWYNKSLAFQKLGMESRLVSGGGACSDTGACTPARSFLAQQRHITNTRRNLSVKVPATTSD

SEQ ID NO: 16684 - protein, 686 aa, Homo sapiens
MAQVLHQIDAAWFNESWLSRIKEDVGDNWRIKASNVKKVLQGIMSYYHEFLGQQISEALIPDLNQITECSDPVELGRLLQLILGCAINCEKKQEHIQNIMTLEESVQHVVMTAIQELMSKEILSSPPNDAVGELEQQLKRALEELQEALAEKEELRQRCEELDMQVTTLQDEKNSLVSENEMMNEKLDQLDGSFDDPNTVVAKKYFHAQLQLEQLQEENFRLEAAKDDYRVHCEELEKQLIEFQHRNDELTSLAEETRALKDEIDVLRATSDKANKLESTVEIYRQKLQDLNDLRKQVKTLQETNMMYMHNTVSLEEELKKANAARTQLETYKRQVQDLHVKLSSESKRADTLAFEMKRLEEKHEALLKEKERLIEQRDTLKETNEELRCSQVQQDHLNQTDASATKSYENLAAEIMPVEYREVFIRLQHENKMLRLQQEGSENERIEELQEQLEQKHRKMNELETEQRLSKERIRELQQQIEDLQKSLQEQGSKSEGESSSKLKQKLEAHMEKLTEVHEELQKKQELIEDLQPDINQNVQKINELEAALQKKDEDMKAMEERYKMYLEKARNVIKTLDPKLNPASAEIMLLRKQLAEKERRIEILESECKVAKFRDYEEKLIVSAWYNKSLAFQKLGMESRLVSGGGACSDTGACTPARSFLAQQRHITNTRRNLSVKVPATTSD

SEQ ID NO: 16685 - protein, 434 aa, Homo sapiens
MKRNSLSVENKIVQLSGAAKQPKVGFYSSLNQTHTHTVLLDWGSLPHHVVLQIFQYLPLLDRACASSVCRRWNEVFHISDLWRKFEFELNQSATSSFKSTHPDLIQQIIKKHFAHLQYVSFKVDSSAESAEAACDILSQLVNCSIQTLGLISTAKPSFMNVSESHFVSALTVVFINSKSLSSIKIEDTPVDDPSLKILVANNSDTLRLPKMSSCPHVSSDGILCVADRCQGLRELALNYYILTDELFLALSSETHVNLEHLRIDVVSENPGQIKFHAVKKHSWDALIKHSPRVNVVMHFFLYEEEFETFFKEETPVTHLYFGRSVSKVVLGRVGLNCPRLIELVVCANDLQPLDNELICIAEHCTNLTALGLSKCEVSCSAFIRFVRLCERRLTQLSVMEEVLIPDEDYSLDEIHTEVSKYLGRVWFPDVMPLW

SEQ ID NO: 16686 - protein, 436 aa, Homo sapiens
MRRDVNGVTKSRFEMFSNSDEAVINKKLPKELLLRIFSFLDVVTLCRCAQVSRAWNVLALDGSNWQRIDLFDFQRDIEGRVVENISKRCGGFLRKLSLRGCLGVGDNALRTFAQNCRNIEVLNLNGCTKTTDATCTSLSKFCSKLRHLDLASCTSITNMSLKALSEGCPLLEQLNISWCDQVTKDGIQALVRGCGGLKALFLKGCTQLEDEALKYIGAHCPELVTLNLQTCLQITDEGLITICRGCHKLQSLCASGCSNITDAILNALGQNCPRLRILEVARCSQLTDVGFTTLARNCHELEKMDLEECVQITDSTLIQLSIHCPRLQVLSLSHCELITDDGIRHLGNGACAHDQLEVIELDNCPLITDASLEHLKSCHSLERIELYDCQQITRAGIKRLRTHLPNIKVHAYFAPVTPPPSVGGSRQRFCRCCIIL

SEQ ID NO: 16687 - protein, 404 aa, Homo sapiens
MRRDVNGVTKSRFEMFSNSDEAVINKKLPKELLLRIFSFLDVVTLCRCAQVSRAWNVLALDGSNWQRIDLFDFQRDIEGRVVENISKRCGGFLRKLSLRGCLGVGDNALRTFAQNCRNIEVLNLNGCTKTTDAEGCPLLEQLNISWCDQVTKDGIQALVRGCGGLKALFLKGCTQLEDEALKYIGAHCPELVTLNLQTCLQITDEGLITICRGCHKLQSLCASGCSNITDAILNALGQNCPRLRILEVARCSQLTDVGFTTLARNCHELEKMDLEECVQITDSTLIQLSIHCPRLQVLSLSHCELITDDGIRHLGNGACAHDQLEVIELDNCPLITDASLEHLKSCHSLERIELYDCQQITRAGIKRLRTHLPNIKVHAYFAPVTPPPSVGGSRQRFCRCCIIL

SEQ ID NO: 16688 - protein, 268 aa, Homo sapiens
MAAVRVLVASRLAAASAFTSLSPGGRTPSQRAALHLSVPRPAARVALVLSGCGVYDGTEIHEASAILVHLSRGGAEVQIFAPDVPQMHVIDHTKGQPSEGESRNVLTESARIARGKITDLANLSAANHDAAIFPGGFGAAKNLSTFAVDGKDCKVNKEVERVLKEFHQAGKPIGLCCIAPVLAAKVLRGVEVTVGHEQEEGGKWPYAGTAEAIKALGAKHCVKEVVEAHVDQKNKVVTTPAFMCETALHYIHDGIGAMVRKVLELTGK

SEQ ID NO: 16689 - protein, 237 aa, Homo sapiens
MAAVRVLVASRLAAASAFTSLSPGGRTPSQRAALHLSVPRPAARVALVLSGCGVYDGTEIHEASAILVHLSRGGAEVQIFAPDVPQMHVIDHTKGQPSEGESRNVLTESARIARGKITDLANLSAANHDAAIFPGGFGAAKNLLCCIAPVLAAKVLRGVEVTVGHEQEEGGKWPYAGTAEAIKALGAKHCVKEVVEAHVDQKNKVVTTPAFMCETALHYIHDGIGAMVRKVLELTGK

SEQ ID NO: 16690 - protein, 718 aa, Homo sapiens
MFSVESLERAELCESLLTWIQTFNVDAPCQTVEDLTNGVVMAQVLQKIDPAYFDENWLNRIKTEVGDNWRLKISNLKKILKGILDYNHEILGQQINDFTLPDVNLIGEHSDAAELGRMLQLILGCAVNCEQKQEYIQAIMMMEESVQHVVMTAIQELMSKESPVSAGNDAYVDLDRQLKKTTEELNEALSAKEEIAQRCHELDMQVAALQEEKSSLLAENQVLMERLNQSDSIEDPNSPAGRRHLQLQTQLEQLQEETFRLEAAKDDYRIRCEELEKEISELRQQNDELTTLADEAQSLKDEIDVLRHSSDKVSKLEGQVESYKKKLEDLGDLRRQVKLLEEKNTMYMQNTVSLEEELRKANAARSQLETYKRQVVELQNRLSEESKKADKLDFEYKRLKEKVDSLQKEKDRLRTERDSLKETIEELRCVQAQEGQLTTQGLMPLGSQESSDSLAAEIVTPEIREKLIRLQHENKMLKLNQEGSDNEKIALLQSLLDDANLRKNELETENRLVNQRLLEVQSQVEELQKSLQDQGSKAEDSVLLKKKLEEHLEKLHEANNELQKKRAIIEDLEPRFNNSSLKIEELQEALRKKEEEMKQMEERYKKYLEKAKSVIRTLDPKQNQGAAPEIQALKNQLQERDRLFHSLEKEYEKTKSQREMEEKYIVSAWYNMGMTLHKKAAEDRLASTGSGQSFLARQRQATSSRRSYPGHVQPATAR

SEQ ID NO: 16691 - protein, 876 aa, Homo sapiens
MDPAPSLGCSLKDVKWSSVAVPLDLLVSTYRLPQIARLDNGECVEGLRENDYLLIHSCRQWTTITAHSLEEGHYVIGPKIEIPVHYAGQFKLLEQDRDIKEPVQYFNSVEEVAKAFPERVYVMEDITFNVKVASGECNEDTEVYNITLCTGDELTLMGQAEILYAKTFKEKSRLNTIFKKIGKLNSISKLGKGKMPCLICMNHRTNESISLPFQCKGRFSTRSPLELQMQEGEHTIRNIVEKTRLPVNVTVPSPPPRNPYDLHFIREGHRYKFVNIQTKTVVVCCVLRNNKILPMHFPLHLTVPKFSLPEHLVKGESWPETLVHHWLGICQEQFDIDEYSRAVRDVKTDWNEECKSPKKGRCSGHNHVPNSLSYARDELTQSFHRLSVCVYGNNLHGNSEVNLHGCRDLGGDWAPFPHDILPYQDSGDSGSDYLFPEASEESAGIPGKSELPYEELWLEEGKPSHQPLTRSLSEKNRCDQFRGSVRSKCATSPLPIPGTLGAAVKSSDTALPPPPVPPKSEAVREECRLLNAPPVPPRSAKPLSTSPSIPPRTVKPARQQTRSPSPTLSYYSSGLHNISVTKTDTNPSESTPVSCYPCNRVKTDSVDLKSPFGSPSAEAVSSRLSWPNHYSGASESQTRSDFLLDPSRSYSYPRQKTPGTPKRNCPAPFDFDGCELLASPTSPVTAEFSSSVSGCPKSASYSLESTDVKSLAAGVTKQSTSCPALPPRAPKLVEEKVASETSPLPLKIDGAEEDPKSGSPDLSEDQYFVKKGMQDIFSASYPFSSPLHLQLAPRSCGDGSPWQPPADLSGLSIEEVSKSLRFIGLSEDVISFFVTEKIDGNLLVQLTEEILSEDFKLSKLQVKKIMQFINGWRPKI

SEQ ID NO: 16692 - protein, 807 aa, Homo sapiens
MDPAPSLGCSLKDVKWSSVAVPLDLLVSTYRLPQIARLDNGECVEGLRENDYLLIHSCRQWTTITAHSLEEGHYVIGPKIEIPVHYAGQFKLLEQDRDIKEPVQYFNSVEEVAKAFPERVYVMEDITFNVKVASGECNEDTEVYNITLCTGDELTLMGQAEILYAKTFKEKSRLNTIFKKIGKLNSISKLGKGKMPCLICMNHRTNESISLPFQCKGRFSTRSPLELQMQEGEHTIRNIVEKTRLPVNVTVPSPPPRNPYDLHFIREGHRYKFVNIQTKTVVVCCVLRNNKILPMHFPLHLTVPKFSLPEHLVKGESWPETLVHHWLGICQEQFDIDEYSRAVRDVKTDWNEECKSPKKGRCSGHNHVPNSLSYARDELTQSFHRLSVCVYGNNLHGNSEVNLHGCRDLGGDWAPFPHDILPYQDSGDSGSDYLFPEASEESAGIPGKSELPYEELWLEEGKPSHQPLTRSLSEKNRCDQFRGSVRSKCATSPLPSPTLSYYSSGLHNISVTKTDTNPSESTPVSCYPCNRVKTDSVDLKSPFGSPSAEAVSSRLSWPNHYSGASESQTRSDFLLDPSRSYSYPRQKTPGTPKRNCPAPFDFDGCELLASPTSPVTAEFSSSVSGCPKSASYSLESTDVKSLAAGVTKQSTSCPALPPRAPKLVEEKVASETSPLPLKIDGAEEDPKSGSPDLSEDQYFVKKGMQDIFSASYPFSSPLHLQLAPRSCGDGSPWQPPADLSGLSIEEVSKSLRFIGLSEDVISFFVTEKIDGNLLVQLTEEILSEDFKLSKLQVKKIMQFINGWRPKI

SEQ ID NO: 16693 - protein, 875 aa, Homo sapiens
MDPAPSLGCSLKDVKWSSVAVPLDLLVSTYRLPQIARLDNGECVEGLRENDYLLIHSCRQWTTITAHSLEEGHYVIGPKIEIPVHYAGQFKLLEQDRDIKEPVQYFNSVEEVAKAFPERVYVMEDITFNVKVASGECNEDTEVYNITLCTGDELTLMGQAEILYAKTFKEKSRLNTIFKKIGKLNSISKLGKGKMPCLICMNHRTNESISLPFQCKGRFSTRSPLELQMQEGEHTIRNIVEKTRLPVNVTVPSPPPRNPYDLHFIREGHRYKFVNIQTKTVVVCCVLRNNKILPMHFPLHLTVPKFSLPEHLVKGESWPETLVHHWLGICQEQFDIDEYSRAVRDVKTDWNEECKSPKKGRCSGHNHVPNSLSYARDELTQSFHRLSVCVYGNNLHGNSEVNLHGCRDLGGDWAPFPHDILPYQDSGDSGSDYLFPEASEESAGIPGKSELPYEELWLEEGKPSHQPLTRSLSEKNRCDQFRGSVRSKCATSPLPIPGTLGAAVKSSDTALPPPPVPPKSEAVREECRLLNAPPVPPRSAKPLSTSPSIPPRTVKPARQQTRSPSPTLSYYSSGLHNIVTKTDTNPSESTPVSCYPCNRVKTDSVDLKSPFGSPSAEAVSSRLSWPNHYSGASESQTRSDFLLDPSRSYSYPRQKTPGTPKRNCPAPFDFDGCELLASPTSPVTAEFSSSVSGCPKSASYSLESTDVKSLAAGVTKQSTSCPALPPRAPKLVEEKVASETSPLPLKIDGAEEDPKSGSPDLSEDQYFVKKGMQDIFSASYPFSSPLHLQLAPRSCGDGSPWQPPADLSGLSIEEVSKSLRFIGLSEDVISFFVTEKIDGNLLVQLTEEILSEDFKLSKLQVKKIMQFINGWRPKI

SEQ ID NO: 16694 - protein, 666 aa, Homo sapiens
MAMTWIVFSLWPLTVFMGHIGGHSLFSCEPITLRMCQDLPYNTTFMPNLLNHYDQQTAALAMEPFHPMVNLDCSRDFRPFLCALYAPICMEYGRVTLPCRRLCQRAYSECSKLMEMFGVPWPEDMECSRFPDCDEPYPRLVDLNLAGEPTEGAPVAVQRDYGFWCPRELKIDPDLGYSFLHVRDCSPPCPNMYFRREELSFARYFIGLISIICLSATLFTFLTFLIDVTRFRYPERPIIFYAVCYMMVSLIFFIGFLLEDRVACNASIPAQYKASTVTQGSHNKACTMLFMILYFFTMAGSVWWVILTITWFLAAVPKWGSEAIEKKALLFHASAWGIPGTLTIILLAMNKIEGDNISGVCFVGLYDVDALRYFVLAPLCLYVVVGVSLLLAGIISLNRVRIEIPLEKENQDKLVKFMIRIGVFSILYLVPLLVVIGCYFYEQAYRGIWETTWIQERCREYHIPCPYQVTQMSRPDLILFLMKYLMALIVGIPSVFWVGSKKTCFEWASFFHGRRKKEIVNESRQVLQEPDFAQSLLRDPNTPIIRKSRGTSTQGTSTHASSTQLAMVDDQRSKAGSIHSKVSSYHGSLHRSRDGRYTPCSYRGMEERLPHGSMSRLTDHSRHSSSHRLNEQSRHSSIRDLSNNPMTHITHGTSMNRVIEEDGTSA

SEQ ID NO: 16695 - protein, 571 aa, Homo sapiens
MRRRSRMLLCFAFLWVLGIAYYMYSGGGSALAGGAGGGAGRKEDWNEIDPIKKKDLHHSNGEEKAQSMETLPPGKVRWPDFNQEAYVGGTMVRSGQDPYARNKFNQVESDKLRMDRAIPDTRHDQCQRKQWRVDLPATSVVITFHNEARSALLRTVVSVLKKSPPHLIKEIILVDDYSNDPEDGALLGKIEKVRVLRNDRREGLMRSRVRGADAAQAKVLTFLDSHCECNEHWLEPLLERVAEDRTRVVSPIIDVINMDNFQYVGASADLKGGFDWNLVFKWDYMTPEQRRSRQGNPVAPIKTPMIAGGLFVMDKFYFEELGKYDMMMDVWGGENLEISFRVWQCGGSLEIIPCSRVGHVFRKQHPYTFPGGSGTVFARNTRRAAEVWMDEYKNFYYAAVPSARNVPYGNIQSRLELRKKLSCKPFKWYLENVYPELRVPDHQDIAFGALQQGTNCLDTLGHFADGVVGVYECHNAGGNQEWALTKEKSVKHMDLCLTVVDRAPGSLIKLQGCRENDSRQKWEQIEGNSKLRHVGSNLCLDSRTAKSGGLSVEVCGPALSQQWKFTLNLQQ

SEQ ID NO: 16696 - protein, 265 aa, Homo sapiens
MVRSGQDPYARNKFNQVESDKLRMDRAIPDTRHDQCQRKQWRVDLPATSVVITFHNEARSALLRTVVSVLKKSPPHLIKEIILVDDYSNDPEDGALLGKIEKVRVLRNDRREGLMRSRVRGADAAQAKVLTFLDSHCECNEHWLEPLLERVAEDRTRVVSPIIDVINMDNFQYVGASADLKGGFDWNLVFKWDYMTPEQRRSRQGNPVAPIKDLVPRVAVWWQPGDHPVQPCGTRVPEAAPLHVPGWQWHCLCPKHPPGSRGLDG

SEQ ID NO: 16697 - protein, 940 aa, Homo sapiens
MNRIRKFFRGSGRVLAFIFVASVIWLLFDMAALRLSFSEINTRVIKEDIVRRERIGFRVQPDQGKIFYSSIKEMKPPLRGHGKGAWGKENVRKTEESVLKVEVDLDQTQRERKMQNALGRGKVVPLWHPAHLQTLPVTPNKQKTDGRGTKPEASSHQGTPKQTTAQGAPKTSFIAAKGTQVVKISVHMGRVSLKQEPRKSHSPSSDTSKLAAERDLNVTISLSTDRPKQRSQAVANERAHPASTAVPKSGEAMALNKTKTQSKEVNANKHKANTSLPFPKFTVNSNRLRKQSINETPLGSLSKDDGARGAHGKKLNFSESHLVIITKEEEQKADPKEVSNSKTKTIFPKVLGKSQSKHISRNRSEMSSSSLAPHRVPLSQTNHALTGGLEPAKINITAKAPSTEYNQSHIKALLPEDSGTHQVLRIDVTLSPRDPKAPGQFGRPVVVPHGKEKEAERRWKEGNFNVYLSDLIPVDRAIEDTRPAGCAEQLVHNNLPTTSVIMCFVDEVWSTLLRSVHSVINRSPPHLIKEILLVDDFSTKDYLKDNLDKYMSQFPKVRILRLKERHGLIRARLAGAQNATGDVLTFLDSHVECNVGWLEPLLERVYLSRKKVACPVIEVINDKDMSYMTVDNFQRGIFVWPMNFGWRTIPPDVIAKNRIKETDTIRCPVMAGGLFSIDKSYFFELGTYDPGLDVWGGENMELSFKVWMCGGEIEIIPCSRVGHIFRNDNPYSFPKDRMKTVERNLVRVAEVWLDEYKELFYGHGDHLIDQGLDVGNLTQQRELRKKLKCKSFKWYLENVFPDLRAPIVRASGVLINVALGKCISIENTTVILEDCDGSKELQQFNYTWLRLIKCGEWCIAPIPDKGAVRLHPCDNRNKGLKWLHKSTSVFHPELVNHIVFENNQQLLCLEGNFSQKILKVAACDPVKPYQKWKFEKYYEA

SEQ ID NO: 16698 - protein, 597 aa, Homo sapiens
MFASCHCVPRGRRTMKMIHFRSSSVKSLSQEMRCTIRLLDDSEISCHIQRETKGQFLIDHICNYYSLLEKDYFGIRYVDPEKQRHWLEPNKSIFKQMKTHPPYTMCFRVKFYPHEPLKIKEELTRYLLYLQIKRDIFHGRLLCSFSDAAYLGACIVQAELGDYDPDEHPENYISEFEIFPKQSQKLERKIVEIHKNELRGQSPPVAEFNLLLKAHTLETYGVDPHPCKDSTGTTTFLGFTAAGFVVFQGNKRIHLIKWPDVCKLKFEGKTFYVIGTQKEKKAMLAFHTSTPAACKHLWKCGVENQAFYKYAKSSQIKTVSSSKIFFKGSRFRYSGKVAKEVVEASSKIQREPPEVHRANITQSRSSHSLNKQLIINMEPLQPLLPSPSEQEEELPLGEGVPLPKEENISAPLISSSPVKAAREYEDPPSEEEDKIKEEPLTISELVYNPSASLLPTPVDDDEIDMLFDCPSRLELEREDTDSFEDLEADENAFLIAEEEELKEARRALSWSYDILTGHIRVNPLVKSFSRLLVVGLGLLLFVFPLLLLLLESGIDLSFLCEIRQTPEFEQFHYEYYCPLKEWVAGKVHLILYMLGCS

SEQ ID NO: 16699 - protein, 556 aa, Homo sapiens
MFASCHCVPRGRRTMKMIHFRSSSVKSLSQEMRCTIRLLDDSEISCHIQRETKGQFLIDHICNYYSLLEKDYFGIRYVDPEKQRHWLEPNKSIFKQMKTHPPYTMCFRVKFYPHEPLKIKEELTRYLLYLQIKRDIFHGRLLCSFSDAAYLGACIVQAELGDYDPDEHPENYISEFEIFPKQSQKLERKIVEIHKNELRGQSPPVAEFNLLLKAHTLETYGVDPHPCKDSTGTTTFLGFTAAGFVVFQGNKRIHLIKWPDVCKLKFEGKTFYVIGTQKEKKAMLAFHTSTPAACKHLWKCGVENQAFYKYAKSSQIKTVSSSKIFFKGSRFRYSGKVAKEVVEASSKIQREPPEVHRANITQSRSSHSLNKQLIINMEPLQPLLPSPSEQEEELPLGEGVPLPKEENISAPLISSSPVKAAREYEDPPSEEEDKIKEEPLTISELVYNPSASLLPTPVDDDEIDMLFDCPSRLELEREDTDSFEDLEADENAFLIAEEEELKEARRALSWSYDILTGHIRVNPLVKSFSRLLVVGLGLLLFVFPLLLLLLESVSMQ

SEQ ID NO: 16700 - protein, 362 aa, Homo sapiens
MVFRRGQSPPVAEFNLLLKAHTLETYGVDPHPCKDSTGTTTFLGFTAAGFVVFQGNKRIHLIKWPDVCKLKFEGKTFYVIGTQKEKKAMLAFHTSTPAACKHLWKCGVENQAFYKYAKSSQIKTVSSSKIFFKGSRFRYSGKVAKEVVEASSKIQREPPEVHRANITQSRSSHSLNKQLIINMEPLQPLLPSPSEQEEELPLGEGVPLPKEENISAPLISSSPVKAAREYEDPPSEEEDKIKEEPLTISELVYNPSASLLPTPVDDDEIDMLFDCPSRLELEREDTDSFEDLEADENAFLIAEEEELKEARRALSWSYDILTGHIRVNPLVKSFSRLLVVGLGLLLFVFPLLLLLLESVSMQ

SEQ ID NO: 16701 - protein, 213 aa, Homo sapiens
MQAEETKGIGITSMAKCLVKIQTRRSLQLHMVNHCNSNVFVRLLRLGSKVTARNTGVPLPKEENISAPLISSSPVKAAREYEDPPSEEEDKIKEEPLTISELVYNPSASLLPTPVDDDEIDMLFDCPSRLELEREDTDSFEDLEADENAFLIAEEEELKEARRALSWSYDILTGHIRVNPLVKSFSRLLVVGLGLLLFVFPLLLLLLESVSMQ

SEQ ID NO: 16702 - protein, 553 aa, Homo sapiens
MQLSKRETKGQFLIDHICNYYSLLEKDYFGIRYVDPEKQRHWLEPNKSIFKQMKTHPPYTMCFRVKFYPHEPLKIKEELTRYLLYLQIKRDIFHGRLLCSFSDAAYLGACIVQAELGDYDPDEHPENYISEFEIFPKQSQKLERKIVEIHKNELRGQSPPVAEFNLLLKAHTLETYGVDPHPCKDSTGTTTFLGFTAAGFVVFQGNKRIHLIKWPDVCKLKFEGKTFYVIGTQKEKKAMLAFHTSTPAACKHLWKCGVENQAFYKYAKSSQIKTVSSSKIFFKGSRFRYSGKVAKEVVEASSKIQREPPEVHRANITQSRSSHSLNKQLIINMEPLQPLLPSPSEQEEELPLGEGVPLPKEENISAPLISSSPVKAAREYEDPPSEEEDKIKEEPLTISELVYNPSASLLPTPVDDDEIDMLFDCPSRLELEREDTDSFEDLEADENAFLIAEEEELKEARRALSWSYDILTGHIRVNPLVKSFSRLLVVGLGLLLFVFPLLLLLLESGIDLSFLCEIRQTPEFEQFHYEYYCPLKEWVAGKVHLILYMLGCS

SEQ ID NO: 16703 - protein, 694 aa, Homo sapiens
MEWGYLLEVTSLLAALALLQRSSGAAAASAKELACQEITVPLCKGIGYNYTYMPNQFNHDTQDEAGLEVHQFWPLVEIQCSPDLKFFLCSMYTPICLEDYKKPLPPCRSVCERAKAGCAPLMRQYGFAWPDRMRCDRLPEQGNPDTLCMDYNRTDLTTAAPSPPRRLPPPPPGEQPPSGSGHGRPPGARPPHRGGGRGGGGGDAAAPPARGGGGGGKARPPGGGAAPCEPGCQCRAPMVSVSSERHPLYNRVKTGQIANCALPCHNPFFSQDERAFTVFWIGLWSVLCFVSTFATVSTFLIDMERFKYPERPIIFLSACYLFVSVGYLVRLVAGHEKVACSGGAPGAGGAGGAGGAAAGAGAAGAGAGGPGGRGEYEELGAVEQHVRYETTGPALCTVVFLLVYFFGMASSIWWVILSLTWFLAAGMKWGNEAIAGYSQYFHLAAWLVPSVKSIAVLALSSVDGDPVAGICYVGNQSLDNLRGFVLAPLVIYLFIGTMFLLAGFVSLFRIRSVIKQQDGPTKTHKLEKLMIRLGLFTVLYTVPAAVVVACLFYEQHNRPRWEATHNCPCLRDLQPDQARRPDYAVFMLKYFMCLVVGITSGVWVWSGKTLESWRSLCTRCCWASKGAAVGGGAGATAAGGGGGPGGGGGGGPGGGGGPGGGGGSLYSDVSTGLTWRSGTASSVSYPKQMPLSQV

SEQ ID NO: 16704 - protein, 1498 aa, Homo sapiens
MDGASAEQDGLQEDRSHSGPSSLPEAPLKPPGPLVPPDQQDKVQCAEVNRASTEGESPDGPGQGGLCQNGPTPPFPDPPSSLDPTTSPVGPDASPGVAGFHDNLRKSQGTSAEGSVRKEALQSLRLSLPMQETQLCSTDSPLPLEKEEQVRLQARKWLEEQLKQYRVKRQQERSSQPATKTRLFSTLDPELMLNPENLPRASTLAMTKEYSFLRTSVPRGPKVGSLGLPAHPREKKTSKSSKIRSLADYRTEDSNAGNSGGNVPAPDSTKGSLKQNRSSAASVVSEISLSPDTDDRLENTSLAGDSVSEVDGNDSDSSSYSSASTRGTYGILSKTVGTQDTPYMVNGQEIPADTLGQFPSIKDVLQAAAAEHQDQGQEVNGEVRSRRDSICSSVSLESSAAETQEEMLQVLKEKMRLEGQLEALSLEASQALKEKAELQAQLAALSTKLQAQVECSHSSQQRQDSLSSEVDTLKQSCWDLERAMTDLQNMLEAKNASLASSNNDLQVAEEQYQRLMAKVEDMQRSMLSKDNTVHDLRQQMTALQSQLQQVQLERTTLTSKLKASQAEISSLQSVRQWYQQQLALAQEARVRLQGEMAHIQVGQMTQAGLLEHLKLENVSLSQQLTETQHRSMKEKGRIAAQLQGIEADMLDQEAAFMQIQEAKTMVEEDLQRRLEEFEGERERLQRMADSAASLEQQLEQVKLTLLQRDQQLEALQQEHLDLMKQLTLTQEALQSREQSLDALQTHYDELQARLGELQGEAASREDTICLLQNEKIILEAALQAAKSGKEELDRGARRLEEGTEETSETLEKLREELAIKSGQVEHLQQETAALKKQMQKIKEQFLQQKVMVEAYRRDATSKDQLISELKATRKRLDSELKELRQELMQVHGEKRTAEAELSRLHREVAQVRQHMADLEGHLQSAQKERDEMETHLQSLQFDKEQMVAVTEANEALKKQIEELQQEARKAITEQKQKMRRLGSDLTSAQKEMKTKHKAYENAVGILSRRLQEALAAKEAADAELGQLRAQGGSSDSSLALHERIQALEAELQAVSHSKTLLEKELQEVIALTSQELEESREKVLELEDELQESRGFRKKIKRLEESNKKLALELEHEKGKLTGLGQSNAALREHNSILETALAKREADLVQLNLQVQAVLQRKEEEDRQMKHLVQALQASLEKEKEKVNSLKEQVAAAKVEAGHNRRHFKAASLELSEVKKELQAKEHLVQKLQAEADDLQIREGKHSQEIAQFQAELAEARAQLQLLQKQLDEQLSKQPVGNQEMENLKWEVDQKEREIQSLKQQLDLTEQQGRKELEGLQQLLQNVKSELEMAQEDLSMTQKDKFMLQAKVSELKNNMKTLLQQNQQLKLDLRRGAAKTRKEPKGEASSSNPATPIKIPDCPVPASLLEELLRPPPAVSKEPLKNLNSCLQQLKQEMDSLQRQMEEHALTVHESLSSWTPLEPATASPVPPGGHAGPRGDPQRHSQSRASKEGPGE

SEQ ID NO: 16705 - protein, 1390 aa, Homo sapiens
MDGASAEQDGLQEDRSHSGPSSLPEAPLKPPGPLVPPDQQDKVQCAEVNRASTEGESPDGPGQGGLCQNGPTPPFPDPPSSLDPTTSPVGPDASPGVAGFHDNLRKSQGTSAEGSVRKEALQSLRLSLPMQETQLCSTDSPLPLEKEEQVRLQARKWLEEQLKQYRVKRQQERSSQPATKTRLFSTLDPELMLNPENLPRASTLAMTKEYSFLRTSVPRGPKVGSLGLPAHPREKKTSKSSKIRSLADYRTEDSNAGNSGGNVPAPDSTKGSLKQNRSSAASVVSEISLSPDTDDRLENTSLAGDSVSEVDGNDSDSSSYSSASTRGTYGILSKTVGTQDTPYMVNGQEIPADTLGQFPSIKDVLQAAAAEHQDQGQEVNGEVRSRRDSICSSVSLESSAAETQEEMLQVLKEKMRLEGQLEALSLEASQALKEKAELQAQLAALSTKLQAQVECSHSSQQRQDSLSSEVDTLKQSCWDLERAMTDLQNMLEAKNASLASSNNDLQVAEEQYQRLMAKVEDMQRSMLSKDNTVHDLRQQMTALQSQLQQVQLERTTLTSKLKASQAEISSLQSVRQWYQQQLALAQEARVRLQGEMAHIQVGQMTQAGLLEHLKLENVSLSQQLTETQHRSMKEKGRIAAQLQGIEADMLDQEAAFMQIQEAKTMVEEDLQRRLEEFEGERERLQRMADSAASLEQQLEQVKLTLLQRDQQLEALQQEHLDLMKQLTLTQEALQSREQSLDALQTHYDELQARLGELQGEAASREDTICLLQNEKIILEAALQAAKSGKEELDRGARRLEEGTEETSETLEKLREELAIKSGQVEHLQQETAALKKQMQKIKEQFLQQKVMVEAYRRDATSKDQLISELKATRKRLDSELKELRQELMQVHGEKRTAEAELSRLHREVAQVRQHMADLEGHLQSAQKERDEMETHLQSLQFDKEQMVAVTEANEALKKQIEELQQEARKAITEQKQKMRRLGSDLTSAQKEMKTKHKAYENAVGILSRRLQEALAAKEAADAELGQLRAQGGSSDSSLALHERIQALEAELQAVSHSKTLLEKELQEVIALTSQELEESREKVLELEDELQESRGFRKKIKRLEESNKKLALELEHEKGKLTGLGQSNAALREHNSILETALAKREADLVQLNLQVQAVLQRKEEEDRQMKHLVQALQASLEKEKEKVNSLKEQVAAAKVEAGHNRRHFKAASLELSEVKKELQAKEHLVQKLQAEADDLQIREGKHSQEIAQFQAELAEARAQLQLLQKQLDEQLSKQPVGNQEMENLKWEVDQKEREIQSLKQQLDLTEQQGRKELEGLQQLLQNVKSELEMAQEDLSMTQKDKFMLQAKVSELKNNMKTLLQQNQQLKLDLRRGAAKTVLRPASLPG

SEQ ID NO: 16706 - protein, 1134 aa, Homo sapiens
MDGASAEQDGLQEDRSHSGPSSLPEAPLKPPGPLVPPDQQDKVQCAEVNRASTEGESPDGPGQGGLCQNGPTPPFPDPPSSLDPTTSPVGPDASPGVAGFHDNLRKSQGTSAEGSVRKEALQSLRLSLPMQETQLCSTDSPLPLEKEEQVRLQARKWLEEQLKQYRVKRQQERSSQPATKTRLFSTLDPELMLNPENLPRASTLAMTKEYSFLRTSVPRGPKVGSLGLPAHPREKKTSKSSKIRSLADYRTEDSNAGNSGGNVPAPDSTKGSLKQNRSSAASVVSEISLSPDTDDRLENTSLAGDSVSEVDGNDSDSSSYSSASTRGTYGILSKTVGTQDTPYMVNGQEIPADTLGQFPSIKDVLQAAAAEHQDQGQEVNGEVRSRRDSICSSVSLESSAAETQEEMLQVLKEKMRLEGQLEALSLEASQALKEKAELQAQLAALSTKLQAQVECSHSSQQRQDSLSSEVDTLKQSCWDLERAMTDLQNMLEAKNASLASSNNDLQVAEEQYQRLMAKVEDMQRSMLSKDNTVHDLRQQMTALQSQLQQVQLERTTLTSKLKASQAEISSLQSVRQWYQQQLALAQEARVRLQGEMAHIQVGQMTQAGLLEHLKLENVSLSQQLTETQHRSMKEKGRIAAQLQGIEADMLDQEAAFMQIQEAKTMVEEDLQRRLEEFEGERERLQRMADSAASLEQQLEQVKLTLLQRDQQLEALQQEHLDLMKQLTLTQEALQSREQSLDALQTHYDELQARLGELQGEAASREDTICLLQNEKIILEAALQAAKSGKEELDRGARRLEEGTEETSETLEKLREELAIKSGQVEHLQQETAALKKQMQKIKEQFLQQKVMVEAYRRDATSKDQLISELKATRKRLDSELKELRQELMQVHGEKRTAEAELSRLHREVAQVRQHMADLEGHLQSAQKERDEMETHLQSLQFDKEQMVAVTEANEALKKQIEELQQEARKAITEQKQKMRRLGSDLTSAQKEMKTKHKAYENAVGILSRRLQEALAAKEAADAELGQLRAQGGSSDSSLALHERIQALEAELQAVSHSKTLLEKELQEVIALTSQELEESREKVLELEDEVRPGHLLWRQRGAGHVSPGHAATRETRRTKLHRVPSVATFGVATF

SEQ ID NO: 16707 - protein, 120 aa, Homo sapiens
MASSRRGLLLLLLLTAHLGPSEAQHWSHGWYPGGKRALSSAQDPQNALRPPGRALDTAAGSPVQTAHGLPSDALAPLDDSMPWEGRTTAQWSLHRKRHLARTLLTAAREPRPAPPSSNKV

SEQ ID NO: 16708 - protein, 112 aa, Homo sapiens
MASSRRGLLLLLLLTAHLGPSEAQHWSHGWYPGGKRALSSAQDPQNALRPPGSPVQTAHGLPSDALAPLDDSMPWEGRTTAQWSLHRKRHLARTLLTAAREPRPAPPSSNKV

SEQ ID NO: 16709 - protein, 113 aa, Homo sapiens
MASSRRGLLLLLLLTAHLGPSEAQHWSHGWYPGGKRALSSAQDPQNALRPPAGSPVQTAHGLPSDALAPLDDSMPWEGRTTAQWSLHRKRHLARTLLTAAREPRPAPPSSNKV

SEQ ID NO: 16710 - protein, 690 aa, Homo sapiens
MFCTKLKDLKITGECPFSLLAPGQVPNESSEEAAGSSESCKATVPICQDIPEKNIQESLPQRKTSRSRVYLHTLAESICKLIFPEFERLNVALQRTLAKHKIKESRKSLEREDFEKTIAEQAVAAGVPVEVIKESLGEEVFKICYEEDENILGVVGGTLKDFLNSFSTLLKQSSHCQEAGKRGRLEDASILCLDKEDDFLHVYYFFPKRTTSLILPGIIKAAAHVLYETEVEVSLMPPCFHNDCSEFVNQPYLLYSVHMKSTKPSLSPSKPQSSLVIPTSLFCKTFPFHFMFDKDMTILQFGNGIRRLMNRRDFQGKPNFEEYFEILTPKINQTFSGIMTMLNMQFVVRVRRWDNSVKKSSRVMDLKGQMIYIVESSAILFLGSPCVDRLEDFTGRGLYLSDIPIHNALRDVVLIGEQARAQDGLKKRLGKLKATLEQAHQALEEEKKKTVDLLCSIFPCEVAQQLWQGQVVQAKKFSNVTMLFSDIVGFTAICSQCSPLQVITMLNALYTRFDQQCGELDVYKVETIGDAYCVAGGLHKESDTHAVQIALMALKMMELSDEVMSPHGEPIKMRIGLHSGSVFAGVVGVKMPRYCLFGNNVTLANKFESCSVPRKINVSPTTYRLLKDCPGFVFTPRSREELPPNFPSEIPGICHFLDAYQQGTNSKPCFQKKDVEDGNANFLGKASGID

SEQ ID NO: 16711 - protein, 624 aa, Homo sapiens
MFCTKLKDLKITGECPFSLLAPGQVPNESSEEAAGSSESCKATVPICQDIPEKNIQESLPQRKTSRSRVYLHTLAESICKLIFPEFERLNVALQRTLAKHKIKESRKSLEREDFEKTIAEQAVAAGVPVEVIKESLGEEVFKICYEEDENILGVVGGTLKDFLNSFSTLLKQSSHCQEAGKRGRLEDASILCLDKEDDFLHVYYFFPKRTTSLILPGIIKAAAHVLYETEVEVSLMPPCFHNDCSEFVNQPYLLYSVHMKSTKPSLSPSKPQSSLVIPTSLFCKTFPFHFMFDKDMTILQFGNGIRRLMNRRDFQGKPNFEEYFEILTPKINQTFSGIMTMLNMQFVVRVRRWDNSVKKSSRVMDLKGQMIYIVESSAILFLGSPCVDRLEDFTGRGLYLSDIPIHNALRDVVLIGEQARAQDGLKKRLGKLKATLEQAHQALEEEKKKTVDLLCSIFPCEVAQQLWQGQVVQAKKFSNVTMLFSDIVGFTAICSQCSPLQVITMLNALYTRFDQQCGELDVYKVETIGDAYCVAGGLHKESDTHAVQIALMALKMMELSDEVMSPHGEPIKMRIGLHSGSVFAGVVGVKMPRYCLFGNNVTLANKFESCSVPRKINVSPTTYR

SEQ ID NO: 16712 - protein, 129 aa, Homo sapiens
MSGRGKQGGKVRAKAKSRSSRAGLQFPVGRVHRLLRKGNYAERVGAGAPVYLAAVLEYLTAEILELAGNAARDNKKTRIIPRHLQLAIRNDEELNKLLGKVTIAQGGVLPNIQAVLLPKKTESQKTKSK

SEQ ID NO: 16713 - protein, 151 aa, Homo sapiens
MSGRGKQGGKVRAKAKSRSSRAGLQFPVGRVHRLLRKGNYAERVGAGAPVYLAAVLEYLTAEILELAGNAARDNKKTRIIPRHLQLAIRNDEELNKLLGKVTIAQGGVLPNIQAVLLPVCEHSGPSSGKIPSDRAELGAGSVCGHIFQKVE

SEQ ID NO: 16714 - protein, 74 aa, Homo sapiens
MTNVYSLDGILVFGLLFVCTCAYFKKVPRLKTWLLSEKKGVWGVFYKAAVIGTRLHAAVAIACVVMAFYVLFIK

SEQ ID NO: 16715 - protein, 250 aa, Homo sapiens
MNVRRVESISAQLEEASSTGGFLYAQNSTKRSIKERLMKLLPCSAAKTSSPAIQNSVEDELEMATVRHRPEALELLEAQSKFTKKELQILYRGFKNECPSGVVNEETFKEIYSQFFPQGDSTTYAHFLFNAFDTDHNGAVSFEDFIKGLSILLRGTVQEKLNWAFNLYDINKDGYITKEEMLDIMKAIYDMMGKCTYPVLKEDAPRQHVETFFQKMDKNKDGVVTIDEFIESCQKDENIMRSMQLFENVI

SEQ ID NO: 16716 - protein, 216 aa, Homo sapiens
MNVRRVESISAQLEEASSTGDSVEDELEMATVRHRPEALELLEAQSKFTKKELQILYRGFKNECPSGVVNEETFKEIYSQFFPQGDSTTYAHFLFNAFDTDHNGAVSFEDFIKGLSILLRGTVQEKLNWAFNLYDINKDGYITKEEMLDIMKAIYDMMGKCTYPVLKEDAPRQHVETFFQKMDKNKDGVVTIDEFIESCQKDENIMRSMQLFENVI

SEQ ID NO: 16717 - protein, 188 aa, Homo sapiens
MATVRHRPEALELLEAQSKFTKKELQILYRGFKNECPSGVVNEETFKEIYSQFFPQGDSTTYAHFLFNAFDTDHNGAVSFEDFIKGLSILLRGTVQEKLNWAFNLYDINKDGYITKEEMLDIMKAIYDMMGKCTYPVLKEDAPRQHVETFFQKMDKNKDGVVTIDEFIESCQKDENIMRSMQLFENVI

SEQ ID NO: 16718 - protein, 229 aa, Homo sapiens
MNLEGLEMIAVLIVIVLFVKLLEQFGLIEAGLEDSVEDELEMATVRHRPEALELLEAQSKFTKKELQILYRGFKNECPSGVVNEETFKEIYSQFFPQGDSTTYAHFLFNAFDTDHNGAVSFEDFIKGLSILLRGTVQEKLNWAFNLYDINKDGYITKEEMLDIMKAIYDMMGKCTYPVLKEDAPRQHVETFFQKMDKNKDGVVTIDEFIESCQKDENIMRSMQLFENVI

SEQ ID NO: 16719 - protein, 225 aa, Homo sapiens
MSGCRKRCKREILKFAQYLLRLLTGSLHTDSVEDELEMATVRHRPEALELLEAQSKFTKKELQILYRGFKNECPSGVVNEETFKEIYSQFFPQGDSTTYAHFLFNAFDTDHNGAVSFEDFIKGLSILLRGTVQEKLNWAFNLYDINKDGYITKEEMLDIMKAIYDMMGKCTYPVLKEDAPRQHVETFFQKMDKNKDGVVTIDEFIESCQKDENIMRSMQLFENVI

SEQ ID NO: 16720 - protein, 915 aa, Homo sapiens
MVQLRKLLRVLTLMKFPCCVLEVLLCALAAAARGQEMYAPHSIRIEGDVTLGGLFPVHAKGPSGVPCGDIKRENGIHRLEAMLYALDQINSDPNLLPNVTLGARILDTCSRDTYALEQSLTFVQALIQKDTSDVRCTNGEPPVFVKPEKVVGVIGASGSSVSIMVANILRLFQIPQISYASTAPELSDDRRYDFFSRVVPPDSFQAQAMVDIVKALGWNYVSTLASEGSYGEKGVESFTQISKEAGGLCIAQSVRIPQERKDRTIDFDRIIKQLLDTPNSRAVVIFANDEDIKQILAAAKRADQVGHFLWVGSDSWGSKINPLHQHEDIAEGAITIQPKRATVEGFDAYFTSRTLENNRRNVWFAEYWEENFNCKLTISGSKKEDTDRKCTGQERIGKDSNYEQEGKVQFVIDAVYAMAHALHHMNKDLCADYRGVCPEMEQAGGKKLLKYIRNVNFNGSAGTPVMFNKNGDAPGRYDIFQYQTTNTSNPGYRLIGQWTDELQLNIEDMQWGKGVREIPASVCTLPCKPGQRKKTQKGTPCCWTCEPCDGYQYQFDEMTCQHCPYDQRPNENRTGCQDIPIIKLEWHSPWAVIPVFLAMLGIIATIFVMATFIRYNDTPIVRASGRELSYVLLTGIFLCYIITFLMIAKPDVAVCSFRRVFLGLGMCISYAALLTKTNRIYRIFEQGKKSVTAPRLISPTSQLAITSSLISVQLLGVFIWFGVDPPNIIIDYDEHKTMNPEQARGVLKCDITDLQIICSLGYSILLMVTCTVYAIKTRGVPENFNEAKPIGFTMYTTCIVWLAFIPIFFGTAQSAEKLYIQTTTLTISMNLSASVALGMLYMPKVYIIIFHPELNVQKRKRSFKAVVTAATMSSRLSHKPSDRPNGEAKTELCENVDPNSPAAKKKYVSYNNLVI

SEQ ID NO: 16721 - protein, 922 aa, Homo sapiens
MVQLRKLLRVLTLMKFPCCVLEVLLCALAAAARGQEMYAPHSIRIEGDVTLGGLFPVHAKGPSGVPCGDIKRENGIHRLEAMLYALDQINSDPNLLPNVTLGARILDTCSRDTYALEQSLTFVQALIQKDTSDVRCTNGEPPVFVKPEKVVGVIGASGSSVSIMVANILRLFQIPQISYASTAPELSDDRRYDFFSRVVPPDSFQAQAMVDIVKALGWNYVSTLASEGSYGEKGVESFTQISKEAGGLCIAQSVRIPQERKDRTIDFDRIIKQLLDTPNSRAVVIFANDEDIKQILAAAKRADQVGHFLWVGSDSWGSKINPLHQHEDIAEGAITIQPKRATVEGFDAYFTSRTLENNRRNVWFAEYWEENFNCKLTISGSKKEDTDRKCTGQERIGKDSNYEQEGKVQFVIDAVYAMAHALHHMNKDLCADYRGVCPEMEQAGGKKLLKYIRNVNFNGSAGTPVMFNKNGDAPGRYDIFQYQTTNTSNPGYRLIGQWTDELQLNIEDMQWGKGVREIPASVCTLPCKPGQRKKTQKGTPCCWTCEPCDGYQYQFDEMTCQHCPYDQRPNENRTGCQDIPIIKLEWHSPWAVIPVFLAMLGIIATIFVMATFIRYNDTPIVRASGRELSYVLLTGIFLCYIITFLMIAKPDVAVCSFRRVFLGLGMCISYAALLTKTNRIYRIFEQGKKSVTAPRLISPTSQLAITSSLISVQLLGVFIWFGVDPPNIIIDYDEHKTMNPEQARGVLKCDITDLQIICSLGYSILLMVTCTVYAIKTRGVPENFNEAKPIGFTMYTTCIVWLAFIPIFFGTAQSAEKLYIQTTTLTISMNLSASVALGMLYMPKVYIIIFHPELNVQKRKRSFKAVVTAATMSSRLSHKPSDRPNGEAKTELCENVDPNNCIPPVRKSVQKSVTWYTIPPTV

SEQ ID NO: 16722 - protein, 910 aa, Homo sapiens
MVQLRKLLRVLTLMKFPCCVLEVLLCALAAAARGQEMYAPHSIRIEGDVTLGGLFPVHAKGPSGVPCGDIKRENGIHRLEAMLYALDQINSDPNLLPNVTLGARILDTCSRDTYALEQSLTFVQALIQKDTSDVRCTNGEPPVFVKPEKVVGVIGASGSSVSIMVANILRLFQIPQISYASTAPELSDDRRYDFFSRVVPPDSFQAQAMVDIVKALGWNYVSTLASEGSYGEKGVESFTQISKEAGGLCIAQSVRIPQERKDRTIDFDRIIKQLLDTPNSRAVVIFANDEDIKQILAAAKRADQVGHFLWVGSDSWGSKINPLHQHEDIAEGAITIQPKRATVEGFDAYFTSRTLENNRRNVWFAEYWEENFNCKLTISGSKKEDTDRKCTGQERIGKDSNYEQEGKVQFVIDAVYAMAHALHHMNKDLCADYRGVCPEMEQAGGKKLLKYIRNVNFNGSAGTPVMFNKNGDAPGRYDIFQYQTTNTSNPGYRLIGQWTDELQLNIEDMQWGKGVREIPASVCTLPCKPGQRKKTQKGTPCCWTCEPCDGYQYQFDEMTCQHCPYDQRPNENRTGCQDIPIIKLEWHSPWAVIPVFLAMLGIIATIFVMATFIRYNDTPIVRASGRELSYVLLTGIFLCYIITFLMIAKPDVAVCSFRRVFLGLGMCISYAALLTKTNRIYRIFEQGKKSVTAPRLISPTSQLAITSSLISVQLLGVFIWFGVDPPNIIIDYDEHKTMNPEQARGVLKCDITDLQIICSLGYSILLMVTCTVYAIKTRGVPENFNEAKPIGFTMYTTCIVWLAFIPIFFGTAQSAEKLYIQTTTLTISMNLSASVALGMLYMPKVYIIIFHPELNVQKRKRSFKAVVTAATMSSRLSHKPSDRPNGEAKTELCENVDPNNFFFWLYSGTW

SEQ ID NO: 16723 - protein, 911 aa, Homo sapiens
MVQLRKLLRVLTLMKFPCCVLEVLLCALAAAARGQEMYAPHSIRIEGDVTLGGLFPVHAKGPSGVPCGDIKRENGIHRLEAMLYALDQINSDPNLLPNVTLGARILDTCSRDTYALEQSLTFVQALIQKDTSDVRCTNGEPPVFVKPEKVVGVIGASGSSVSIMVANILRLFQIPQISYASTAPELSDDRRYDFFSRVVPPDSFQAQAMVDIVKALGWNYVSTLASEGSYGEKGVESFTQISKEAGGLCIAQSVRIPQERKDRTIDFDRIIKQLLDTPNSRAVVIFANDEDIKQILAAAKRADQVGHFLWVGSDSWGSKINPLHQHEDIAEGAITIQPKRATVEGFDAYFTSRTLENNRRNVWFAEYWEENFNCKLTISGSKKEDTDRKCTGQERIGKDSNYEQEGKVQFVIDAVYAMAHALHHMNKDLCADYRGVCPEMEQAGGKKLLKYIRNVNFNGSAGTPVMFNKNGDAPGRYDIFQYQTTNTSNPGYRLIGQWTDELQLNIEDMQWGKGVREIPASVCTLPCKPGQRKKTQKGTPCCWTCEPCDGYQYQFDEMTCQHCPYDQRPNENRTGCQDIPIIKLEWHSPWAVIPVFLAMLGIIATIFVMATFIRYNDTPIVRASGRELSYVLLTGIFLCYIITFLMIAKPDVAVCSFRRVFLGLGMCISYAALLTKTNRIYRIFEQGKKSVTAPRLISPTSQLAITSSLISVQLLGVFIWFGVDPPNIIIDYDEHKTMNPEQARGVLKCDITDLQIICSLGYSILLMVTCTVYAIKTRGVPENFNEAKPIGFTMYTTCIVWLAFIPIFFGTAQSAEKLYIQTTTLTISMNLSASVALGMLYMPKVYIIIFHPELNVQKRKRSFKAVVTAATMSSRLSHKPSDRPNGEAKTELCENVDPNITSEDLSLHKED

SEQ ID NO: 16724 - protein, 906 aa, Homo sapiens
MVQLRKLLRVLTLMKFPCCVLEVLLCALAAAARGQEMYAPHSIRIEGDVTLGGLFPVHAKGPSGVPCGDIKRENGIHRLEAMLYALDQINSDPNLLPNVTLGARILDTCSRDTYALEQSLTFVQALIQKDTSDVRCTNGEPPVFVKPEKVVGVIGASGSSVSIMVANILRLFQIPQISYASTAPELSDDRRYDFFSRVVPPDSFQAQAMVDIVKALGWNYVSTLASEGSYGEKGVESFTQISKEAGGLCIAQSVRIPQERKDRTIDFDRIIKQLLDTPNSRAVVIFANDEDIKQILAAAKRADQVGHFLWVGSDSWGSKINPLHQHEDIAEGAITIQPKRATVEGFDAYFTSRTLENNRRNVWFAEYWEENFNCKLTISGSKKEDTDRKCTGQERIGKDSNYEQEGKVQFVIDAVYAMAHALHHMNKDLCADYRGVCPEMEQAGGKKLLKYIRNVNFNGSAGTPVMFNKNGDAPGRYDIFQYQTTNTSNPGYRLIGQWTDELQLNIEDMQWGKGVREIPASVCTLPCKPGQRKKTQKGTPCCWTCEPCDGYQYQFDEMTCQHCPYDQRPNENRTGCQDIPIIKLEWHSPWAVIPVFLAMLGIIATIFVMATFIRYNDTPIVRASGRELSYVLLTGIFLCYIITFLMIAKPDVAVCSFRRVFLGLGMCISYAALLTKTNRIYRIFEQGKKSVTAPRLISPTSQLAITSSLISVQLLGVFIWFGVDPPNIIIDYDEHKTMNPEQARGVLKCDITDLQIICSLGYSILLMVTCTVYAIKTRGVPENFNEAKPIGFTMYTTCIVWLAFIPIFFGTAQSAEKLYIQTTTLTISMNLSASVALGMLYMPKVYIIIFHPELNVQKRKRSFKAVVTAATMSSRLSHKPSDRPNGEAKTELCENVDPNSEKCNCY

SEQ ID NO: 16725 - protein, 593 aa, Homo sapiens
MWTLVSWVALTAGLVAGTRCPDGQFCPVACCLDPGGASYSCCRPLLDKWPTTLSRHLGGPCQVDAHCSAGHSCIFTVSGTSSCCPFPEAVACGDGHHCCPRGFHCSADGRSCFQRSGNNSVGAIQCPDSQFECPDFSTCCVMVDGSWGCCPMPQASCCEDRVHCCPHGAFCDLVHTRCITPTGTHPLAKKLPAQRTNRAVALSSSVMCPDARSRCPDGSTCCELPSGKYGCCPMPNATCCSDHLHCCPQDTVCDLIQSKCLSKENATTDLLTKLPAHTVGDVKCDMEVSCPDGYTCCRLQSGAWGCCPFTQAVCCEDHIHCCPAGFTCDTQKGTCEQGPHQVPWMEKAPAHLSLPDPQALKRDVPCDNVSSCPSSDTCCQLTSGEWGCCPIPEAVCCSDHQHCCPQGYTCVAEGQCQRGSEIVAGLEKMPARRASLSHPRDIGCDQHTSCPVGQTCCPSLGGSWACCQLPHAVCCEDRQHCCPAGYTCNVKARSCEKEVVSAQPATFLARSPHVGVKDVECGEGHFCHDNQTCCRDNRQGWACCPYRQGVCCADRRHCCPAGFRCAARGTKCLRREAPRWDAPLRDPALRQLL

SEQ ID NO: 16726 - protein, 438 aa, Homo sapiens
MWTLVSWVALTAGLVAGTRCPDGQFCPVACCLDPGGASYSCCRPLLDKWPTTLSRHLGGPCQVDAHCSAGHSCIFTVSGTSSCCPFPEAVACGDGHHCCPRGFHCSADGRSCFQRSGNNSVGAIQCPDSQFECPDFSTCCVMVDGSWGCCPMPQASCCEDRVHCCPHGAFCDLVHTRCITPTGTHPLAKKLPAQRTNRAVALSSSVMCPDARSRCPDGSTCCELPSGKYGCCPMPNATCCSDHLHCCPQDTVCDLIQSKCLSKENATTDLLTKLPAHTVGDVKCDMEVSCPDGYTCCRLQSGAWGCCPFTQAVCCEDHIHCCPAGFTCDTQKGTCEQGPHQVPWMEKAPAHLSLPDPQALKRDVPCDNVSSCPSSDTCCRDNRQGWACCPYRQGVCCADRRHCCPAGFRCAARGTKCLRREAPRWDAPLRDPALRQLL

SEQ ID NO: 16727 - protein, 413 aa, Homo sapiens
MAITAAHGASTAVQTGDPASKDQVTTPWVPSSALIVSSNARTSPRAVLWSMAPGGAAPCPRLPAVKTGCTAVCDLIQSKCLSKENATTDLLTKLPAHTVGDVKCDMEVSCPDGYTCCRLQSGAWGCCPFTQAVCCEDHIHCCPAGFTCDTQKGTCEQGPHQVPWMEKAPAHLSLPDPQALKRDVPCDNVSSCPSSDTCCQLTSGEWGCCPIPEAVCCSDHQHCCPQGYTCVAEGQCQRGSEIVAGLEKMPARRASLSHPRDIGCDQHTSCPVGQTCCPSLGGSWACCQLPHAVCCEDRQHCCPAGYTCNVKARSCEKEVVSAQPATFLARSPHVGVKDVECGEGHFCHDNQTCCRDNRQGWACCPYRQGVCCADRRHCCPAGFRCAARGTKCLRREAPRWDAPLRDPALRQLL

SEQ ID NO: 16728 - protein, 217 aa, Homo sapiens
MAAQCVRLARRSLPALALSLRPSPRLLCTATKQKNSGQNLEEDMGQSEQKADPPATEKTLLEEKVKLEEQLKETVEKYKRALADTENLRQRSQKLVEEAKLYGIQAFCKDLLEVADVLEKATQCVPKEEIKDDNPHLKNLYEGLVMTEVQIQKVFTKHGLLKLNPVGAKFDPYEHEALFHTPVEGKEPGTVALVSKVGYKLHGRTLRPALVGVVKEA

SEQ ID NO: 16729 - protein, 248 aa, Homo sapiens
MEDPEKKLNQKSDGKPRKVRFKISSSYSGRVLKQVFEDGQELESPKEEYPHSFLQESLETMDGVYGSGEVPRPQMCSPKLTAQRISVFREGNAYTLAGGQPRFNDYKANDHKPLPIIDFGKIIIYTNNLKIIRTPMDKRDFVRKILQKEEEAEEESLMNKEESYGGRDQHDRPLVEAESTLPQNRYTQEGDIPEDSCFHCRGSGSATCSLCHGSKFSMLANRFKESYRALRCPACNENGLQPCQICNQ

SEQ ID NO: 16730 - protein, 1217 aa, Homo sapiens
MKGMSHEPKSPSLGMLSTATRTTATVNPLTPSPLNGALVPSGSPATSSALSAQAAPSSSFAAALRKLAKQAEEPRGSSLSSESSPVSSPATNHSSPASTPKRVPMGPIIVPPGGHSVPSTPPVVTIAPTKTVNGVWRSESRQDAGSRSSSGGRERLIVEPPLPQEKAGGPAIPSHLLSTPYPFGLSPSSVVQDSRFPPLNLQRPVHHVVPPSTVTEDYLRSFRPYHTTDDLRMSSLPPLGLDPATAAAYYHPSYLAPHPFPHPAFRMDDSYCLSALRSPFYPIPTPGSLPPLHPSAMHLHLSGVRYPPELSHSSLAALHSERMSGLSAERLQMDEELRREREREREREREREADREREKEREREREKEREQEKEREREKERERELERQREQRAREKELLAAKALEPSFLPVAELHGLRGHATEERGKPSEQLTPTRAEKLKDAGLQAPKPVQHPLHPVPTPHHTVPSLISNHGIFSLPSSSAATALLIQRTNEEEKWLARQRRLRQEKEDRQSQVSEFRQQVLEQHLDMGRPPVPAEAEHRPESTTRPGPNRHEPGGRDPPQHFGGPPPLISPKPQLHAAPTALWNPVSLMDNTLETRRAESHSLHSHPAAFEPSRQAAVPLVKVERVFCPEKAEEGPRKREPAPLDKYQPPPPPPREGGSLEHQPFLPGPGPFLAELEKSTQTILGQQRASLPQAATFGELSGPLKPGSPYRPPVPRAPDPAYIYDEFLQQRRRLVSKLDLEERRRREAQEKGYYYDLDDSYDESDEEEVRAHLRCVAEQPPLKLDTSSEKLEFLQLFGLTTQQQKEELVAQKRRKRRRMLRERSPSPPTIQSKRQTPSPRLALSTRYSPDEMNNSPNFEEKKKFLTIFNLTHISAEKRKDKERLVEMLRAMKQKALSAAVADSLTNSPRDSPAVSLSEPATQQASLDVEKPVGVAASLSDIPKAAEPGKLEQVRPQELSRVQELAPASGEKARLSEAPGGKKSLSMLHYIRGAAPKDIPVPLSHSTNGKSKPWEPFVAEEFAHQFHESVLQSTQKALQKHKGSVAVLSAEQNHKVDTSVHYNIPELQSSSRAPPPQHNGQQEPPTARKGPPTQELDRDSEEEEEEDDEDGEDEEEVPKRKWQGIEAVFEAYQEHIEEQNLERQVLQTQCRRLEARHYSLSLTAEQLSHSVAELRSQKQKMVSERERLQAELDHLRKCLALPAMHWPRGYLKGYPR

SEQ ID NO: 16731 - protein, 1113 aa, Homo sapiens
MGPIIVPPGGHSVPSTPPVVTIAPTKTVNGVWRSESRQDAGSRSSSGGRERLIVEPPLPQEKAGGPAIPSHLLSTPYPFGLSPSSVVQDSRFPPLNLQRPVHHVVPPSTVTEDYLRSFRPYHTTDDLRMSSLPPLGLDPATAAAYYHPSYLAPHPFPHPAFRMDDSYCLSALRSPFYPIPTPGSLPPLHPSAMHLHLSGVRYPPELSHSSLAALHSERMSGLSAERLQMDEELRREREREREREREREADREREKEREREREKEREQEKEREREKERERELERQREQRAREKELLAAKALEPSFLPVAELHGLRGHATEERGKPSEQLTPTRAEKLKDAGLQAPKPVQHPLHPVPTPHHTVPSLISNHGIFSLPSSSAATALLIQRTNEEEKWLARQRRLRQEKEDRQSQVSEFRQQVLEQHLDMGRPPVPAEAEHRPESTTRPGPNRHEPGGRDPPQHFGGPPPLISPKPQLHAAPTALWNPVSLMDNTLETRRAESHSLHSHPAAFEPSRQAAVPLVKVERVFCPEKAEEGPRKREPAPLDKYQPPPPPPREGGSLEHQPFLPGPGPFLAELEKSTQTILGQQRASLPQAATFGELSGPLKPGSPYRPPVPRAPDPAYIYDEFLQQRRRLVSKLDLEERRRREAQEKGYYYDLDDSYDESDEEEVRAHLRCVAEQPPLKLDTSSEKLEFLQLFGLTTQQQKEELVAQKRRKRRRMLRERSPSPPTIQSKRQTPSPRLALSTRYSPDEMNNSPNFEEKKKFLTIFNLTHISAEKRKDKERLVEMLRAMKQKALSAAVADSLTNSPRDSPAVSLSEPATQQASLDVEKPVGVAASLSDIPKAAEPGKLEQVRPQELSRVQELAPASGEKARLSEAPGGKKSLSMLHYIRGAAPKDIPVPLSHSTNGKSKPWEPFVAEEFAHQFHESVLQSTQKALQKHKGSVAVLSAEQNHKVDTSVHYNIPELQSSSRAPPPQHNGQQEPPTARKGPPTQELDRDSEEEEEEDDEDGEDEEEVPKRKWQGIEAVFEAYQEHIEEQNLERQVLQTQCRRLEARHYSLSLTAEQLSHSVAELRSQKQKMVSERERLQAELDHLRKCLALPAMHWPRGYLKGYPR

SEQ ID NO: 16732 - protein, 1144 aa, Homo sapiens
MKGSSLSSESSPVSSPATNHSSPASTPKRVPMGPIIVPPGGHSVPSTPPVVTIAPTKTVNGVWRSESRQDAGSRSSSGGRERLIVEPPLPQEKAGGPAIPSHLLSTPYPFGLSPSSVVQDSRFPPLNLQRPVHHVVPPSTVTEDYLRSFRPYHTTDDLRMSSLPPLGLDPATAAAYYHPSYLAPHPFPHPAFRMDDSYCLSALRSPFYPIPTPGSLPPLHPSAMHLHLSGVRYPPELSHSSLAALHSERMSGLSAERLQMDEELRREREREREREREREADREREKEREREREKEREQEKEREREKERERELERQREQRAREKELLAAKALEPSFLPVAELHGLRGHATEERGKPSEQLTPTRAEKLKDAGLQAPKPVQHPLHPVPTPHHTVPSLISNHGIFSLPSSSAATALLIQRTNEEEKWLARQRRLRQEKEDRQSQVSEFRQQVLEQHLDMGRPPVPAEAEHRPESTTRPGPNRHEPGGRDPPQHFGGPPPLISPKPQLHAAPTALWNPVSLMDNTLETRRAESHSLHSHPAAFEPSRQAAVPLVKVERVFCPEKAEEGPRKREPAPLDKYQPPPPPPREGGSLEHQPFLPGPGPFLAELEKSTQTILGQQRASLPQAATFGELSGPLKPGSPYRPPVPRAPDPAYIYDEFLQQRRRLVSKLDLEERRRREAQEKGYYYDLDDSYDESDEEEVRAHLRCVAEQPPLKLDTSSEKLEFLQLFGLTTQQQKEELVAQKRRKRRRMLRERSPSPPTIQSKRQTPSPRLALSTRYSPDEMNNSPNFEEKKKFLTIFNLTHISAEKRKDKERLVEMLRAMKQKALSAAVADSLTNSPRDSPAVSLSEPATQQASLDVEKPVGVAASLSDIPKAAEPGKLEQVRPQELSRVQELAPASGEKARLSEAPGGKKSLSMLHYIRGAAPKDIPVPLSHSTNGKSKPWEPFVAEEFAHQFHESVLQSTQKALQKHKGSVAVLSAEQNHKVDTSVHYNIPELQSSSRAPPPQHNGQQEPPTARKGPPTQELDRDSEEEEEEDDEDGEDEEEVPKRKWQGIEAVFEAYQEHIEEQNLERQVLQTQCRRLEARHYSLSLTAEQLSHSVAELRSQKQKMVSERERLQAELDHLRKCLALPAMHWPRGYLKGYPR

SEQ ID NO: 16733 - protein, 184 aa, Homo sapiens
MSRTAYTVGALLLLLGTLLPAAEGKKKGSQGAIPPPDKAQHNDSEQTQSPQQPGSRNRGRGQGRGTAMPGEEVLESSQEALHVTERKYLKRDWCKTQPLKQTIHEEGCNSRTIINRFCYGQCNSFYIPRHIRKEEGSFQSCSFCKPKKFTTMMVTLNCPELQPPTKKKRVTRVKQCRCISIDLD

SEQ ID NO: 16734 - protein, 143 aa, Homo sapiens
MSRTAYTVGALLLLLGTLLPAAEGKKKGSQGAIPPPDKALHVTERKYLKRDWCKTQPLKQTIHEEGCNSRTIINRFCYGQCNSFYIPRHIRKEEGSFQSCSFCKPKKFTTMMVTLNCPELQPPTKKKRVTRVKQCRCISIDLD

SEQ ID NO: 16735 - protein, 221 aa, Homo sapiens
  MOD_RES (73)..(73): Selenocysteine
MFQQFQASCLVLFFLVGFAQQTLKPQNRKVDCNKGVTGTIYEYGALTLNGEEYIQFKQFAGKHVLFVNVAAYXGLAAQYPELNALQEELKNFGVIVLAFPCNQFGKQEPGTNSEILLGLKYVCPGSGFVPSFQLFEKGDVNGEKEQKVFTFLKNSCPPTSDLLGSSSQLFWEPMKVHDIRWNFEKFLVGPDGVPVMHWFHQAPVSTVKSDILEYLKQFNTH

SEQ ID NO: 16736 - protein, 222 aa, Homo sapiens
MAARPKLHYPNGRGRMESVRWVLAAAGVEFDEEFLETKEQLYKLQDGNHLLFQQVPMVEIDGMKLVQTRSILHYIADKHNLFGKNLKERTLIDMYVEGTLDLLELLIMHPFLKPDDQQKEVVNMAQKAIIRYFPVFEKILRGHGQSFLVGNQLSLADVILLQTILALEEKIPNILSAFPFLQEYTVKLSNIPTIKRFLEPGSKKKPPPDEIYVRTVYNIFRP

SEQ ID NO: 16737 - protein, 129 aa, Homo sapiens
MYVEGTLDLLELLIMHPFLKPDDQQKEVVNMAQKAIIRYFPVFEKILRGHGQSFLVGNQLSLADVILLQTILALEEKIPNILSAFPFLQEYTVKLSNIPTIKRFLEPGSKKKPPPDEIYVRTVYNIFRP

SEQ ID NO: 16738 - protein, 484 aa, Homo sapiens
MDLGKDQSHLKHHQTPDPHQEENHSPEVIGTWSLRNRELLRKRKAEVHEKETSQWLFGEQKKRKQQRTGKGNRRGRKRQQNTELKVEPQPQIEKEIVEKALAPIEKKTEPPGSITKVFPSVASPQKVVPEEHFSEICQESNIYQENFSEYQEIAVQNHSSETCQHVSEPEDLSPKMYQEISVLQDNSSKICQDMKEPEDNSPNTCQVISVIQDHPFKMYQDMAKREDLAPKMCQEAAVPKILPCPTSEDTADLAGCSLQAYPKPDVPKGYILDTDQNPAEPEEYNETDQGIAETEGLFPKIQEIAEPKDLSTKTHQESAEPKYLPHKTCNEIIVPKAPSHKTIQETPHSEDYSIEINQETPGSEKYSPETYQEIPGLEEYSPEIYQETSQLEEYSPEIYQETPGPEDLSTETYKNKDVPKECFPEPHQETGGPQGQDPKAHQEDAKDAYTFPQEMKEKPKEEPGIPAILNESHPENDVYSYVLF

SEQ ID NO: 16739 - protein, 2649 aa, Homo sapiens
MAVWEAEQLGGLQRGDLLTPPAPDGDGRTAPLGQPPGAQLYCPACLVTCHSQEAFENHCASSEHAQMVAFDQALPWEHRSPPPGLSKFELCPKPDLCEYGDACTKAHSAQELQEWVRRTQAVELRGQAAWQDGLVPYQERLLAEYQRSSSEVLVLAETLDGVRVTCNQPLMYQAQERKTQYSWTFAVHSEEPLLHVALLKQEPGADFSLVAPGLPPGRLYARGERFRVPSSTADFQVGVRVQAASFGTFEQWVVFDFGRRPVLLQKLGLQLGQGRRPGPCRNLALGHPEEMERWHTGNRHVVPGVERTAEQTALMAKYKGPALALEFNRSSVASGPISPTNYRQRMHQFLYEEEAAQQQLVAKLTLRGQVFLKTALQTPALNMLFAPPGALYAEVPVPSSLMPDTDQGFLLGRAVSTALVAPVPAPDNTVFEVRLERRASSEQALWLLLPARCCLALGLQPEARLVLEVQFQIDPMTFRLWHQAVDTLPEEQLVVPDLPTCALPRPWSVPPLRRGNRKQELAVALIAGWGPGDGRRVPPLLIYGPFGTGKTYTLAMASLEVIRRPETKVLICTHTNSAADIYIREYFHSHVSGGHPEATPLRVMYTDRPLSQTDPVTLQYCCLTDDRQAFRPPTRAELARHRVVVTTTSQARELRVPVGFFSHILIDEAAQMLECEALTPLAYASHGTRLVLAGDHMQVTPRLFSVARARAAEHTLLHRLFLCYQQETHEVARQSRLVFHENYRCTDAIVSFISRHFYVAKGNPIHARGKVPPHPRHYPLMFCHVAGSPDRDMSMASWLNLAEIAQVVEKVQEAYNTWPSCWGGREQRCICVVSHGAQVSALRQELRRRDLGQVSVGSFEILPGRQFRVVVLSTVHTCQSLLSPGALAPEFFTDARVLNTVLTRAQSQLVVVGDAVALCSFGACGKLWESFIRECVERHSVCPEGLSMEQVEQGVAQRRRWPPRGTQAGAAGNWEAAPEPVGDLAEEQAAVVTAMVKAEPGDEALSPASRDITATTAQTEAAAAPAGDAVKEDVVPGACAAGAAAAAGVESTEAEDAEADFWPWDGELNADDAILRELLDESQKVMVTVGEDGLLDTVARPESLQQARLYENLPPAALRKLLHAEPERYRHCSFVPETFERASAIPLDDASSGPIQVRGRLDCGMAFAGDEVLVQLLSGDKAPEGRLRGRVLGVLKRKRHELAFVCRMDTWDPRIMVPINGSVTKIFVAELKDPSQVPIYSLRKGRLQRVGLERLTAEARHSRLFWVQIVLWRQGFYYPLGIVREVLPEASTWEQGLRILGLEYSLRVPPSDQATITKVLQKYHTELGRVAGRREDCRAFLTFTVDPQGACNLDDALSVRDLGPRCEVAVHITDVASFVPRDGVLDVEARRQGAAFYAPGREPVPMLPASLCQDVLSLLPGRDRLAISLFLTMEKASGQLKSLRFAPSVVQSDRQLSYEEAEEVIRQHPGAGRELPARLDSVDACVVAACYFSRLLRRHRLRSDCFYEQPDEDGTLGFRAAHIMVKEYMIQFNRLVAEFLVGSECTRTVTPLRWQPAPRSQQLKALCEKHGDRVPLSLHLGHHLHGGGGSPPDTRLHLLASLWKQVQFAARTQDYEQMVDLVTTDDMHPFLAPAGRDLRKALERSAFGRCARGHQQQGGHYSLQVDWYTWATSPIRRYLDVVLQRQILLALGHGGSAYSARDIDGLCQAFSLQHALAQSYQRRARSLHLAVQLKAQPLDKLGFVVDVEAGSRCFRLLFPSNRETLPDPCPVPYGSLQLAEHPHALAGRPGLRLLWRRRVYSAQGSSPPLPLPGTVPDPHTLAVETALWKQLLELVELQRWPEAAALIQEKGEASQRRELVQVQRSHCGHFLEVARELGSGDTLQVQLGTSLQHGFLVPSPQLWTVAPGFSLCLEHVERPGDCFSGRVYRAPRDRYRDVDEYACVWEPFCALESATGAVAENDSVTLQHLSVSWEASRTPQGQLQGAFRLEAAFLEENCADINFSCCYLCIRLEGLPAPTASPRPGPSSLGPGLNVDPGTYTWVAHGQTQDWDQERRADRQEAPRRVHLFVHHMGMEKVPEEVLRPGTLFTVELLPKQLPDLRKEEAVRGLEEASPLVTSIALGRPVPQPLCRVIPSRFLERQTYNIPGGRHKLNPSQNVAVREALEKPFTVIQGPPGTGKTIVGLHIVFWFHKSNQEQVQPGGPPRGEKRLGGPCILYCGPSNKSVDVLAGLLLRRMELKPLRVYSEQAEASEFPVPRVGSRKLLRKSPREGRPNQSLRSITLHHRIRQAPNPYSSEIKAFDTRLQRGELFSREDLVWYKKVLWEARKFELDRHEVILCTCSCAASASLKILDVRQILVDEAGMATEPETLIPLVQFPQAEKVVLLGDHKQLRPVVKNERLQNLGLDRSLFERYHEDAHMLDTQYRMHEGICAFPSVAFYKSKLKTWQGLRRPPSVLGHAGKESCPVIFGHVQGHERSLLVSTDEGNENSKANLEEVAEVVRITKQLTLGRTVEPQDIAVLTPYNAQASEISKALRREGIAGVAVSSITKSQGSEWRYVLVSTVRTCAKSDLDQRPTKSWLKKFLGFVVDPNQVNVAVTRAQEGLCLIGDHLLLRCCPLWRSLLDFCEAQQTLVPAGQVRVCRRPTMPS

SEQ ID NO: 16740 - protein, 2080 aa, Homo sapiens
MSSSPSRSAADIYIREYFHSHVSGGHPEATPLRVMYTDRPLSQTDPVTLQYCCLTDDRQAFRPPTRAELARHRVVVTTTSQARELRVPVGFFSHILIDEAAQMLECEALTPLAYASHGTRLVLAGDHMQVTPRLFSVARARAAEHTLLHRLFLCYQQETHEVARQSRLVFHENYRCTDAIVSFISRHFYVAKGNPIHARGKVPPHPRHYPLMFCHVAGSPDRDMSMASWLNLAEIAQVVEKVQEAYNTWPSCWGGREQRCICVVSHGAQVSALRQELRRRDLGQVSVGSFEILPGRQFRVVVLSTVHTCQSLLSPGALAPEFFTDARVLNTVLTRAQSQLVVVGDAVALCSFGACGKLWESFIRECVERHSVCPEGLSMEQVEQGVAQRRRWPPRGTQAGAAGNWEAAPEPVGDLAEEQAAVVTAMVKAEPGDEALSPASRDITATTAQTEAAAAPAGDAVKEDVVPGACAAGAAAAAGVESTEAEDAEADFWPWDGELNADDAILRELLDESQKVMVTVGEDGLLDTVARPESLQQARLYENLPPAALRKLLHAEPERYRHCSFVPETFERASAIPLDDASSGPIQVRGRLDCGMAFAGDEVLVQLLSGDKAPEGRLRGRVLGVLKRKRHELAFVCRMDTWDPRIMVPINGSVTKIFVAELKDPSQVPIYSLRKGRLQRVGLERLTAEARHSRLFWVQIVLWRQGFYYPLGIVREVLPEASTWEQGLRILGLEYSLRVPPSDQATITKVLQKYHTELGRVAGRREDCRAFLTFTVDPQGACNLDDALSVRDLGPRCEVAVHITDVASFVPRDGVLDVEARRQGAAFYAPGREPVPMLPASLCQDVLSLLPGRDRLAISLFLTMEKASGQLKSLRFAPSVVQSDRQLSYEEAEEVIRQHPGAGRELPARLDSVDACVVAACYFSRLLRRHRLRSDCFYEQPDEDGTLGFRAAHIMVKEYMIQFNRLVAEFLVGSECTRTVTPLRWQPAPRSQQLKALCEKHGDRVPLSLHLGHHLHGGGGSPPDTRLHLLASLWKQVQFAARTQDYEQMVDLVTTDDMHPFLAPAGRDLRKALERSAFGRCARGHQQQGGHYSLQVDWYTWATSPIRRYLDVVLQRQILLALGHGGSAYSARDIDGLCQAFSLQHALAQSYQRRARSLHLAVQLKAQPLDKLGFVVDVEAGSRCFRLLFPSNRETLPDPCPVPYGSLQLAEHPHALAGRPGLRLLWRRRVYSAQGSSPPLPLPGTVPDPHTLAVETALWKQLLELVELQRWPEAAALIQEKGEASQRRELVQVQRSHCGHFLEVARELGSGDTLQVQLGTSLQHGFLVPSPQLWTVAPGFSLCLEHVERPGDCFSGRVYRAPRDRYRDVDEYACVWEPFCALESATGAVAENDSVTLQHLSVSWEASRTPQGQLQGAFRLEAAFLEENCADINFSCCYLCIRLEGLPAPTASPRPGPSSLGPGLNVDPGTYTWVAHGQTQDWDQERRADRQEAPRRVHLFVHHMGMEKVPEEVLRPGTLFTVELLPKQLPDLRKEEAVRGLEEASPLVTSIALGRPVPQPLCRVIPSRFLERQTYNIPGGRHKLNPSQNVAVREALEKPFTVIQGPPGTGKTIVGLHIVFWFHKSNQEQVQPGGPPRGEKRLGGPCILYCGPSNKSVDVLAGLLLRRMELKPLRVYSEQAEASEFPVPRVGSRKLLRKSPREGRPNQSLRSITLHHRIRQAPNPYSSEIKAFDTRLQRGELFSREDLVWYKKVLWEARKFELDRHEVILCTCSCAASASLKILDVRQILVDEAGMATEPETLIPLVQFPQAEKVVLLGDHKQLRPVVKNERLQNLGLDRSLFERYHEDAHMLDTQYRMHEGICAFPSVAFYKSKLKTWQGLRRPPSVLGHAGKESCPVIFGHVQGHERSLLVSTDEGNENSKANLEEVAEVVRITKQLTLGRTVEPQDIAVLTPYNAQASEISKALRREGIAGVAVSSITKSQGSEWRYVLVSTVRTCAKSDLDQRPTKSWLKKFLGFVVDPNQVNVAVTRAQEGLCLIGDHLLLRCCPLWRSLLDFCEAQQTLVPAGQVRVCRRPTMPS

SEQ ID NO: 16741 - protein, 2114 aa, Homo sapiens
LTSDSQTRAVLRGSSAGHTVGALADSTEAPSKKPMSSSPSRSAADIYIREYFHSHVSGGHPEATPLRVMYTDRPLSQTDPVTLQYCCLTDDRQAFRPPTRAELARHRVVVTTTSQARELRVPVGFFSHILIDEAAQMLECEALTPLAYASHGTRLVLAGDHMQVTPRLFSVARARAAEHTLLHRLFLCYQQETHEVARQSRLVFHENYRCTDAIVSFISRHFYVAKGNPIHARGKVPPHPRHYPLMFCHVAGSPDRDMSMASWLNLAEIAQVVEKVQEAYNTWPSCWGGREQRCICVVSHGAQVSALRQELRRRDLGQVSVGSFEILPGRQFRVVVLSTVHTCQSLLSPGALAPEFFTDARVLNTVLTRAQSQLVVVGDAVALCSFGACGKLWESFIRECVERHSVCPEGLSMEQVEQGVAQRRRWPPRGTQAGAAGNWEAAPEPVGDLAEEQAAVVTAMVKAEPGDEALSPASRDITATTAQTEAAAAPAGDAVKEDVVPGACAAGAAAAAGVESTEAEDAEADFWPWDGELNADDAILRELLDESQKVMVTVGEDGLLDTVARPESLQQARLYENLPPAALRKLLHAEPERYRHCSFVPETFERASAIPLDDASSGPIQVRGRLDCGMAFAGDEVLVQLLSGDKAPEGRLRGRVLGVLKRKRHELAFVCRMDTWDPRIMVPINGSVTKIFVAELKDPSQVPIYSLRKGRLQRVGLERLTAEARHSRLFWVQIVLWRQGFYYPLGIVREVLPEASTWEQGLRILGLEYSLRVPPSDQATITKVLQKYHTELGRVAGRREDCRAFLTFTVDPQGACNLDDALSVRDLGPRCEVAVHITDVASFVPRDGVLDVEARRQGAAFYAPGREPVPMLPASLCQDVLSLLPGRDRLAISLFLTMEKASGQLKSLRFAPSVVQSDRQLSYEEAEEVIRQHPGAGRELPARLDSVDACVVAACYFSRLLRRHRLRSDCFYEQPDEDGTLGFRAAHIMVKEYMIQFNRLVAEFLVGSECTRTVTPLRWQPAPRSQQLKALCEKHGDRVPLSLHLGHHLHGGGGSPPDTRLHLLASLWKQVQFAARTQDYEQMVDLVTTDDMHPFLAPAGRDLRKALERSAFGRCARGHQQQGGHYSLQVDWYTWATSPIRRYLDVVLQRQILLALGHGGSAYSARDIDGLCQAFSLQHALAQSYQRRARSLHLAVQLKAQPLDKLGFVVDVEAGSRCFRLLFPSNRETLPDPCPVPYGSLQLAEHPHALAGRPGLRLLWRRRVYSAQGSSPPLPLPGTVPDPHTLAVETALWKQLLELVELQRWPEAAALIQEKGEASQRRELVQVQRSHCGHFLEVARELGSGDTLQVQLGTSLQHGFLVPSPQLWTVAPGFSLCLEHVERPGDCFSGRVYRAPRDRYRDVDEYACVWEPFCALESATGAVAENDSVTLQHLSVSWEASRTPQGQLQGAFRLEAAFLEENCADINFSCCYLCIRLEGLPAPTASPRPGPSSLGPGLNVDPGTYTWVAHGQTQDWDQERRADRQEAPRRVHLFVHHMGMEKVPEEVLRPGTLFTVELLPKQLPDLRKEEAVRGLEEASPLVTSIALGRPVPQPLCRVIPSRFLERQTYNIPGGRHKLNPSQNVAVREALEKPFTVIQGPPGTGKTIVGLHIVFWFHKSNQEQVQPGGPPRGEKRLGGPCILYCGPSNKSVDVLAGLLLRRMELKPLRVYSEQAEASEFPVPRVGSRKLLRKSPREGRPNQSLRSITLHHRIRQAPNPYSSEIKAFDTRLQRGELFSREDLVWYKKVLWEARKFELDRHEVILCTCSCAASASLKILDVRQILVDEAGMATEPETLIPLVQFPQAEKVVLLGDHKQLRPVVKNERLQNLGLDRSLFERYHEDAHMLDTQYRMHEGICAFPSVAFYKSKLKTWQGLRRPPSVLGHAGKESCPVIFGHVQGHERSLLVSTDEGNENSKANLEEVAEVVRITKQLTLGRTVEPQDIAVLTPYNAQASEISKALRREGIAGVAVSSITKSQGSEWRYVLVSTVRTCAKSDLDQRPTKSWLKKFLGFVVDPNQVNVAVTRAQEGLCLIGDHLLLRCCPLWRSLLDFCEAQQTLVPAGQVRVCRRPTMPS

SEQ ID NO: 16742 - protein, 57 aa, Homo sapiens
MKFFVFALVLALMISMISADSHEKRHHGYRRKFHEKHHSHREFPFYGDYGSNYLYDN

SEQ ID NO: 16743 - protein, 280 aa, Homo sapiens
MPADIMEKNSSSPVAATPASVNTTPDKPKTASEHRKSSKPIMEKRRRARINESLSQLKTLILDALKKDSSRHSKLEKADILEMTVKHLRNLQRAQMTAALSTDPSVLGKYRAGFSECMNEVTRFLSTCEGVNTEVRTRLLGHLANCMTQINAMTYPGQPHPALQAPPPPPPGPGGPQHAPFAPPPPLVPIPGGAAPPPGGAPCKLGSQAGEAAKVFGGFQVVPAPDGQFAFLIPNGAFAHSGPVIPVYTSNSGTSVGPNAVSPSSGPSLTADSMWRPWRN

SEQ ID NO: 16744 - protein, 203 aa, Homo sapiens
MARPRPREYKAGDLVFAKMKGYPHWPARIDELPEGAVKPPANKYPIFFFGTHETAFLGPKDLFPYKEYKDKFGKSNKRKGFNEGLWEIENNPGVKFTGYQAIQQQSSSETEGEGGNTADASSEEEGDRVEEDGKGKRKNEKAGSKRKKSYTSKKSSKQSRKSPGDEDDKDCKEEENKSSSEGGDAGNDTRNTTSDLQKTSEGT

SEQ ID NO: 16745 - protein, 230 aa, Homo sapiens
MPWTILLFAAGSLAIPAPSIRLVPPYPSSQEDPIHIACMAPGNFPGANFTLYRGGQVVQLLQAPTDQRGVTFNLSGGSSKAPGGPFHCQYGVLGELNQSQLSDLSEPVNVSFPVPTWILVLSLSLAGALFLLAGLVAVALVVRKVKLRNLQKKRDRESCWAQINFDSTDMSFDNSLFTVSAKTMPEEDPATLDDHSGTTATPSNSRTRKRPTSTSSSPETPEFSTFRACQ

SEQ ID NO: 16746 - protein, 211 aa, Homo sapiens
MGKGDPKKPRGKMSSYAFFVQTCREEHKKKHSDASVNFSEFSNKCSERWKTMSAKEKGKFEDMAKADKTHYERQMKTYIPPKGETKKKFKDPNAPKRPPSAFFLFCSEYHPKIKGEHPGLSIGDVAKKLGEMWNNTAADDKQPGEKKAAKLKEKYEKDIAAYQAKGKPEAAKKGVVKAEKSKKKKEEEEDEEDEEDEEEEDEEDEEDDDDE

SEQ ID NO: 16747 - protein, 338 aa, Homo sapiens
MELWGRMLWALLSGPGRRGSTRGWAFSSWQPQPPLAGLSSAIELVSHWTGVFEKRGIPEARESSEYIVAHVLGAKTFQSLRPALWTQPLTSQQLQCIRELSSRRLQRMPVQYILGEWDFQGLSLRMVPPVFIPRPETEELVEWVLEEVAQRSHAVGSPGSPLILEVGCGSGAISLSLLSQLPQSRVIAVDKREAAISLTHENAQRLRLQDRIWIIHLDMTSERSWTHLPWGPMDLIVSNPPYVFHQDMEQLAPEIRSYEDPAALDGGEEGMDIITHILALAPRLLKDSGSIFLEVDPRHPELVSSWLQSRPDLYLNLVAVRRDFCGRPRFLHIRRSGP

SEQ ID NO: 16748 - protein, 265 aa, Homo sapiens
MKVLLLKDAKEDDCGQDPYIRELGLYGLEATLIPVLSFEFLSLPSFSEKLSHPEDYGGLIFTSPRAVEAAELCLEQNNKTEVWERSLKEKWNAKSVYVVGNATASLVSKIGLDTEGETCGNAEKLAEYICSRESSALPLLFPCGNLKREILPKALKDKGIAMESITVYQTVAHPGIQGNLNSYYSQQGVPASITFFSPSGLTYSLKHIQELSGDNIDQIKFAAIGPTTARALAAQGLPVSCTAESPTPQALATGIRKALQPHGCC

SEQ ID NO: 16749 - protein, 367 aa, Homo sapiens
MQAPRELAVGIDLGTTYSCVGVFQQGRVEILANDQGNRTTPSYVAFTDTERLVGDAAKSQAALNPHNTVFDAKRLIGRKFADTTVQSDMKHWPFQVVSEGGKPKVRVCYRGEDKTFYPEEISSMVLSKMKETAEAYLGQPVKHAVITVPTYFSNSQRQATKDAGAIAGLKVLPIINEATAAAIAYGLDRRGAGKRNVLIFDLGGGTFDVSVLSIDAGVFEVKATAGDTHLGGEDFDNRLVNHFMEEFRRKHGKDLSGNKRALRRLRTACERAKRTPSSSTQATLEIDSLFEGVDFYKSITRARFEELCSDLFRSTLEPVEKALRDAKLDKAQIHDFVLGGGLHSHPQGAEVAAGLLQRQGAEQEHQP

SEQ ID NO: 16750 - protein, 542 aa, Homo sapiens
MSSSSSSPRETYEEDREYESQAKRLKTEEGEIDYSAEEGENRREATPRGGGDGGGGGRSFSQPEAGGSHHKVSVSPVVHVRGLCESVVEADLVEALEKFGTICYVMMMPFKRQALVEFENIDSAKECVTFAADEPVYIAGQQAFFNYSTSKRITRPGNTDDPSGGNKVLLLSIQNPLYPITVDVLYTVCNPVGKVQRIVIFKRNGIQAMVEFESVLCAQKAKAALNGADIYAGCCTLKIEYARPTRLNVIRNDNDSWDYTKPYLGRRDRGKGRQRQAILGEHPSSFRHDGYGSHGPLLPLPSRYRMGSRDTPELVAYPLPQASSSYMHGGNPSGSVVMVSGLHQLKMNCSRVFNLFCLYGNIEKVKFMKTIPGTALVEMGDEYAVERAVTHLNNVKLFGKRLNVCVSKQHSVVPSQIFELEDGTSSYKDFAMSKNNRFTSAGQASKNIIQPPSCVLHYYNVPLCVTEETFTKLCNDHEVLTFIKYKVFDAKPSAKTLSGLLEWECKTDAVEALTALNHYQIRVPNGSNPYTLKLCFSTSSHL

SEQ ID NO: 16751 - protein, 282 aa, Homo sapiens
MSSSSSSPRETYEEDREYESQAKRLKTEEGEIDYSAEEGENRREATPRGGGDGGGGGRSFSQPEAGGSHHKVSVSPVVHVRGLCESVVEADLVEALEKFGTICYVMMMPFKRQALVEFENIDSAKECVTFAADEPVYIAGQQAFFNYSTSKRITRPGNTDDPSGGNKVLLLSIQNPLYPITVDVLYTVCNPVGKVQRIVIFKRNGIQAMVEFESVLCAQKAKAALNGADIYAGCCTLKIEYARPTRLNVIRNDNDSWDYTKPYLGRRGCCWLMLKLLERSPL

SEQ ID NO: 16752 - protein, 275 aa, Homo sapiens
MLARETYEEDREYESQAKRLKTEEGEIDYSAEEGENRREATPRGGGDGGGGGRSFSQPEAGGSHHKVSVSPVVHVRGLCESVVEADLVEALEKFGTICYVMMMPFKRQALVEFENIDSAKECVTFAADEPVYIAGQQAFFNYSTSKRITRPGNTDDPSGGNKVLLLSIQNPLYPITVDVLYTVCNPVGKVQRIVIFKRNGIQAMVEFESVLCAQKAKAALNGADIYAGCCTLKIEYARPTRLNVIRNDNDSWDYTKPYLGRRGRYFIHFRMYLIC

SEQ ID NO: 16753 - protein, 537 aa, Homo sapiens
MLARETYEEDREYESQAKRLKTEEGEIDYSAEEGENRREATPRGGGDGGGGGRSFSQPEAGGSHHKVSVSPVVHVRGLCESVVEADLVEALEKFGTICYVMMMPFKRQALVEFENIDSAKECVTFAADEPVYIAGQQAFFNYSTSKRITRPGNTDDPSGGNKVLLLSIQNPLYPITVDVLYTVCNPVGKVQRIVIFKRNGIQAMVEFESVLCAQKAKAALNGADIYAGCCTLKIEYARPTRLNVIRNDNDSWDYTKPYLGRRDRGKGRQRQAILGEHPSSFRHDGYGSHGPLLPLPSRYRMGSRDTPELVAYPLPQASSSYMHGGNPSGSVVMVSGLHQLKMNCSRVFNLFCLYGNIEKVKFMKTIPGTALVEMGDEYAVERAVTHLNNVKLFGKRLNVCVSKQHSVVPSQIFELEDGTSSYKDFAMSKNNRFTSAGQASKNIIQPPSCVLHYYNVPLCVTEETFTKLCNDHEVLTFIKYKVFDAKPSAKTLSGLLEWECKTDAVEALTALNHYQIRVPNGSNPYTLKLCFSTSSHL

SEQ ID NO: 16754 - protein, 508 aa, Homo sapiens
MSSSSSSPRETYEEDREYESQAKRLKTEEGEIDYSAEEGENRREATPRGGGDGGGGGRSFSQPEAGGSHHKVSVSPVVHVRGLCESVVEADLVEALEKFGTICYVMMMPFKRQALVEFENIDSAKECVTFAADEPVYIAGQQAFFNYSTSKRITRPGNTDDPSGGNKVLLLSIQNPLYPITVDVLYTVCNPVGKVQRIVIFKRNGIQAMVDRLNVIRNDNDSWDYTKPYLGRRDRGKGRQRQAILGEHPSSFRHDGYGSHGPLLPLPSRYRMGSRDTPELVAYPLPQASSSYMHGGNPSGSVVMVSGLHQLKMNCSRVFNLFCLYGNIEKVKFMKTIPGTALVEMGDEYAVERAVTHLNNVKLFGKRLNVCVSKQHSVVPSQIFELEDGTSSYKDFAMSKNNRFTSAGQASKNIIQPPSCVLHYYNVPLCVTEETFTKLCNDHEVLTFIKYKVFDAKPSAKTLSGLLEWECKTDAVEALTALNHYQIRVPNGSNPYTLKLCFSTSSHL

SEQ ID NO: 16755 - protein, 449 aa, Homo sapiens
MMLSTEGREGFVVKVRGLPWSCSADEVMRFFSDCKIQNGTSGIRFIYTREGRPSGEAFVELESEEEVKLALKKDRETMGHRYVEVFKSNSVEMDWVLKHTGPNSPDTANDGFVRLRGLPFGCSKEEIVQFFSGLEIVPNGMTLPVDFQGRSTGEAFVQFASQEIAEKALKKHKERIGHRYIEIFKSSRAEVRTHYDPPRKLMAMQRPGPYDRPGAGRGYNSIGRGAGFERMRRGAYGGGYGGYDDYGGYNDGYGFGSDRFGRDLNYCFSGMSDHRYGDGGSSFQSTTGHCVHMRGLPYRATENDIYNFFSPLNPMRVHIEIGPDGRVTGEADVEFATHEDAVAAMAKDKANMQHRYVELFLNSTAGTSGGAYDHSYVELFLNSTAGASGGAYGSQMMGGMGLSNQSSYGGPASQQLSGGYGGGYGGQSSMSGYDQVLQENSSDYQSNLA

SEQ ID NO: 16756 - protein, 160 aa, Homo sapiens
MEIPVPVQPSWLRRASAPLPGLSAPGRLFDQRFGEGLLEAELAALCPTTLAPYYLRAPSVALPVAQVPTDPGHFSVLLDVKHFSPEEIAVKVVGEHVEVHARHEERPDEHGFVAREFHRRYRLPPGVDPAAVTSALSPEGVLSIQAAPASAQAPPPAAAK

SEQ ID NO: 16757 - protein, 700 aa, Homo sapiens [sequence omitted]

SEQ ID NO: 16758 - protein, 667 aa, Homo sapiens
MKCVLVATEGAEVLFYWTDQEFEESLRLKFGQSENEEEELPALEDQLSTLLAPVIISSMTMLEKLSDTYTCFSTENGNFLYVLHLFGECLFIAINGDHTESEGDLRRKLYVLKYLFEVHFGLVTVDGHLIRKELRPPDLAQRVQLWEHFQSLLWTYSRLREQEQCFAVEALERLIHPQLCELCIEALERHVIQAVNTSPERGGEEALHAFLLVHSKLLAFYSSHSASSLRPADLLALILLVQDLYPSESTAEDDIQETDSFSLPEEYFTPAPSPGDQSSGSTIWLEGGTPPMDALQIAEDTLQTLVPHCPVPSGPRRIFLDANVKESYCPLVPHTMYCLPLWQGINLVLLTRSPSAPLALVLSQLMDGFSMLEKKLKEGPEPGASLRSQPLVGDLRQRMDKFVKNRGAQEIQSTWLEFKAKAFSKSEPGSSWELLQACGKLKRQLCAIYRLNFLTTAPSRGGPHLPQHLQDQVQRLMREKLTDWKDFLLVKSRRNITMVSYLEDFPGLVHFIYVDRTTGQMVAPSLNCSQKTSSELGKGPLAAFVKTKVWSLIQLARRYLQKGYTTLLFQEGDFYCSYFLWFENDMGYKLQMIEVPVLSDDSVPIGMLGGDYYRKLLRYYSKNRPTEAVRCYELLALHLSVIPTDLLVQQAGQLARRLWEASRIPLL

SEQ ID NO: 16759 - protein, 324 aa, Homo sapiens
MKCVLVATEGAEVLFYWTDQEFEESLRLKFGQSENEEEELPALEDQLSTLLAPVIISSMTMLEKLSDTYTCFSTENGNFLYVLHLFGECLFIAINGDHTESEGDLRRKLYVLKYLFEVHFGLVTVDGHLIRKELRPPDLAQRVQLWEHFQSLLWTYSRLREQEQCFAVEALERLIHPQLCELCIEALERHVIQAVNTSPERGGEEALHAFLLVHSKLLAFYSSHSASSLRPADLLALILLVQDLYPSESTAEDDIQPSPRRARSSQNIPVQQAWSPHSTGPTGGSSAETETDSFSLPEEYFTPAPSPGDQSSGEDRRKAGGNNS

SEQ ID NO: 16760 - protein, 680 aa, Homo sapiens
MKCVLVATEGAEVLFYWTDQEFEESLRLKFGQSENEEEELPALEDQLSTLLAPVIISSMTMLEKLSDTYTCFSTENGNFLYVLHLFGECLFIAINGDHTESEGDLRRKLYVLKLRPPDLAQRVQLWEHFQSLLWTYSRLREQEQCFAVEALERLIHPQLCELCIEALERHVIQAVNTSPERGGEEALHAFLLVHSKLLAFYSSHSASSLRPADLLALILLVQDLYPSESTAEDDIQPSPRRARSSQNIPVQQAWSPHSTGPTGGSSAETETDSFSLPEEYFTPAPSPGDQSSGSTIWLEGGTPPMDALQIAEDTLQTLVPHCPVPSGPRRIFLDANVKESYCPLVPHTMYCLPLWQGINLVLLTRSPSAPLALVLSQLMDGFSMLEKKLKEGPEPGASLRSQPLVGDLRQRMDKFVKNRGAQEIQSTWLEFKAKAFSKSEPGSSWELLQACGKLKRQLCAIYRLNFLTTAPSRGGPHLPQHLQDQVQRLMREKLTDWKDFLLVKSRRNITMVSYLEDFPGLVHFIYVDRTTGQMVAPSLNCSQKTSSELGKGPLAAFVKTKVWSLIQLARRYLQKGYTTLLFQEGDFYCSYFLWFENDMGYKLQMIEVPVLSDDSVPIGMLGGDYYRKLLRYYSKNRPTEAVRCYELLALHLSVIPTDLLVQQAGQLARRLWEASRIPLL

SEQ ID NO: 16761 - protein, 525 aa, Homo sapiens
MKALIAALLLITLQYSCAVSPTDCSAVEPEAEKALDLINKRRRDGYLFQLLRIADAHLDRVENTTVYYLVLDVQESDCSVLSRKYWNDCEPPDSRRPSEIVIGQCKVIATRHSHESQDLRVIDFNCTTSSVSSALANTKDSPVLIDFFEDTERYRKQANKALEKYKEENDDFASFRVDRIERVARVRGGEGTGYFVDFSVRNCPRHHFPRHPNVFGFCRADLFYDVEALDLESPKNLVINCEVFDPQEHENINGVPPHLGHPFHWGGHERSSTTKPPFKPHGSRDHHHPHKPHEHGPPPPPDERDHSHGPPLPQGPPPLLPMSCSSCQHATFGTNGAQRHSHNNNSSDLHPHKHHSHEQHPHGHHPHAHHPHEHDTHRQHPHGHHPHGHHPHGHHPHGHHPHGHHPHCHDFQDYGPCDPPPHNQGHCCHGHGPPPGHLRRRGPGKGPRPFHCRQIGSVYRLPPLRKGEVLPLPEANFPSFPLPHHKHPLKPDNQPFPQSVSESCPGKFKSGFPQVSMFFTHTFPK

SEQ ID NO: 16762 - protein, 223 aa, Homo sapiens
MRCAHAPAPRTRYPTRAPSGPRPPSRSQAQTPPRSVPRLRPRHRHPQDPRSPGPAPRHRRPPRPDPRAPPARASYRRFRTWPSATSWERRRLSPGHRALARGPPARLGGEGPGAGDRRREGPDRSPRQPPVLPAAAAQPDSSSAQAPGPSTLRPAATARRKRRWATRGPAHPAFARAHGEAGAGRVRTSARAGSTCAGWALWRCALRWAERQVGALGAESRFP

SEQ ID NO: 16763 - protein, 233 aa, Homo sapiens
MLKPSVTSAPTADMATLTVVQPLTLDRDVARAIELLEKLQESGEVPVHKLQSLKKVLQSEFCTAIREVYQYMHETITVNGCPEFRARATAKATVAAFAASEGHSHPRVVELPKTDEGLGFNVMGGKEQNSPIYISRIIPGGVAERHGGLKRGDQLLSVNGVSVEGEHHEKAVELLKAAKDSVKLVVRYTPKVLEEMEARFEKLRTARRRQQQQLLIQQQQQQQQQQTQQNHMS

SEQ ID NO: 16764 - protein, 2067 aa, Homo sapiens
MMPQKKRRRKKDIDFLALYEAELLNYASEDDEGELEHEYYKARVYEVVTATGDVRGAGTDANVFITLFGENGLSPKLQLTSKSKSAFEKGNVDVFRVRTNNVGLIYKVRIEHDNTGLNASWYLDHVIVTDMKRPHLRYYFNCNNWLSKVEGDRQWCRDLLASFNPMDMPRGNKYEVKVYTGDVIGAGTDADVFINIFGEYGDTGERRLENEKDNFEKGAEDRFILDAPDLGQLMKINVGHNNKGGSAGWFLSQIVIEDIGNKRKYDFPLNRWLALDEDDGKIQRDILVGGAETTAITYIVTVFTGDVRGAGTKSKIYLVMYGARGNKNSGKIFLEGGVFDRGRTDIFHIELAVLLSPLSRVSVGHGNVGVNRGWFCEKVVILCPFTGIQQTFPCSNWLDEKKADGLIERQLYEMVSLRKKRLKKFPWSLWVWTTDLKKAGTNSPIFIQIYGQKGRTDEILLNPNNKWFKPGIIEKFRIELPDLGRFYKIRVWHDKRSSGSGWHLERMTLMNTLNKDKYNFNCNRWLDANEDDNEIVREMTAEGPTVRRIMGMARYHVTVCTGELEGAGTDANVYLCLFGDVGDTGERLLYNCRNNTDLFEKGNADEFTIESVTMRNVRRVRIRHDGKGSGSGWYLDRVLVREEGQPESDNVEFPCLRWLDKDKDDGQLVRELLPSDSSATLKNFRYHISLKTGDVSGASTDSRVYIKLYGDKSDTIKQVLLVSDNNLKDYFERGRVDEFTLETLNIGNINRLVIGHDSTGMHASWFLGSVQIRVPRQGKQYTFPANRWLDKNQADGRLEVELYPSEVVEIQKLVHYEVEIWTGDVGGAGTSARVYMQIYGEKGKTEVLFLSSRSKVFERASKDTFQTDTFTIYAIDLGALTKIRIRHDNTGNRAGWFLDRIDITDMNNEITYYFPCQRWLAVEEDDGQLSRELLPVDESYVLPQSEEGRGGGDNNPLDNLALEQKDKSTTFSVTIKTGVKKNAGTDANVFITLFGTQDDTGMTLLKSSKTNSDKFERDSIEIFTVETLDLGDLWKVRLGHDNTGKAPGWFVDWVEVDAPSLGKCMTFPCGRWLAKNEDDGSIIRDLFHAELQTRLYTPFVPYEITLYTSDVFAAGTDANIFIIIYGCDAVCTQQKYLCTNKREQKQFFERKSASRFIVELEDVGEIIEKIRIGHNNTGMNPGWHCSHVDIRRLLPDKDGAETLTFPCDRWLATSEDDKKTIRELVPYDIFTEKYMKDGSLRQVYKEVEEPLDIVLYSVQIFTGNIPGAGTDAKVYITIYGDLGDTGERYLGKSENRTNKFERGTADTFIIEAADLGVIYKIKLRHDNSKWCADWYVEKVEIWNDTNEDEFLFLCGRWLSLKKEDGRLERLFYEKEYTGDRSSNCSSPADFWEIALSSKMADVDISTVTGPMADYVQEGPIIPYYVSVTTGKHKDAATDSRAFIFLIGEDDERSKRIWLDYPRGKRGFSRGSVEEFYVAGLDVGIIKKIELGHDGASPESCWLVEELCLAVPTQGTKYMLNCNCWLAKDRGDGITSRVFDLLDAMVVNIGVKVLYEMTVWTGDVVGGGTDSNIFMTLYGINGSTEEMQLDKKKARFEREQNDTFIMEILDIAPFTKMRIRIDGLGSRPEWFLERILLKNMNTGDLTMFYYGDWLSQRKGKKTLVCEMCAVIDEEEMMEWTSYTVAVKTSDILGAGTDANVFIIIFGENGDSGTLALKQSANWNKFERNNTDTFNFPDMLSLGHLCKLRVWHDNKGIFPGWHLSYVDVKDNSRDETFHFQCDCWLSKSEGDGQTVRDFACANNKICDELEETTYEIVIETGNGGETRENVWLILEGRKNRSKEFLMENSSRQRAFRKGTTDTFEFDSIYLGDIASLCVGHLAREDRFIPKRELAWHVKTITITEMEYGNVYFFNCDCLIPLKRKRKYFKVFEVTKTTESFASKVQSLVPVKYEVIVTTGYEPGAGTDANVFVTIFGANGDTGKRELKQKMRNLFERGSTDRFFLETLELGELRKVRLEHDSSGYCSGWLVEKVEVTNTSTGVATIFNCGRWLDKKRGDGLTWRDLFPSV

SEQ ID NO: 16765 - protein, 1114 aa, Homo sapiens
MNNEITYYFPCQRWLAVEEDDGQLSRELLPVDESYVLPQSEEGRGGGDNNPLDNLALEQKDKSTTFSVTIKTGVKKNAGTDANVFITLFGTQDDTGMTLLKSSKTNSDKFERDSIEIFTVETLDLGDLWKVRLGHDNTGKAPGWFVDWVEVDAPSLGKCMTFPCGRWLAKNEDDGSIIRDLFHAELQTRLYTPFVPYEITLYTSDVFAAGTDANIFIIIYGCDAVCTQQKYLCTNKREQKQFFERKSASRFIVELEDVGEIIEKIRIGHNNTGMNPGWHCSHVDIRRLLPDKDGAETLTFPCDRWLATSEDDKKTIRELVPYDIFTEKYMKDGSLRQVYKEVEEPLDIVLYSVQIFTGNIPGAGTDAKVYITIYGDLGDTGERYLGKSENRTNKFERGTADTFIIEAADLGVIYKIKLRHDNSKWCADWYVEKVEIWNDTNEDEFLFLCGRWLSLKKEDGRLERLFYEKEYTGDRSSNCSSPADFWEIALSSKMADVDISTVTGPMADYVQEGPIIPYYVSVTTGKHKDAATDSRAFIFLIGEDDERSKRIWLDYPRGKRGFSRGSVEEFYVAGLDVGIIKKIELGHDGASPESCWLVEELCLAVPTQGTKYMLNCNCWLAKDRGDGITSRVFDLLDAMVVNIGVKVLYEMTVWTGDVVGGGTDSNIFMTLYGINGSTEEMQLDKKKARFEREQNDTFIMEILDIAPFTKMRIRIDGLGSRPEWFLERILLKNMNTGDLTMFYYGDWLSQRKGKKTLVCEMCAVIDEEEMMEWTSYTVAVKTSDILGAGTDANVFIIIFGENGDSGTLALKQSANWNKFERNNTDTFNFPDMLSLGHLCKLRVWHDNKGIFPGWHLSYVDVKDNSRDETFHFQCDCWLSKSEGDGQTVRDFACANNKICDELEETTYEIVIETGNGGETRENVWLILEGRKNRSKEFLMENSSRQRAFRKGTTDTFEFDSIYLGDIASLCVGHLAREDRFIPKRELAWHVKTITITEMEYGNVYFFNCDCLIPLKRKRKYFKVFEVTKTTESFASKVQSLVPVKYEVIVTTGYEPGAGTDANVFVTIFGANGDTGKRELKQKMRNLFERGSTDRFFLETLELVVTRLGLAAECG

SEQ ID NO: 16766 - protein, 457 aa, Homo sapiens
MTVWTGDVVGGGTDSNIFMTLYGINGSTEEMQLDKKKARFEREQNDTFIMEILDIAPFTKMRIRIDGLGSRPEWFLERILLKNMNTGDLTMFYYGDWLSQRKGKKTLVCEMCAVIDEEEMMEWTSYTVAVKTSDILGAGTDANVFIIIFGENGDSGTLALKQSANWNKFERNNTDTFNFPDMLSLGHLCKLRVWHDNKGIFPGWHLSYVDVKDNSRDETFHFQCDCWLSKSEGDGQTVRDFACANNKICDELEETTYEIVIETGNGGETRENVWLILEGRKNRSKEFLMENSSRQRAFRKGTTDTFEFDSIYLGDIASLCVGHLAREDRFIPKRELAWHVKTITITEMEYGNVYFFNCDCLIPLKRKRKYFKVFEVTKTTESFASKVQSLVPVKYEVIVTTGYEPGAGTDANVFVTIFGANGDTGKRELKQKMRNLFERGSTDRFFLETLELGELRK

SEQ ID NO: 16767 - protein, 512 aa, Homo sapiens
MTVWTGDVVGGGTDSNIFMTLYGINGSTEEMQLDKKKARFEREQNDTFIMEILDIAPFTKMRIRIDGLGSRPEWFLERILLKNMNTGDLTMFYYGDWLSQRKGKKTLVCEMCAVIDEEEMMEWTSYTVAVKTSDILGAGTDANVFIIIFGENGDSGTLALKQSANWNKFERNNTDTFNFPDMLSLGHLCKLRVWHDNKGIFPGWHLSYVDVKDNSRDETFHFQCDCWLSKSEGDGQTVRDFACANNKICDELEETTYEIVIETGNGGETRENVWLILEGRKNRSKEFLMENSSRQRAFRKGTTDTFEFDSIYLGDIASLCVGHLAREDRFIPKRELAWHVKTITITEMEYGNVYFFNCDCLIPLKRKRKYFKVFEVTKTTESFASKVQSLVPVKYEVIVTTGYEPGAGTDANVFVTIFGANGDTGKRELKQKMRNLFERGSTDRFFLETLELGELRKVRLEHDSSGYCSGWLVEKVEVTNTSTGVATIFNCGRWLDKKRGDGLTWRDLFPSV

SEQ ID NO: 16768 - protein, 88 aa, Homo sapiens
MARGLLHLRVGGRRPRGLCCWKKGSRSRPQERVLGSTSGKNWRRVTERSEGSKFIGIYSVRECKSSDCRRRNSRPSVVSLLRGSCEEL

SEQ ID NO: 16769 - protein, 197 aa, Homo sapiens
MAALGEPVRLERDICRAIELLEKLQRSGEVPPQKLQALQRVLQSEFCNAVREVYEHVYETVDISSSPEVRANATAKATVAAFAASEGHSHPRVVELPKTEEGLGFNIMGGKEQNSPIYISRIIPGGIADRHGGLKRGDQLLSVNGVSVEGEHHEKAVELLKAAQGKVKLVVRYTPKVLEEMESRFEKMRSAKRRQQT

SEQ ID NO: 16770 - protein, 292 aa, Homo sapiens
MGIAESTPDELPSDAEEQLRSGDQQLELSGRRLRRLPSAVCALSRLQKLYVSGTGLRELPEEIEELRELRILALDFNKLERLPDGLCRLPRLTRLYLGGNRLLALPADFAQLQSLRCLWIEGNFLRRFPRPLLRLVALQSLQMGDNRLRALPAELPRMTGLRGLWLYGNRFEEFPPALLRMGRLHILDLDRNRLGGFPDLHPLRALRVFSYDHNPVTGPPRVADTVFLVGEGAVERMAERDEPTPRPPPRRPARAFEDEEEEDLLIGGAGSRALGAPGGSFRALEAAPGLGT

SEQ ID NO: 16771 - protein, 514 aa, Homo sapiens
MDTMRSLRFISAEALVSHPQVARQSLDSVAHNLYPLLFKASYLLEQAEVTRAVLGRWPLEEFRLGALLGPGADHPQDLRDRTCRACLEALVRGLADHVLQDRSRRRLRVADLTGIRDVQVQRCPCGRALGRWGRTQLLARTCCELQAEPLAAGRPVEVLADLFVTEGNFEAVVQALRPAGPAPLRVHCPSFRADSLSPSQLLHVLRLAGPGALRKLEVVHNVRLHAGHVQQLLAQVGFPRLASLTLPTKAFDAPPTYASTPDGEDPLLASIARELSKMAQLTELSVAFSTLTGKIPTLLGPLQTPLRVLDLANCALNHTDMAFLADCAHAAHLEVLDLSGHNLVSLYPSTFFRLLSQASRTLRILTLEECGIVDSHVGMLILGLSPCHRLRQLKFLGNPLSARALRRLFTALCELPELRCIEFPVPKDCYPEGAAYPQDELAMSKFNQQKYDEIAEELRAVLLRADREDIQVSTPLFGSFDPDIQETSNELGAFLLQAFKTALENFSRALKQIE

SEQ ID NO: 16772 - protein, 825 aa, Homo sapiens
MATSERALLRTRAASLLRGLGRSRTGARSLQFRAEKERQPCWSFPMGQKTKGSSNIASSYLLQQLMHRYQELDSDGDEDQGEGEAGSEESSESEMLNLEEEFDGVLREEAVAKALHHLGRSGSGTEQVYLNLTLSGCNLIDVSILCGYVHLQKLDLSANKIEDLSCVSCMPYLLELNASQNNLTTFFNFKPPKNLKKADFSHNQISEICDLSAYHALTKLILDGNEIEEISGLEMCNNLIHLSLANNKITTINGLNKLPIKILCLSNNQIEMITGLEDLKALQNLDLSHNQISSLQGLENHDLLEVINLEDNKIAELREIEYIKNLPILRVLNLLENPIQEKSEYWFFVIFMLLRLTELDQKKIKVEEKVSAVNKYDPPPEVVAAQDHLTHVVNSVMQPQRIFDSTLPSLDAPYPMLILAGPEACGKRELAHRLCRQFSTYFRYGACHTTRPPYFGEGDRVDYHFISQDVFDEMVNMGKFILTFSYGNHKYGLNRDTVEGIARDGLASCIHMEIEGVRSLKYSYFEPRYILVVPMNKEKYEGYLRRKGLFSRAEIEFAVSRVDLYIKINQNFPGYFDEVINADDLDVAYQKLSQLIREYLGLTEEPAKSLATTADVKTSHLKPEAHPTKYISSNMGDFLHSTDRNYLIKFWAKLSAKKTPAERDSIHRQHEAARQALMGRIRPDHTLLFQRGPVPAPLTSGLHYYTTLEELWKSFDLCEDYFKPPFGPYPEKSGKDSLVSMKCSLFRFCPWSKELPFQPPEGSISSHLGSGASDSETEETRKALPIQSFSHEKESHQHRQHSVPVISRPGSNVKPTLPPIPQGRR

SEQ ID NO: 16773 - protein, 774 aa, Homo sapiens
MERPLCSHLCSCLAMLALLSPLSLAQYDSWPHYPEYFQQPAPEYHQPQAPANVAKIQLRLAGQKRKHSEGRVEVYYDGQWGTVCDDDFSIHAAHVVCRELGYVEAKSWTASSSYGKGEGPIWLDNLHCTGNEATLAACTSNGWGVTDCKHTEDVGVVCSDKRIPGFKFDNSLINQIENLNIQVEDIRIRAILSTYRKRTPVMEGYVEVKEGKTWKQICDKHWTAKNSRVVCGMFGFPGERTYNTKVYKMFASRRKQRYWPFSMDCTGTEAHISSCKLGPQVSLDPMKNVTCENGLPAVVSCVPGQVFSPDGPSRFRKAYKPEQPLVRLRGGAYIGEGRVEVLKNGEWGTVCDDKWDLVSASVVCRELGFGSAKEAVTGSRLGQGIGPIHLNEIQCTGNEKSIIDCKFNAESQGCNHEEDAGVRCNTPAMGLQKKLRLNGGRNPYEGRVEVLVERNGSLVWGMVCGQNWGIVEAMVVCRQLGLGFASNAFQETWYWHGDVNSNKVVMSGVKCSGTELSLAHCRHDGEDVACPQGGVQYGAGVACSETAPDLVLNAEMVQQTTYLEDRPMFMLQCAMEENCLSASAAQTDPTTGYRRLLRFSSQIHNNGQSDFRPKNGRHAWIWHDCHRHYHSMEVFTHYDLLNLNGTKVAEGHKASFCLEDTECEGDIQKNYECANFGDQGITMGCWDMYRHDIDCQWVDITDVPPGDYLFQVVINPNFEVAESDYSNNIMKCRSRYDGHRIWMYNCHIGGSFSEETEKKFEHFSGLLNNQLSPQ

SEQ ID NO: 16774 - protein, 347 aa, Homo sapiens
MKLTSEKLPKNPFYASVSQYAAKNQKFFQWKKEKTDYTHANLVDKALQLLKERILKGDTLAYFLRGQLYFEEGWYEEALEQFEEIKEKDHQATYQLGVMYYDGLGTTLDAEKGVDYMKKILDSPCPKARHLKFAAAYNLGRAYYEGKGVKRSNEEAERLWLIAADNGNPKASVKAQSMLGLYYSTKEPKELEKAFYWHSEACGNGNLESQGALGLMYLYGQGIRQDTEAALQCLREAAERGNVYAQGNLVEYYYKMKFFTKCVAFSKRIADYDEVHDIPMIAQVTDCLPEFIGRGMAMASFYHARCLQLGLGITRDETTAKHYYSKACRLNPALADELHSLLIRQRI

SEQ ID NO: 16775 - protein, 349 aa, Homo sapiens
MKLTSEKLPKNPFYASVSQYAAKNQKFFQWKKEKTKSDYTHANLVDKALQLLKERILKGDTLAYFLRGQLYFEEGWYEEALEQFEEIKEKDHQATYQLGVMYYDGLGTTLDAEKGVDYMKKILDSPCPKARHLKFAAAYNLGRAYYEGKGVKRSNEEAERLWLIAADNGNPKASVKAQSMLGLYYSTKEPKELEKAFYWHSEACGNGNLESQGALGLMYLYGQGIRQDTEAALQCLREAAERGNVYAQGNLVEYYYKMKFFTKCVAFSKRIADYDEVHDIPMIAQVTDCLPEFIGRGMAMASFYHARCLQLGLGITRDETTAKHYYSKACRLNPALADELHSLLIRQRI

SEQ ID NO: 16776 - protein, 542 aa, Homo sapiens
MAELDQLPDESSSAKALVSLKEGSLSNTWNEKYSSLQKTPVWKGRNTSSAVEMPFRNSKRSRLFSDEDDRQINTRSPKRNQRVAMVPQKFTATMSTPDKKASQKIGFRLRNLLKLPKAHKWCIYEWFYSNIDKPLFEGDNDFCVCLKESFPNLKTRKLTRVEWGKIRRLMGKPRRCSSAFFEEERSALKQKRQKIRLLQQRKVADVSQFKDLPDEIPLPLVIGTKVTARLRGVHDGLFTGQIDAVDTLNATYRVTFDRTGLGTHTIPDYEVLSNEPHETMPIAAFGQKQRPSRFFMTPPRLHYTPPLQSPIIDNDPLLGQSPWRSKISGSDTETLGGFPVEFLIQVTRLSKILMIKKEHIKKLREMNTEAEKLKSYSMPISIEFQRRYATIVLELEQLNKDLNKVLHKVQQYCYELAPDQGLQPADQPTDMRRRCEEEAQEIVRHANSSTGQPCVENENLTDLISRLTAILLQIKCLAEGGDLNSFEFKSLTDSLNDIKSTIDASNISCFQNNVEIHVAHIQSGLSQMGNLHAFAANNTNRD

SEQ ID NO: 16777 - protein, 558 aa, Homo sapiens
MHRGGQPLKKRRGSFKMAELDQLPDESSSAKALVSLKEGSLSNTWNEKYSSLQKTPVWKGRNTSSAVEMPFRNSKRSRLFSDEDDRQINTRSPKRNQRVAMVPQKFTATMSTPDKKASQKIGFRLRNLLKLPKAHKWCIYEWFYSNIDKPLFEGDNDFCVCLKESFPNLKTRKLTRVEWGKIRRLMGKPRRCSSAFFEEERSALKQKRQKIRLLQQRKVADVSQFKDLPDEIPLPLVIGTKVTARLRGVHDGLFTGQIDAVDTLNATYRVTFDRTGLGTHTIPDYEVLSNEPHETMPIAAFGQKQRPSRFFMTPPRLHYTPPLQSPIIDNDPLLGQSPWRSKISGSDTETLGGFPVEFLIQVTRLSKILMIKKEHIKKLREMNTEAEKLKSYSMPISIEFQRRYATIVLELEQLNKDLNKVLHKVQQYCYELAPDQGLQPADQPTDMRRRCEEEAQEIVRHANSSTGQPCVENENLTDLISRLTAILLQIKCLAEGGDLNSFEFKSLTDSLNDIKSTIDASNISCFQNNVEIHVAHIQSGLSQMGNLHAFAANNTNRD

SEQ ID NO: 16778 - protein, 507 aa, Homo sapiens
MAELDQLPDESSSAKALVSLKEGSLSNTWNEKYSSLQKTPVWKGRNTSSAVEMKFTATMSTPDKKASQKIGFRLRNLLKLPKAHKWCIYEWFYSNIDKPLFEGDNDFCVCLKESFPNLKTRKLTRVEWGKIRRLMGKPRRCSSAFFEEERSALKQKRQKIRLLQQRKVADVSQFKDLPDEIPLPLVIGTKVTARLRGVHDGLFTGQIDAVDTLNATYRVTFDRTGLGTHTIPDYEVLSNEPHETMPIAAFGQKQRPSRFFMTPPRLHYTPPLQSPIIDNDPLLGQSPWRSKISGSDTETLGGFPVEFLIQVTRLSKILMIKKEHIKKLREMNTEAEKLKSYSMPISIEFQRRYATIVLELEQLNKDLNKVLHKVQQYCYELAPDQGLQPADQPTDMRRRCEEEAQEIVRHANSSTGQPCVENENLTDLISRLTAILLQIKCLAEGGDLNSFEFKSLTDSLNDIKSTIDASNISCFQNNVEIHVAHIQSGLSQMGNLHAFAANNTNRD

SEQ ID NO: 16779 - protein, 769 aa, Homo sapiens
MSNNLRRVFLKPAEENSGNASRCVSGCMYQVVQTIGSDGKNLLQLLPIPKSSGNLIPLVQSSVMSDALKGNTGKPVQVTFQTQISSSSTSASVQLPIFQPASSSNYFLTRTVDTSEKGRVTSVGTGNFSSSVSKVQSHGVKIDGLTMQTFAVPPSTQKDSSFIVVNTQSLPVTVKSPVLPSGHHLQIPAHAEVKSVPASSLPPSVQQKILATATTSTSGMVEASQMPTVIYVSPVNTVKNVVTKNFQNIYPKPVTEIAKPVILNTTQIPKNVATETQLKGGQHSQAAPVKWIFQDNLQPFTPSLVPVKSSNNVASKILKTFVDRKNLGDNTINMPPLSTIDPSGTRSKNMPIKDNALVMFNGKVYLLAKKGTDVLPSQIDQQNSVSPDTPVRKDTLQTVSSSPVTEISREVVNIVLAKSKSSQMETKSLSNTQLASMANLRAEKNKVEKPSPSTTNPHMNQSSNYLKQSKTLFTNPIFPVGFSTGHNAPRKVTAVIYARKGSVLQSIEKISSSVDATTVTSQQCVFRDQEPKIHNEMASTSDKGAQGRNDKKDSQGRSNKALHLKSDAEFKKIFGLTKDLRVCLTRIPDHLTSGEGFDSFSSLVKSGTYKETEFMVKEGERKQQNFDKKRKAKTNKKMDHIKKRKTENAYNAIINGEANVTGSQLLSSILPTSDVSQHNILTSHSKTRQEKRTEMEYYTHEKQEKGTLNSNAAYEQSHFFNKNYTEDIFPVTPPELEETIRDEKIRRLKQVLREKEAALEEMRKKMHQK

SEQ ID NO: 16780 - protein, 233 aa, Homo sapiens
MASTSDKGAQGRNDKKDSQGRSNKALHLKSDAEFKKIFGLTKDLRVCLTRIPDHLTSGEGFDSFSSLVKSGTYKETEFMVKEGERKQQNFDKKRKAKTNKKMDHIKKRKTENAYNAIINGEANVTGSQLLSSILPTSDVSQHNILTSHSKTRQEKRTEMEYYTHEKQEKGTLNSNAAYEQSHFFNKNYTEDIFPVTPPELEETIRDEKIRRLKQVLREKEAALEEMRKKMHQK

SEQ ID NO: 16781 - protein, 947 aa, Homo sapiens
MSWLRFWGPWPLLTWQLLSLLVKEAQPLVWVKDPLQLTSNPLGPPEPWSSRSSHLPWESPHAPAPPAAPGDFDYLGPSASSQMSALPQEPTENLAPFLKELDSAGELPLGPEPFLAAHQDLNDKRTPEERLPEVVPLLNRDQNQALVQLPRLKWVQTTDLDRAAGHQADEILVPLDSKVSRPTKFVVSPKNLKKDLAERWSLPEIVGIPHQLSKPQRQKQTLPDDYLSMDTLYPGSLPPELRVNADEPPGPPEQVGLSQFHLEPKSQNPETLEDIQSSSLQEEAPAQLLQLPQEVEPSTQQEAPALPPESSMESLAQTPLNHEVTVQPPGEDQAHYNLPKFTVKPADVEVTMTSEPKNETESTQAQQEAPIQPPEEAEPSSTALRTTDPPPEHPEVTLPPSDKGQAQHSHLTEATVQPLDLELSITTEPTTEVKPSPTTEETSAQPPDPGLAITPEPTTEIGHSTALEKTRAPHPDQVQTLHRSLTEVTGPPTKLESSQDSLVQSETAPEEQKASTSTNICELCTCGDETLSCVGLSPKQRLRQVPVPEPDTYNGIFTTLNFQGNYISYLDGNVWKAYSWTEKLILSENYLTELPKDSFEGLLYLQYLDLSCNKIRYIERQTFESLPFLQYINLGCNLITKLSLGTFQAWHGMQFLHNLILNRNPLTTVEDPYLFELPALKYLDMGTTHITLTTLKNILTMTVELEKLILPSHMACCLCQFKNSIEAVCKTVKLHCNTACLTNSIHCPEEASVGNPEGAFMKMLQARKQHMSTQLTIESEAPSDSSGINLSGFGGDQLEIQLTEQLRSLIPNEDVRKFMSHVIRTLKMECSETHVQGSCAKLMLRTGLLMKLLSEQQEAKALNVEWDTDQQKTNYINENMEQNEQKEQKSSELMKEVPGDDYKNKLIFAISVTVILIILIIIFCLIEVNSHKRASEKYKDNPSISGA

SEQ ID NO: 16782 - protein, 896 aa, Homo sapiens
MSWLRFWGPWPLLTWQLLSLLVKEAQPLVWVKDPLQLTSNPLGPPEPWSSRSSHLPWESPHAPAPPAAPGDFDYLGPSASSQMSALPQEPTENLAPFLKELDSAGELPLGPEPFLAAHQDLNDKRTPEERLPEVVPLLNRDQNQALVQLPRLKWVQTTDLDRAAGHQADEILVPLDSKVSRPTKFVVSPKNLKKDLAERWSLPEIVGIPHQLSKPQRQKQTLPDDYLSMDTLYPGSLPPELRVNADEPPGPPEQVGLSQFHLEPKSQNPETLEDIQSSSLQEEAPAQLLQLPQEVEPSTQQEAPALPPESSMESLAQTPLNHEVTVQPPGEDQAHYNLPKFTVKPADVEVTMTSEPKNETESTQAQQEAPIQPPEEAEPSSTALRTTDPPPEHPEVTLPPSDKGQAQHSHLTEATVQPLDLELSITTEPTTEVKPSPTTEETSAQPPDPGLAITPEPTTEIGHSTALEKTRAPHPDQVQTLHRSLTEVTGPPTKLESSQDSLVQSETAPEEQKASTSTNICELCTCGDETLSCVGLSPKQRLRQVPVPEPDTYNGIFTTLNFQGNYISYLDGNVWKAYSWTEKLILSENYLTELPKDSFEGLLYLQYLILNRNPLTTVEDPYLFELPALKYLDMGTTHITLTTLKNILTMTVELEKLILPSHMACCLCQFKNSIEAVCKTVKLHCNTACLTNSIHCPEEASVGNPEGAFMKMLQARKQHMSTQLTIESEAPSDSSGINLSGFGGDQLEIQLTEQLRSLIPNEDVRKFMSHVIRTLKMECSETHVQGSCAKLMLRTGLLMKLLSEQQEAKALNVEWDTDQQKTNYINENMEQNEQKEQKSSELMKEVPGDDYKNKLIFAISVTVILIILIIIFCLIEVNSHKRASEKYKDNPSISGA

SEQ ID NO: 16783 - protein, 728 aa, Homo sapiens
MNQPESANDPEPLCAVCGQAHSLEENHFYSYPEEVDDDLICHICLQALLDPLDTPCGHTYCTLCLTNFLVEKDFCPMDRKPLVLQHCKKSSILVNKLLNKLLVTCPFREHCTQVLQRCDLEHHFQTSCKGASHYGLTKDRKRRSQDGCPDGCASLTATAPSPEVSAAATISLMTDEPGLDNPAYVSSAEDGQPAISPVDSGRSNRTRARPFERSTIRSRSFKKINRALSVLRRTKSGSAVANHADQGRENSENTTAPEVFPRLYHLIPDGEITSIKINRVDPSESLSIRLVGGSETPLVHIIIQHIYRDGVIARDGRLLPGDIILKVNGMDISNVPHNYAVRLLRQPCQVLWLTVMREQKFRSRNNGQAPDAYRPRDDSFHVILNKSSPEEQLGIKLVRKVDEPGVFIFNVLDGGVAYRHGQLEENDRVLAINGHDLRYGSPESAAHLIQASERRVHLVVSRQVRQRSPDIFQEAGWNSNGSWSPGPGERSNTPKPLHPTITCHEKVVNIQKDPGESLGMTVAGGASHREWDLPIYVISVEPGGVISRDGRIKTGDILLNVDGVELTEVSRSEAVALLKRTSSSIVLKALEVKEYEPQEDCSSPAALDSNHNMAPPSDWSPSWVMWLELPRCLYNCKDIVLRRNTAGSLGFCIVGGYEEYNGNKPFFIKSIVEGTPAYNDGRIRCGDILLAVNGRSTSGMIHACLARLLKELKGRITLTIVSWPGTFL

SEQ ID NO: 16784 - protein, 632 aa, Homo sapiens
MKALLLLVLPWLSPANYIDNVGNLHFLYSELCKGASHYGLTKDRKRRSQDGCPDGCASLTATAPSPEVSAAATISLMTDEPGLDNPAYVSSAEDGQPAISPVDSGRSNRTRARPFERSTIRSRSFKKINRALSVLRRTKSGSAVANHADQGRENSENTTAPEVFPRLYHLIPDGEITSIKINRVDPSESLSIRLVGGSETPLVHIIIQHIYRDGVIARDGRLLPGDIILKVNGMDISNVPHNYAVRLLRQPCQVLWLTVMREQKFRSRNNGQAPDAYRPRDDSFHVILNKSSPEEQLGIKLVRKVDEPGVFIFNVLDGGVAYRHGQLEENDRVLAINGHDLRYGSPESAAHLIQASERRVHLVVSRQVRQRSPDIFQEAGWNSNGSWSPGPGERSNTPKPLHPTITCHEKVVNIQKDPGESLGMTVAGGASHREWDLPIYVISVEPGGVISRDGRIKTGDILLNVDGVELTEVSRSEAVALLKRTSSSIVLKALEVKEYEPQEDCSSPAALDSNHNMAPPSDWSPSWVMWLELPRCLYNCKDIVLRRNTAGSLGFCIVGGYEEYNGNKPFFIKSIVEGTPAYNDGRIRCGDILLAVNGRSTSGMIHACLARLLKELKGRITLTIVSWPGTFL

SEQ ID NO: 16785 - protein, 488 aa, Homo sapiens
MHIQFPSKPTLPRACWEGRITAGSPGMPPDEIEIEPVRQSSDKMLYCEAESPPTVEKVKPARENSETDLEIEDDEKFFTTGQKELYLEACKLMGVVPVSYFIRNMEESYVNLNHHGLGPRGTKAIAIALVSNMAVTKLELEDNCIMEEGVLSLVEMLQENYYLQEMNISNNHLGLEGARIISDFFERNSSSIWSLELSGNDFKEDSAALLCQALSTNYQIKKLDLSHNQFSDVGGEHLGQMLAINVGLTSLDLSWNNFHTRGAVALCNGLRGNVTLTKLDLSMNGFGNEVALALGEVLRLNRCLVYLDIGGNDIGNEGASKISKGLESNESLRVLKLFLNPINMDGAILLILAIKRNPKSRMEELDISNVLVSEQFMKTLDGVYAVHPQLDVVFKAVQGLSPKKTIFLLTNPMKLIQSYADQHKITIVDFFKSLNPTGTMKMSVDEFQKVMIEQNKVPLNQYQVREVIKKLDEKTGMVNFSFLNTMKP

SEQ ID NO: 16786 - protein, 219 aa, Homo sapiens
MGVVPVSYFIRNMEESYVNLNHHGLGPRGTKAIAIALVSNMAVTKLELEDNCIMEEGVLSLVEMLQENYYLQEMNISNNHLGLEGARIISDFFERNSSSIWSLELSGNDFKEDSAALLCQALSTNYQIKKLDLSHNQFSDVGGEHLGQMLAINVGLTSLDLSWNNFHTRGAVALCNGLRGKSSDSTAAWSTWISVAMTSAMKGPPKSAKDWNPMKASEF

SEQ ID NO: 16787 - protein, 392 aa, Homo sapiens
MRGSCERSGEDEEQKEEAMVACGRLSGVPEAEQGPEANWDSDLETEGTDGLGELVRDTLYLRSCRAHSVVPISCFLRQGSAQELNLRHRGLGPQGARALASSLSSNPYVKRLDLRDNGLCGAGAEALAGALSKSSSIHDVDLSENQLGVAGAQALCAALTVNQAMRKMQLSGNGLEEQAAQHLAELLLAHTDLKSLDLSYNQLNDQAGETLGPALAENTGLTELNVSWNHLRGPGAVAFARGLEANIFLKVLDISYNGFGDPGASAVGEALKANNVLEELNMSNNRISAMGALSLGLGLRVNQTLRILVVSRNPMRSEGCFGLLKSVQDNPASALELLDFSDIQVNAEFDGLASSVRGILPELCIKTGACRVEYKKELLPVFRSALPASVPK

SEQ ID NO: 16788 - protein, 161 aa, Homo sapiens
MRGSCERSGEDEEQKEEAMVACGRLSGVPEAEQGPEANWDSDLETEGTDGLGELVRDTLYLRSCRAHSVVPISCFLRQGSAQELNLRHRGLGPQGARALASSLSSNPYVKRLDLRDNGLCGAGAEALAGALSKSSSIHGRCWVWGRWAGVSSFSSGMCLHR

SEQ ID NO: 16789 - protein, 753 aa, Homo sapiens
MRPVSVWQWSPWGLLLCLLCSSCLGSPSPSTGPEKKAGSQGLRFRLAGFPRKPYEGRVEIQRAGEWGTICDDDFTLQAAHILCRELGFTEATGWTHSAKYGPGTGRIWLDNLSCSGTEQSVTECASRGWGNSDCTHDEDAGVICKDQRLPGFSDSNVIEVEHHLQVEEVRIRPAVGWGRRPLPVTEGLVEVRLPDGWSQVCDKGWSAHNSHVVCGMLGFPSEKRVNAAFYRLLAQRQQHSFGLHGVACVGTEAHLSLCSLEFYRANDTARCPGGGPAVVSCVPGPVYAASSGQKKQQQSKPQGEARVRLKGGAHPGEGRVEVLKASTWGTVCDRKWDLHAASVVCRELGFGSAREALSGARMGQGMGAIHLSEVRCSGQELSLWKCPHKNITAEDCSHSQDAGVRCNLPYTGAETRIRLSGGRSQHEGRVEVQIGGPGPLRWGLICGDDWGTLEAMVACRQLGLGYANHGLQETWYWDSGNITEVVMSGVRCTGTELSLDQCAHHGTHITCKRTGTRFTAGVICSETASDLLLHSALVQETAYIEDRPLHMLYCAAEENCLASSARSANWPYGHRRLLRFSSQIHNLGRADFRPKAGRHSWVWHECHGHYHSMDIFTHYDILTPNGTKVAEGHKASFCLEDTECQEDVSKRYECANFGEQGITVGCWDLYRHDIDCQWIDITDVKPGNYILQVVINPNFEVAESDFTNNAMKCNCKYDGHRIWVHNCHIGDAFSEEANRRFERYPGQTSNQII

SEQ ID NO: 16790 - protein, 392 aa, Homo sapiens
MGQGMGAIHLSEVRCSGQELSLWKCPHKNITAEDCSHSQDAGVRCNLPYTGAETRIRLSGGRSQHEGRVEVQIGGPGPLRWGLICGDDWGTLEAMVACRQLGLGYANHGLQETWYWDSGNITEVVMSGVRCTGTELSLDQCAHHGTHITCKRTGTRFTAGVICSETASDLLLHSALVQETAYIEDRPLHMLYCAAEENCLASSARSANWPYGHRRLLRFSSQIHNLGRADFRPKAGRHSWVWHECHGHYHSMDIFTHYDILTPNGTKVAEGHKASFCLEDTECQEDVSKRYECANFGEQGITVGCWDLYRHDIDCQWIDITDVKPGNYILQVVINPNFEVAESDFTNNAMKCNCKYDGHRIWVHNCHIGDAFSEEANRRFERYPGQTSNQII

SEQ ID NO: 16791 - protein, 608 aa, Homo sapiens
MRPVSVWQWSPWGLLLCLLCSSCLGSPSPSTGPEKKAGSQGLRFRLAGFPRKPYEGRVEIQRAGEWGTICDDDFTLQAAHILCRELGFTEATGWTHSAKYGPGTGRIWLDNLSCSGTEQSVTECASRGWGNSDCTHDEDAGVICKDQRLPGFSDSNVIEARVRLKGGAHPGEGRVEVLKASTWGTVCDRKWDLHAASVVCRELGFGSAREALSGARMGQGMGAIHLSEVRCSGQELSLWKCPHKNITAEDCSHSQDAGVRCNLPYTGAETRIRLSGGRSQHEGRVEVQIGGPGPLRWGLICGDDWGTLEAMVACRQLGLGYANHGLQETWYWDSGNITEVVMSGVRCTGTELSLDQCAHHGTHITCKRTGTRFTAGVICSETASDLLLHSALVQETAYIEDRPLHMLYCAAEENCLASSARSANWPYGHRRLLRFSSQIHNLGRADFRPKAGRHSWVWHECHGHYHSMDIFTHYDILTPNGTKVAEGHKASFCLEDTECQEDVSKRYECANFGEQGITVGCWDLYRHDIDCQWIDITDVKPGNYILQVVINPNFEVAESDFTNNAMKCNCKYDGHRIWVHNCHIGDAFSEEANRRFERYPGQTSNQII

SEQ ID NO: 16792 - protein, 690 aa, Homo sapiens [sequence omitted]

SEQ ID NO: 16793 - protein, 344 aa, Homo sapiens
MGTRQTKGSLAERASPGAAPGPRRERPDFWASLLLRAGDKAGRAGAGMPPYHRRVGMVQELLRMVRQGRREEAGTLLQHLRQDLGMESTSLDDVLYRYASFRNLVDPITHDLIISLARYIHCPKPEGDALGAMEKLCRQLTYHLSPHSQWRRHRGLVKRKPQACLKAVLAGSPPDNTVDLSGIPLTSRDLERVTSYLQRCGEQVDSVELGFTGLTDDMVLQLLPALSTLPRLTTLALNGNRLTRAVLRDLTDILKDPSKFPNVTWIDLGNNVDIFSLPQPFLLSLRKRSPKQGHLPTILELGEGPGSGEEVREGTVGQEDPGGGPVAPAEDHHEGKETVAAAQT

SEQ ID NO: 16794 - protein, 212 aa, Homo sapiens
MGTRQTKGSLAERASPGAAPGPRRERPDFWASLLLRAGDKAGRAGAGMPPYHRRVGMVQELLRMVRQGRREEAGTLLQHLRQDLGMESTSLDDVLYRYASFRNLVDPITHDLIISLARYIHCPKPPQGCPGRKPPRQHSGPVGNPTDLPRPGAGDQLPTALWGAGRQRGAGLHRPHGRHGPAAAASTQHPAPPHHTGTQWQPVDPGRAARPH

SEQ ID NO: 16795 - protein, 649 aa, Homo sapiens
MQQDGLGVGTRNGSGKGRSVHPSWPWCAPRPLRYFGRDARARRAQTAAMALLAGGLSRGLGSHPAAAGRDAVVFVWLLLSTWCTAPARAIQVTVSNPYHVVILFQPVTLPCTYQMTSTPTQPIVIWKYKSFCRDRIADAFSPASVDNQLNAQLAAGNPGYNPYVECQDSVRTVRVVATKQGNAVTLGDYYQGRRITITGNADLTFDQTAWGDSGVYYCSVVSAQDLQGNNEAYAELIVLGRTSGVAELLPGFQAGPIEDWLFVVVVCLAAFLIFLLLGICWCQCCPHTCCCYVRCPCCPDKCCCPEALYAAGKAATSGVPSIYAPSTYAHLSPAKTPPPPAMIPMGPAYNGYPGGYPGDVDRSSSAGGQGSYVPLLRDTDSSVASEVRSGYRIQASQQDDSMRVLYYMEKELANFDPSRPGPPSGRVERAMSEVTSLHEDDWRSRPSRGPALTPIRDEEWGGHSPRSPRGWDQEPAREQAGGGWRARRPRARSVDALDDLTPPSTAESGSRSPTSNGGRSRAYMPPRSRSRDDLYDQDDSRDFPRSRDPHYDDFRSRERPPADPRSHHHRTRDPRDNGSRSGDLPYDGRLLEEAVRKKGSEERRRPHKEEEEEAYYPPAPPPYSETDSQASRERRLKKNLALSRESLVV

SEQ ID NO: 16796 - protein, 591 aa, Homo sapiens
MQQDGLGVGTRNGSGKGRSVHPSWPWCAPRPLRYFGRDARARRAQTAAMALAIQVTVSNPYHVVILFQPVTLPCTYQMTSTPTQPIVIWKYKSFCRDRIADAFSPASVDNQLNAQLAAGNPGYNPYVECQDSVRTVRVVATKQGNAVTLGDYYQGRRITITGNADLTFDQTAWGDSGVYYCSVVSAQDLQGNNEAYAELIVLGRTSGVAELLPGFQAGPIEDWLFVVVVCLAAFLIFLLLGICWCQCCPHTCCCYVRCPCCPDKCCCPEALYAAGKAATSGVPSIYAPSTYAHLSPAKTPPPPAMIPMGPAYNGYPGGYPGDVDRSSSVRSGYRIQASQQDDSMRVLYYMEKELANFDPSRPGPPSGRVERAMSEVTSLHEDDWRSRPSRGPALTPIRDEEWGGHSPRSPRGWDQEPAREQAGGGWRARRPRARSVDALDDLTPPSTAESGSRSPTSNGGRSRAYMPPRSRSRDDLYDQDDSRDFPRSRDPHYDDFRSRERPPADPRSHHHRTRDPRDNGSRSGDLPYDGRLLEEAVRKKGSEERRRPHKEEEEEAYYPPAPPPYSETDSQASRERRLKKNLALSRESLVV

SEQ ID NO: 16797 - protein, 629 aa, Homo sapiens
MQQDGLGVGTRNGSGKGRSVHPSWPWCAPRPLRYFGRDARARRAQTAAMALLAGGLSRGLGSHPAAAGRDAVVFVWLLLSTWCTAPARAIQVTVSNPYHVVILFQPVTLPCTYQMTSTPTQPIVIWKYKSFCRDRIADAFSPASVDNQLNAQLAAGNPGYNPYVECQDSVRTVRVVATKQGNAVTLGDYYQGRRITITGNADLTFDQTAWGDSGVYYCSVVSAQDLQGNNEAYAELIVLDWLFVVVVCLAAFLIFLLLGICWCQCCPHTCCCYVRCPCCPDKCCCPEALYAAGKAATSGVPSIYAPSTYAHLSPAKTPPPPAMIPMGPAYNGYPGGYPGDVDRSSSAGGQGSYVPLLRDTDSSVASVRSGYRIQASQQDDSMRVLYYMEKELANFDPSRPGPPSGRVERAMSEVTSLHEDDWRSRPSRGPALTPIRDEEWGGHSPRSPRGWDQEPAREQAGGGWRARRPRARSVDALDDLTPPSTAESGSRSPTSNGGRSRAYMPPRSRSRDDLYDQDDSRDFPRSRDPHYDDFRSRERPPADPRSHHHRTRDPRDNGSRSGDLPYDGRLLEEAVRKKGSEERRRPHKEEEEEAYYPPAPPPYSETDSQASRERRLKKNLALSRESLVV

SEQ ID NO: 16798 - protein, 630 aa, Homo sapiens
MQQDGLGVGTRNGSGKGRSVHPSWPWCAPRPLRYFGRDARARRAQTAAMALLAGGLSRGLGSHPAAAGRDAVVFVWLLLSTWCTAPARAIQVTVSNPYHVVILFQPVTLPCTYQMTSTPTQPIVIWKYKSFCRDRIADAFSPASVDNQLNAQLAAGNPGYNPYVECQDSVRTVRVVATKQGNAVTLGDYYQGRRITITGNADLTFDQTAWGDSGVYYCSVVSAQDLQGNNEAYAELIVLDWLFVVVVCLAAFLIFLLLGICWCQCCPHTCCCYVRCPCCPDKCCCPEALYAAGKAATSGVPSIYAPSTYAHLSPAKTPPPPAMIPMGPAYNGYPGGYPGDVDRSSSAGGQGSYVPLLRDTDSSVASEVRSGYRIQASQQDDSMRVLYYMEKELANFDPSRPGPPSGRVERAMSEVTSLHEDDWRSRPSRGPALTPIRDEEWGGHSPRSPRGWDQEPAREQAGGGWRARRPRARSVDALDDLTPPSTAESGSRSPTSNGGRSRAYMPPRSRSRDDLYDQDDSRDFPRSRDPHYDDFRSRERPPADPRSHHHRTRDPRDNGSRSGDLPYDGRLLEEAVRKKGSEERRRPHKEEEEEAYYPPAPPPYSETDSQASRERRLKKNLALSRESLVV

SEQ ID NO: 16799 - protein, 581 aa, Homo sapiens
MQQDGLGVGTRNGSGKGRSVHPSWPWCAPRPLRYFGRDARARRAQTAAMALLAGGLSRGLGSHPAAAGRDAVVFVWLLLSTWCTAPARAIQVTVSNPYHVVILFQPVTLPCTYQMTSTPTQPIVIWKYKSFCRDRIADAFSPASVDNQLNAQLAAGNPGYNPYVECQDSVRTVRVVATKQGNAVTLGDYYQGRRITITGNADLTFDQTAWGDSGVYYCSVVSAQDLQGNNEAYAELIVLVYAAGKAATSGVPSIYAPSTYAHLSPAKTPPPPAMIPMGPAYNGYPGGYPGDVDRSSSAGGQGSYVPLLRDTDSSVASEVRSGYRIQASQQDDSMRVLYYMEKELANFDPSRPGPPSGRVERAMSEVTSLHEDDWRSRPSRGPALTPIRDEEWGGHSPRSPRGWDQEPAREQAGGGWRARRPRARSVDALDDLTPPSTAESGSRSPTSNGGRSRAYMPPRSRSRDDLYDQDDSRDFPRSRDPHYDDFRSRERPPADPRSHHHRTRDPRDNGSRSGDLPYDGRLLEEAVRKKGSEERRRPHKEEEEEAYYPPAPPPYSETDSQASRERRLKKNLALSRESLVV

SEQ ID NO: 16800 - protein, 493 aa, Homo sapiens
MALLAGGLSRGLGSHPAAAGRDAVVFVWLLLSTWCTAPARAIQVTVSNPYHVVILFQPVTLPCTYQMTSTPTQPIVIWKYKSFCRDRIADAFSPASVDNQLNAQLAAGNPGYNPYVECQDSVRTVRVVATKQGNAVTLGDYYQGRRITITGMYAAGKAATSGVPSIYAPSTYAHLSPAKTPPPPAMIPMGPAYNGYPGGYPGDVDRSSSAGGQGSYVPLLRDTDSSVASEVRSGYRIQASQQDDSMRVLYYMEKELANFDPSRPGPPSGRVERAMSEVTSLHEDDWRSRPSRGPALTPIRDEEWGGHSPRSPRGWDQEPAREQAGGGWRARRPRARSVDALDDLTPPSTAESGSRSPTSNGGRSRAYMPPRSRSRDDLYDQDDSRDFPRSRDPHYDDFRSRERPPADPRSHHHRTRDPRDNGSRSGDLPYDGRLLEEAVRKKGSEERRRPHKEEEEEAYYPPAPPPYSETDSQASRERRLKKNLALSRESLVV

SEQ ID NO: 16801 - protein, 315 aa, Homo sapiens
MGARLGRRAGPEAGSEAGAAAGCGPAPYERRVRWLREIQSTLRERRPERARQLLRLLRQDLGLERTLLPDILYRDVAFLNPVDPISHDLLVNLARDLQCPKKDYELWKSSDKICRQLIYHLTPHSKQQQGSSLRQRKTQSCLKSSLQKTLLAGETVDLSGIPLSTQDVQHITRYLSSHGAVLAVLDLSFTGLSDELLHLLLPSLWALPRLTQLLLNGNRLTRATARKLTDAIKDTTKFPALAWVDLGNNVDVASLPQPLLVGLRRRLSQRTSLPTIYEGLDLEPEGSAAGATTPASTWDSTAAGLGPEPQACCAR

SEQ ID NO: 16802 - protein, 152 aa, Homo sapiens
MGARLGRRAGPEAGSEAGAAAGCGPAPYERRVRWLREIQSTLRERRPERARQLLRLLRQAREGAVRPWAGGQGGSGGLGVWEARGYGLWACIRREARRSWSLARAGGFRGRDRLQHAGSCVGERATAWSEGWVRSADRVEEGAAECVRVFGV

SEQ ID NO: 16803 - protein, 189 aa, Homo sapiens
MNGLPSAEAPGGAGCALAGLPPLPRGLSGLLNASGGSWRELERVYSQRSRIHDELSRAARAPDGPRHAAGAANAGPAAGPRRPVNLDSALAALRKEMVGLRQLDMSLLCQLWGLYESIQDYKHLCQDLSFCQDLSSSLHSDSSYPPDAGLSDDEEPPDASLPPDPPPLTVPQTHNARDQWLQDAFHISL

SEQ ID NO: 16804 - protein, 176 aa, Homo sapiens
MNGLPSAEAPGGAGCALAGLPPLPRGLSGLLNASGGSWRELERVYSQRSRIHDELSRAARAPDGPRHAAGAANAGPAAGPRRPVNLDSALAALRKEMLWGLYESIQDYKHLCQDLSFCQDLSSSLHSDSSYPPDAGLSDDEEPPDASLPPDPPPLTVPQTHNARDQWLQDAFHISL

SEQ ID NO: 16805 - protein, 162 aa, Homo sapiens
MNGLPSAEAPGGAGCALAGLPPLPRGLSGLLNASGGSWRELERVYSQRSRVVLSTSTQRWPRCARRCCLQVGLRQLDMSLLCQLWGLYESIQDYKHLCQDLSFCQDLSSSLHSDSSYPPDAGLSDDEEPPDASLPPDPPPLTVPQTHNARDQWLQDAFHISL

SEQ ID NO: 16806 - protein, 154 aa, Homo sapiens
MNGLPSAEAPGGAGCALAGLPPLPRGLSGLLNASGGSWRELERVYSQRSRIHDELSRAARAPDGPRHAAGAANAGPAAGPRRPVNLDSALAALRKEMLSAGGAAAVGHVLVVPAVGPVRVNPGLQTPVPRPELLPGPVILPPFGQLLPTGCGPV

SEQ ID NO: 16807 - protein, 756 aa, Homo sapiens
MAWSPPATLFLFLLLLGQPPPSRPQSLGTTKLRLVGPESKPEEGRLEVLHQGQWGTVCDDNFAIQEATVACRQLGFEAALTWAHSAKYGQGEGPIWLDNVRCVGTESSLDQCGSNGWGVSDCSHSEDVGVICHPRRHRGYLSETVSNALGPQGRRLEEVRLKPILASAKQHSPVTEGAVEVKYEGHWRQVCDQGWTMNNSRVVCGMLGFPSEVPVDSHYYRKVWDLKMRDPKSRLKSLTNKNSFWIHQVTCLGTEPHMANCQVQVAPARGKLRPACPGGMHAVVSCVAGPHFRPPKTKPQRKGSWAEEPRVRLRSGAQVGEGRVEVLMNRQWGTVCDHRWNLISASVVCRQLGFGSAREALFGARLGQGLGPIHLSEVRCRGYERTLSDCPALEGSQNGCQHENDAAVRCNVPNMGFQNQVRLAGGRIPEEGLLEVQVEVNGVPRWGSVCSENWGLTEAMVACRQLGLGFAIHAYKETWFWSGTPRAQEVVMSGVRCSGTELALQQCQRHGPVHCSHGGGRFLAGVSCMDSAPDLVMNAQLVQETAYLEDRPLSQLYCAHEENCLSKSADHMDWPYGYRRLLRFSTQIYNLGRTDFRPKTGRDSWVWHQCHRHYHSIEVFTHYDLLTLNGSKVAEGHKASFCLEDTNCPTGLQRRYACANFGEQGVTVGCWDTYRHDIDCQWVDITDVGPGNYIFQVIVNPHYEVAESDFSNNMLQCRCKYDGHRVWLHNCHTGNSYPANAELSLEQEQRLRNNLI

SEQ ID NO: 16808 - protein, 757 aa, Homo sapiens
MKVFCEVLEELYKKVLLGATLENDSHDYIFYLNPAVSDQDCSTATSLEWANTCGIQGRHQPISVGVAPIAVAPVCLKTNSQMSGSREVMLLQLTVIKVMTTRILSVKTEFHAKEQYRDVIKILLESAKVDSKLICMFQNSDKLLSHMAAQCLALLLYFQLREKITLSNSWIAFCQKNLSEYSESNKAIYCLWTLTAIIKEIFKDSCSQKTEILKQFLTHFDTIFEVFYNSLFSQHFENCRDTSKIVNILMCFLDLLELLIASRIHLKLHFTCQRILFLKPSCMLEVITWPIQAFVKRKVIIFLKKCLLCKVGEDLCRGSVPALMPPDHHVAVDMLALANAVLQAVNSGLLKTLSVYEKHSFFGGDEVQPECELITSPDHVILRAASLVIMKSLEIKFQNYSSASEVKVDLQRFMSELLTFLKPHLQPSLQLHNPCKWLSRVFIEQDDDMLEAAKASLGIYLTLTRGCEATESLTQGKEMWDHHTHENGYNPHCIFLFFLKNIGFDSTVLLDFLISSETCFLEYFVRYLKLLQKDWDNFFTICNNFDATESKYDISICGCVPSLVQDQSSNQTIPHRLTAPHSHRDVCARHSWASDAPSEPLKAVMSKGAHTMCASSLSSPRASQSLVDYDSSDDSDVESTEQCLANSKQTSLHQQATKEIQDAAGTSRDKKEFSLEPPSRPLVLKEFDTAFSFDCEVAPNDVVSEVGIFYRIVKCFQELQDAICRLQKKNLFPYNPTALLKLLKYIEVISNKTMNTL

SEQ ID NO: 16809 - protein, 436 aa, Homo sapiens
MKVFCEVLEELYKKVLLGATLENDSHDYIFYLNPAVSDQDCSTATSLEWANTCGIQGRHQPISVGVAPIAVAPVCLKTNSQMSGSREVMLLQLTVIKVMTTRILSVKTEFHAKEQYRDVIKILLESAKVDSKLICMFQNSDKLLSHMAAQCLALLLYFQLREKITLSNSWIAFCQKNLSEYSESNKAIYCLWTLTAIIKEIFKDSCSQKTEILKQFLTHFDTIFEVFYNSLFSQHFENCRDTSKIVNILMCFLDLLELLIASRIHLKLHFTCQRILFLKPSCMLEVITWPIQAFVKRKVIIFLKKCLLCKVGEDLCRGSVPALMPPDHHVAVDMLALANAVLQAVNSGLLKTLSVYEKHSFFGGDEVQPECELITSPDHVILRAASLVIMKSLEIKFQNYSSASEVKGNSPNSFCMQCVIIYLSTVIHNYQISGLV

SEQ ID NO: 16810 - protein, 409 aa, Homo sapiens
MKVFCEVLEELYKKVLLGATLENDSHDYIFYLNPAVSDQDCSTATSLEWANTCGIQGRHQPISVGVAPIAVAPVCLKTNSQMSGSREVMLLQLTVIKVMTTRILSVKTEFHAKEQYRDVIKILLESAKVDSKLICMFQNSDKLLSHMAAQCLALLLYFQLREKITLSNSWIAFCQKNLSEYSESNKAIYCLWTLTAIIKEIFKDSCSQKTEILKQFLTHFDTIFEVFYNSLFSQHFENCRDTSKIVNILMCFLDLLELLIASRIHLKLHFTCQRILFLKPSCMLEVITWPIQAFVKRKVIIFLKKCLLCKVGEDLCRGSVPALMPPDHHVAVDMLALANAVLQAVNSGLLKTLSVYEKHSFFGGDEVQPECELITSPDHVILRAASLVIMKSLEIKFQNYSSASEVKGA

SEQ ID NO: 16811 - protein, 732 aa, Homo sapiens
MTEGTCLRRRGGPYKTEPATDLGRWRLNCERGRQTWTYLQDERAGREQTGLEAYALGLDTKNYFKDLPKAHTAFEGALNGMTFYVGLQAEDGHWTGDYGGPLFLLPGLLITCHVARIPLPAGYREEIVRYLRSVQLPDGGWGLHIEDKSTVFGTALNYVSLRILGVGPDDPDLVRARNILHKKGGAVAIPSWGKFWLAVLNVYSWEGLNTLFPEMWLFPDWAPAHPSTLWCHCRQVYLPMSYCYAVRLSAAEDPLVQSLRQELYVEDFASIDWLAQRNNVAPDELYTPHSWLLRVVYALLNLYEHHHSAHLRQRAVQKLYEHIVADDRFTKSISIGPISKTINMLVRWYVDGPASTAFQEHVSRIPDYLWMGLDGMKMQGTNGSQIWDTAFAIQALLEAGGHHRPEFSSCLQKAHEFLRLSQVPDNPPDYQKYYRQMRKGGFSFSTLDCGWIVSDCTAEALKAVLLLQEKCPHVTEHIPRERLCDAVAVLLNMRNPDGGFATYETKRGGHLLELLNPSEVFGDIMIDYTYVECTSAVMQALKYFHKRFPEHRAAEIRETLTQGLEFCRRQQRADGSWEGSWGVCFTYGTWFGLEAFACMGQTYRDGTACAEVSRACDFLLSRQMADGGWGEDFESCEERRYLQSAQSQIHNTCWAMMGLMAVRHPDIEAQERGVRCLLEKQLPNGDWPQENIAGVFNKSCAISYTSYRNIFPIWALGRFSQLYPERALAGHP

SEQ ID NO: 16812 - protein, 652 aa, Homo sapiens
MTFYVGLQAEDGHWTGDYGGPLFLLPGLLITCHVARIPLPAGYREEIVRYLRSVQLPDGGWGLHIEDKSTVFGTALNYVSLRILGVGPDDPDLVRARNILHKKGGAVAIPSWGKFWLAVLNVYSWEGLNTLFPEMWLFPDWAPAHPSTLWCHCRQVYLPMSYCYAVRLSAAEDPLVQSLRQELYVEDFASIDWLAQRNNVAPDELYTPHSWLLRVVYALLNLYEHHHSAHLRQRAVQKLYEHIVADDRFTKSISIGPISKTINMLVRWYVDGPASTAFQEHVSRIPDYLWMGLDGMKMQGTNGSQIWDTAFAIQALLEAGGHHRPEFSSCLQKAHEFLRLSQVPDNPPDYQKYYRQMRKGGFSFSTLDCGWIVSDCTAEALKAVLLLQEKCPHVTEHIPRERLCDAVAVLLNMRNPDGGFATYETKRGGHLLELLNPSEVFGDIMIDYTYVECTSAVMQALKYFHKRFPEHRAAEIRETLTQGLEFCRRQQRADGSWEGSWGVCFTYGTWFGLEAFACMGQTYRDGTACAEVSRACDFLLSRQMADGGWGEDFESCEERRYLQSAQSQIHNTCWAMMGLMAVRHPDIEAQERGVRCLLEKQLPNGDWPQENIAGVFNKSCAISYTSYRNIFPIWALGRFSQLYPERALAGHP

SEQ ID NO: 16813 - protein, 721 aa, Homo sapiens
MTEGTCLRRRGGPYKTEPATDLGRWRLNCERGRQTWTYLQDERAGREQTGLEAYALGLDTKNYFKDLPKAHTAFEGALNGMTFYVGLQAEDGHWTGDYGGPLFLLPGLLITCHVARIPLPAGYREEIVRYLRHIEDKSTVFGTALNYVSLRILGVGPDDPDLVRARNILHKKGGAVAIPSWGKFWLAVLNVYSWEGLNTLFPEMWLFPDWAPAHPSTLWCHCRQVYLPMSYCYAVRLSAAEDPLVQSLRQELYVEDFASIDWLAQRNNVAPDELYTPHSWLLRVVYALLNLYEHHHSAHLRQRAVQKLYEHIVADDRFTKSISIGPISKTINMLVRWYVDGPASTAFQEHVSRIPDYLWMGLDGMKMQGTNGSQIWDTAFAIQALLEAGGHHRPEFSSCLQKAHEFLRLSQVPDNPPDYQKYYRQMRKGGFSFSTLDCGWIVSDCTAEALKAVLLLQEKCPHVTEHIPRERLCDAVAVLLNMRNPDGGFATYETKRGGHLLELLNPSEVFGDIMIDYTYVECTSAVMQALKYFHKRFPEHRAAEIRETLTQGLEFCRRQQRADGSWEGSWGVCFTYGTWFGLEAFACMGQTYRDGTACAEVSRACDFLLSRQMADGGWGEDFESCEERRYLQSAQSQIHNTCWAMMGLMAVRHPDIEAQERGVRCLLEKQLPNGDWPQENIAGVFNKSCAISYTSYRNIFPIWALGRFSQLYPERALAGHP

SEQ ID NO: 16814 - protein, 205 aa, Homo sapiens
MNKVFPQGENGYTAAESKAHPGGEAGGGHLCCSRRGACLSASLLLLLATVAALIALVTILGLPSCTPGAQACITLTNRTGFLCHDQRSCIPASGVCDGVRTCTHGEDEDESLCRDVPQSLPHFLVAHCGDPASWIYSDQKCDGTNNCGDCSDELSPVTVCPPCGPGWWRCPSTFFKYCDCIPRHLCRDHVQHCSDWSDEYACPGP

SEQ ID NO: 16815 - protein, 166 aa, Homo sapiens
MQGTRAELSAHSPSRAAGNRRHEQGLPPGAQACITLTNRTGFLCHDQRSCIPASGVCDGVRTCTHGEDEDESLCRDVPQSLPHFLVAHCGDPASWIYSDQKCDGTNNCGDCSDELSPVTVCPPCGPGWWRCPSTFFKYCDCIPRHLCRDHVQHCSDWSDEYACPGP

SEQ ID NO: 16816 - protein, 116 aa, Homo sapiens
MNKVFPQGENGYTAAESKAHPGGEGDVPQSLPHFLVAHCGDPASWIYSDQKCDGTNNCGDCSDELSPVTVCPPCGPGWWRCPSTFFKYCDCIPRHLCRDHVQHCSDWSDEYACPGP

SEQ ID NO: 16817 - protein, 162 aa, Homo sapiens
MNKVFPQGENGYTAAESKAHPGGEGAQACITLTNRTGFLCHDQRSCIPASGVCDGVRTCTHGEDEDESLCRDVPQSLPHFLVAHCGDPASWIYSDQKCDGTNNCGDCSDELSPVTVCPPCGPGWWRCPSTFFKYCDCIPRHLCRDHVQHCSDWSDEYACPGP

SEQ ID NO: 16818 - protein, 272 aa, Homo sapiens
MEACCLLQLPQRLLLLGAAALTATALETADLAELCGQTWQGDGLLLRSHAASRRFYFVAPDTDCGLWVQAAAPGDRIRFQFRFFLVYSLTPAPPALNTSSPAPADPCAPGSYLQFYEGPPGAPRPLGSPLCGLNIPVPVASSGPFLGLRLVTRGRQPRVDFVGEVTSFRLGPCGAYFRCQNGRCIPSSLVCDPWGMDNCGDGSDQGSWSPADCRGPSPVPSQTGSTDAHTSRSLTPSPALGSAGSLWIAAERSSPAGRDPTRQDAALEGSTE

SEQ ID NO: 16819 - protein, 230 aa, Homo sapiens
MKNPMLEVVSLLLEKLLLISNFTLFSSGAAGEDKGRNSFYETSSFHRGDVLEVPRTHLTHYGIYLGDNRVAHMMPDILLALTDDMGRTQKVVSNKRLILGVIVKVASIRVDTVEDFAYGANILVNHLDESLQKKALLNEEVARRAEKLLGFTPYSLLWNNCEHFVTYCRYGTPISPQSDKFCETVKIIIRDQRSVLASAVLGLASIVCTGLVSYTTLPAIFIPFFLWMAG

SEQ ID NO: 16820 - protein, 887 aa, Homo sapiens
MMNRFRKWLYKPKRSDPQLLARFYYADEELNQVAAELDSLDGRKDPQRCTLLVSQFRSCQDNVLNIINQIMDECIPQDRAPRDFCVKFPEEIRHDNLAGQLWFGAECLAAGSIIMNRELESMAMRPLAKELTRSLEDVRGALRDQALRDLNTYTEKMREALRHFDVLFAEFELSYVSAMVPVKSPREYYVQQEVIVLFCETVERALDFGYLTQDMIDDYEPALMFSIPRLAIVCGLVVYADGPLNLDRKVEDMSELFRPFHTLLRKIRDLLQTLTEEELHTLERNLCISQDVEFPIRADVQGPAALAPALSAPLPPEGPLSAKAKDPDAELACSMQYDDQELEQLSRMVHRAGDEMSSLLSPPIACQSPAHRPGAEGSPGGEASPGRPRLRSGSDEEERVFFMDDVEGTAEALARPESPAGPFGWAGSTWADPQEKGQGGPGGAAGISLPASEKEEDLSNNNLEAEGTDGASLAGTSSCSCLDSRLHLDGWEVGADDAETAEMIAHRTGGMKLSATVIFNPKSPTSLDSAVATQEAASEPVAEGMDGGPHKLSTGATNCLLHSCVCCGSCGDSREDVVERLREKCSPGGVIGASYAAGLAKASDRAPERQEEAPPPSEDASNGREPKAPTSDKCLPHTSGSQVDTASGLQGEAGVAGQQEPEARELHAGSPSAHEAPQALSGSSSSTAGSCSSDKMGPEAAPAATHAAPQATREKIRSRFHGSHDLIHRLFVCISGVADQLQTNYASDLRSILKTLFEVMATKPETDDKEKLRKVTQTLRSAALEDCALCQETLSSSELAAKTRDGDFEDPPEWVPDEACGFCTACKAPFTVIRRKHHCRSCGKIFCSRCSSHSAPLPRYGQVKPVRVCTHCYMFHVTPFYSDKAGL

SEQ ID NO: 16821 - protein, 857 aa, Homo sapiens
MMNRFRKWLYKPKRSDPQLLARFYYADEELNQVAAELDSLDGRKDPQRCTLLVSQFRSCQDNVLNIINQIMDECIPQDRAPRDFCVKFPEEIRHDNLAGQLWFGAECLAAGSIIMNRELESMAMRPLAKELTRSLEDVRGALRDQALRDLNTYTEKMREALRHFDVLFAEFELSYVSAMVPVKSPREYYVQQEVIVLFCETVESGLVVYADGPLNLDRKVEDMSELFRPFHTLLRKIRDLLQTLTEEELHTLERNLCISQDVEFPIRADVQGPAALAPALSAPLPPEGPLSAKAKDPDAELACSMQYDDQELEQLSRMVHRAGDEMSSLLSPPIACQSPAHRPGAEGSPGGEASPGRPRLRSGSDEEERVFFMDDVEGTAEALARPESPAGPFGWAGSTWADPQEKGQGGPGGAAGISLPASEKEEDLSNNNLEAEGTDGASLAGTSSCSCLDSRLHLDGWEVGADDAETAEMIAHRTGGMKLSATVIFNPKSPTSLDSAVATQEAASEPVAEGMDGGPHKLSTGATNCLLHSCVCCGSCGDSREDVVERLREKCSPGGVIGASYAAGLAKASDRAPERQEEAPPPSEDASNGREPKAPTSDKCLPHTSGSQVDTASGLQGEAGVAGQQEPEARELHAGSPSAHEAPQALSGSSSSTAGSCSSDKMGPEAAPAATHAAPQATREKIRSRFHGSHDLIHRLFVCISGVADQLQTNYASDLRSILKTLFEVMATKPETDDKEKLRKVTQTLRSAALEDCALCQETLSSSELAAKTRDGDFEDPPEWVPDEACGFCTACKAPFTVIRRKHHCRSCGKIFCSRCSSHSAPLPRYGQVKPVRVCTHCYMFHVTPFYSDKAGL

SEQ ID NO: 16822 - protein, 817 aa, Homo sapiens
MDECIPQDRAPRDFCVKFPEEIRHDNLAGQLWFGAECLAAGSIIMNRELESMAMRPLAKELTRSLEDVRGALRDQALRDLNTYTEKMREALRHFDVLFAEFELSYVSAMVPVKSPREYYVQQEVIVLFCETVERALDFGYLTQDMIDDYEPALMFSIPRLAIVCGLVVYADGPLNLDRKVEDMSELFRPFHTLLRKIRDLLQTLTEEELHTLERNLCISQDVEFPIRADVQGPAALAPALSAPLPPEGPLSAKAKDPDAELACSMQYDDQELEQLSRMVHRAGDEMSSLLSPPIACQSPAHRPGAEGSPGGEASPGRPRLRSGSDEEERVFFMDDVEGTAEALARPESPAGPFGWAGSTWADPQEKGQGGPGGAAGISLPASEKEEDLSNNNLEAEGTDGASLAGTSSCSCLDSRLHLDGWEVGADDAETAEMIAHRTGGMKLSATVIFNPKSPTSLDSAVATQEAASEPVAEGMDGGPHKLSTGATNCLLHSCVCCGSCGDSREDVVERLREKCSPGGVIGASYAAGLAKASDRAPERQEEAPPPSEDASNGREPKAPTSDKCLPHTSGSQVDTASGLQGEAGVAGQQEPEARELHAGSPSAHEAPQALSGSSSSTAGSCSSDKMGPEAAPAATHAAPQATREKIRSRFHGSHDLIHRLFVCISGVADQLQTNYASDLRSILKTLFEVMATKPETDDKEKLRKVTQTLRSAALEDCALCQETLSSSELAAKTRDGDFEDPPEWVPDEACGFCTACKAPFTVIRRKHHCRSCGKIFCSRCSSHSAPLPRYGQVKPVRVCTHCYMFHVTPFYSDKAGL

SEQ ID NO: 16823 - protein, 787 aa, Homo sapiens
MDECIPQDRAPRDFCVKFPEEIRHDNLAGQLWFGAECLAAGSIIMNRELESMAMRPLAKELTRSLEDVRGALRDQALRDLNTYTEKMREALRHFDVLFAEFELSYVSAMVPVKSPREYYVQQEVIVLFCETVESGLVVYADGPLNLDRKVEDMSELFRPFHTLLRKIRDLLQTLTEEELHTLERNLCISQDVEFPIRADVQGPAALAPALSAPLPPEGPLSAKAKDPDAELACSMQYDDQELEQLSRMVHRAGDEMSSLLSPPIACQSPAHRPGAEGSPGGEASPGRPRLRSGSDEEERVFFMDDVEGTAEALARPESPAGPFGWAGSTWADPQEKGQGGPGGAAGISLPASEKEEDLSNNNLEAEGTDGASLAGTSSCSCLDSRLHLDGWEVGADDAETAEMIAHRTGGMKLSATVIFNPKSPTSLDSAVATQEAASEPVAEGMDGGPHKLSTGATNCLLHSCVCCGSCGDSREDVVERLREKCSPGGVIGASYAAGLAKASDRAPERQEEAPPPSEDASNGREPKAPTSDKCLPHTSGSQVDTASGLQGEAGVAGQQEPEARELHAGSPSAHEAPQALSGSSSSTAGSCSSDKMGPEAAPAATHAAPQATREKIRSRFHGSHDLIHRLFVCISGVADQLQTNYASDLRSILKTLFEVMATKPETDDKEKLRKVTQTLRSAALEDCALCQETLSSSELAAKTRDGDFEDPPEWVPDEACGFCTACKAPFTVIRRKHHCRSCGKIFCSRCSSHSAPLPRYGQVKPVRVCTHCYMFHVTPFYSDKAGL

SEQ ID NO: 16824 - protein, 773 aa, Homo sapiens
MNRELESMAMRPLAKELTRSLEDVRGALRDQALRDLNTYTEKMREALRHFDVLFAEFELSYVSAMVPVKSPREYYVQQEVIVLFCETVERALDFGYLTQDMIDDYEPALMFSIPRLAIVCGLVVYADGPLNLDRKVEDMSELFRPFHTLLRKIRDLLQTLTEEELHTLERNLCISQDVEFPIRADVQGPAALAPALSAPLPPEGPLSAKAKDPDAELACSMQYDDQELEQLSRMVHRAGDEMSSLLSPPIACQSPAHRPGAEGSPGGEASPGRPRLRSGSDEEERVFFMDDVEGTAEALARPESPAGPFGWAGSTWADPQEKGQGGPGGAAGISLPASEKEEDLSNNNLEAEGTDGASLAGTSSCSCLDSRLHLDGWEVGADDAETAEMIAHRTGGMKLSATVIFNPKSPTSLDSAVATQEAASEPVAEGMDGGPHKLSTGATNCLLHSCVCCGSCGDSREDVVERLREKCSPGGVIGASYAAGLAKASDRAPERQEEAPPPSEDASNGREPKAPTSDKCLPHTSGSQVDTASGLQGEAGVAGQQEPEARELHAGSPSAHEAPQALSGSSSSTAGSCSSDKMGPEAAPAATHAAPQATREKIRSRFHGSHDLIHRLFVCISGVADQLQTNYASDLRSILKTLFEVMATKPETDDKEKLRKVTQTLRSAALEDCALCQETLSSSELAAKTRDGDFEDPPEWVPDEACGFCTACKAPFTVIRRKHHCRSCGKIFCSRCSSHSAPLPRYGQVKPVRVCTHCYMFHVTPFYSDKAGL

SEQ ID NO: 16825 - protein, 287 aa, Homo sapiens
MMNRFRKWLYKPKRSDPQLLARFYYADEELNQVAAELDSLDGRKDPQRCTLLVSQFRSCQDNVLNIINQIMDECIPQDRAPRDFCVKFPEEIRHDNLAGQLWFGAECLAAGSIIMNRELESMAMRPLAKELTRSLEDVRGALRDQALRDLNTYTEKMREALRHFDVLFAEFELSYVSAMVPVKSPREYYVQQEVIVLFCETVERALDFGYLTQDMIDDYEPALMFSIPRLAIVCPLLPAHPRTRAGATAHVACRMVAGSSSGALTHPPVSKQGVISALLRPLPELPP

SEQ ID NO: 16826 - protein, 172 aa, Homo sapiens
MMNRFRKWLYKPKDNVLNIINQIMDECIPQDRAPRDFCVKFPEEIRHDNLAGQLWFGAECLAAGSIIMNRELESMAMRPLAKELTRSLEDVRGALRDQALRDLNTYTEKMREALRHFDVLFAEFELSYVSAMVPVKSPREYYVQQEVIVLFCETVERNGKGVLKFMWNCNGP

SEQ ID NO: 16827 - protein, 163 aa, Homo sapiens
MDECIPQDRAPRDFCVKFPEEIRHDNLAGQLWFGAECLAAGSIIMNRELESMAMRPLAKELTRSLEDVRGALRDQALRDLNTYTEKMREALRHFDVLFAEFELSYVSAMVPVKSPREYYVQQEVIVLFCETVERALDFGYLTQDMIDDYEPALMFSIPRLAIV

SEQ ID NO: 16828 - protein, 132 aa, Homo sapiens
MEHKEVVLLLLLFLKSAPTETGPSVQECYHSNGQSYRGTYFTTVTGRTCQAWSSMTPHQHSRTPEKYPNDGLISNYCRNPDCSAGPWCYTTDPNVRWEYCNLTRCSDDEGTVFVPLTVIPVPSLEDSFIQVA

SEQ ID NO: 16829 - protein, 277 aa, Homo sapiens
MGNTIRALVAFIPADRCQNYVVRDLREMPLDKMVDLSGSQLRRFPLHVCSFRELVKLYLSDNHLNSLPPELGQLQNLQILALDFNNFKALPQVVCTLKQLCILYLGNNKLCDLPSELSLLQNLRTLWIEANCLTQLPDVVCELSLLKTLHAGSNALRLLPGQLRRLQELRTIWLSGNRLTDFPTVLLHMPFLEVIDVDWNSIRYFPSLAHLSSLKLVIYDHNPCRNAPKVAKGVRRVGRWAEETPEPDPRKARRYALVREESQELQAPVPLLPPTNS

SEQ ID NO: 16830 - protein, 493 aa, Homo sapiens
MHTLVFLSTRQVLQCQPAACQALPLLPRELFPLLFKVAFMDKKTVVLRELVHTWPFPLLSFQQLLQECAHCSRALLQERPSTESMQAVILGLTARLHTSEPGASTQPLCRKHALRVLDMTGLLDDGVEQDPGTMSMWDCTAAVARTCIAQQQGGAAEPGPAPIPVEVRVDLRVNRASYAFLREALRSSVGSPLRLCCRDLRAEDLPMRNTVALLQLLDAGCLRRVDLRFNNLGLRGLSVIIPHVARFQHLASLRLHYVHGDSRQPSVDGEDNFRYFLAQMGRFTCLRELSMGSSLLSGRLDQLLSTLQSPLESLELAFCALLPEDLRFLARSPHAAHLKKLDLSGNDLSGSQLAPFQGLLQASAATLLHLELTECQLADTQLLATLPILTQCASLRYLGLYGNPLSMAGLKELLRDSVAQAELRTVVHPFPVDCYEGLPWPPPASVLLEASINEEKFARVEAELHQLLLASGRAHVLWTTDIYGRLAADYFSL

SEQ ID NO: 16831 - protein, 351 aa, Homo sapiens
MVIMGQCYYNETIGFFYNNSGKELSSHWRPKDVVVVALGLTVSVLVLLTNLLVIAAIASNRRFHQPIYYLLGNLAAADLFAGVAYLFLMFHTGPRTARLSLEGWFLRQGLLDTSLTASVATLLAIAVERHRSVMAVQLHSRLPRGRVVMLIVGVWVAALGLGLLPAHSWHCLCALDRCSRMAPLLSRSYLAVWALSSLLVFLLMVAVYTRIFFYVRRRVQRMAEHVSCHPRYRETTLSLVKTVVIILGAFVVCWTPGQVVLLLDGLGCESCNVLAVEKYFLLLAEANSLVNAAVYSCRDAEMRRTFRRLLCCACLRQSTRESVHYTSSAQGGASTRIMLPENGHPLMDSTL

SEQ ID NO: 16832 - protein, 399 aa, Homo sapiens
MWQLLAAACWMLLLGSMYGYDKKGNNANPEANMNISQIISYWGYPYEEYDVTTKDGYILGIYRIPHGRGCPGRTAPKPAVYLQHGLIASASNWICNLPNNSLAFLLADSGYDVWLGNSRGNTWSRKHLKLSPKSPEYWAFSLDEMAKYDLPATINFIIEKTGQKRLYYVGHSQGTTIAFIAFSTNPELAKKIKIFFALAPVVTVKYTQSPMKKLTTLSRRVVKVLFGDKMFHPHTLFDQFIATKVCNRKLFRRICSNFLFTLSGFDPQNLNMSRLDVYLSHNPAGTSVQNMLHWAQAVNSGQLQAFDWGNSDQNMMHFHQLTPPLYNITKMEVPTAIWNGGQDIVADPKDVENLLPQIANLIYYKLIPHYNHVDFYLGEDAPQEIYQDLIILMEEYLQN

SEQ ID NO: 16833 - protein, 1292 aa, Homo sapiens
MDASYDGTEVTVVMEEIEEAYCYTSPGPPKKKKKYKIHGEKTKKPRSAYLLYYYDIYLKVQQELPHLPQSEINKKISESWRLLSVAERSYYLEKAKLEKEGLDPNSKLSALTAVVPDIPGFRKILPRSDYIIIPKSSLQEDRSCPQLELCVAQNQMSPKGPPLVSNTAPETVPSHAGMAEQCLAVEALAEEVGALTQSGAVQEIATSEILSQDVLLEDASLEVGESHQPYQTSLVIEETLVNGSPDLPTGSLAVPHPQVGESVSVVTVMRDSSESSSSAPATQFIMLPLPAYSVVENPTSIKLTTTYTRRGHGTCTSPGCSFTYVTRHKPPKCPTCGNFLGGKWIPKEKPAKVKVELASGVSSKGSVVKRNQQPVTTEQNSSKENASKLTLENSEAVSQLLNVAPPREVGEESEWEEVIISDAHVLVKEAPGNCGTAVTKTPVVKSGVQPEVTLGTTDNDSPGADVPTPSEGTSTSSPLPAPKKPTGADLLTPGSRAPELKGRARGKPSLLAAARPMRAILPAPVNVGRGSSMGLPRARQAFSLSDKTPSVRTCGLKPSTLKQLGQPIQQPSGPGEVKLPSGPSNRTSQVKVVEVKPDMFPPYKYSCTVTLDLGLATSRGRGKCKNPSCSYVYTNRHKPRICPSCGVNLAKDRTEKTTKAIEVSSPLPDVLNATEPLSTAQREIQRQSTLQLLRKVLQIPENESELAEVFALIHELNSSRLILSNVSEETVTIEQTSWSNYYESPSTQCLLCSSPLFKGGQNSLAGPQECWLLTASRLQTVTAQVKMCLNPHCLALHSFIDIYTGLFNVGNKLLVSLDLLFAIRNQIKLGEDPRVSINVVLKSVQEQTEKTLTSEELSQLQELLCNGYWAFECLTVRDYNDMICGICGVAPKVEMAQRSEENVLALKSVEFTWPEFLGSNEVNVEDFWATMETEVIEQVAFPASIPITKFDASVIAPFFPPLMRGAVVVNTEKDKNLDVQPVPGSGSALVRLLQEGTCKLDEIGSYSEEKLQHLLRQCGIPFGAEDSKDQLCFSLLALYESVQNGARAIRPPRHFTGGKIYKVCPHQVVCGSKYLVRGESARDHVDLLASSRHWPPVYVVDMATSVALCADLCYPELTNQMWGRNQGCFSSPTEPPVSVSCPELLDQHYTVDMTETEHSIQHPVTKTATRRIVHAGLQPNPGDPSAGHHSLALCPELAPYATILASIVDSKPNGVRQRPIAFDNATHYYLYNRLMDFLTSREIVNRQIHDIVQSCQPGEVVIRDTLYRLGVAQIKTETEEEGEEEEVAAVAE

SEQ ID NO: 16834 - protein, 724 aa, Homo sapiens
MSFPKAPLKRFNDPSGCAPSPGAYDVKTLEVLKGPVSFQKSQRFKQQKESKQNLNVDKDTTLPASARKVKSSESKESQKNDKDLKILEKEIRVLLQERGAQDRRIQDLETELEKMEARLNAALREKTSLSANNATLEKQLIELTRTNELLKSKFSENGNQKNLRILSLELMKLRNKRETKMRGMMAKQEGMEMKLQVTQRSLEESQGKIAQLEGKLVSIEKEKIDEKSETEKLLEYIEEISCASDQVEKYKLDIAQLEENLKEKNDEILSLKQSLEENIVILSKQVEDLNVKCQLLEKEKEDHVNRNREHNENLNAEMQNLKQKFILEQQEREKLQQKELQIDSLLQQEKELSSSLHQKLCSFQEEMVKEKNLFEEELKQTLDELDKLQQKEEQAERLVKQLEEEAKSRAEELKLLEEKLKGKEAELEKSSAAHTQATLLLQEKYDSMVQSLEDVTAQFESYKALTASEIEDLKLENSSLQEKAAKAGKNAEDVQHQILATESSNQEYVRMLLDLQTKSALKETEIKEITVSFLQKITDLQNQLKQQEEDFRKQLEDEEGRKAEKENTTAELTEEINKWRLLYEELYNKTKPFQLQLDAFEVEKQALLNEHGAAQEQLNKIRDSYAKLLGHQNLKQKIKHVVKLKDENSQLKSEVSKLRCQLAKKKQSETKLQEELNKVLGIKHFDPSKAFHHESKENFALKTPLKEGNTNCYRAPMECQESWK

SEQ ID NO: 16835 - protein, 709 aa, Homo sapiens
MSFPKAPLKRFNDPSGCAPSPGAYDVKTLEVLKGPVSFQKSQRFKQQKESKQNLNVDKDTTLPASARKVKSSESKIRVLLQERGAQDRRIQDLETELEKMEARLNAALREKTSLSANNATLEKQLIELTRTNELLKSKFSENGNQKNLRILSLELMKLRNKRETKMRGMMAKQEGMEMKLQVTQRSLEESQGKIAQLEGKLVSIEKEKIDEKSETEKLLEYIEEISCASDQVEKYKLDIAQLEENLKEKNDEILSLKQSLEENIVILSKQVEDLNVKCQLLEKEKEDHVNRNREHNENLNAEMQNLKQKFILEQQEREKLQQKELQIDSLLQQEKELSSSLHQKLCSFQEEMVKEKNLFEEELKQTLDELDKLQQKEEQAERLVKQLEEEAKSRAEELKLLEEKLKGKEAELEKSSAAHTQATLLLQEKYDSMVQSLEDVTAQFESYKALTASEIEDLKLENSSLQEKAAKAGKNAEDVQHQILATESSNQEYVRMLLDLQTKSALKETEIKEITVSFLQKITDLQNQLKQQEEDFRKQLEDEEGRKAEKENTTAELTEEINKWRLLYEELYNKTKPFQLQLDAFEVEKQALLNEHGAAQEQLNKIRDSYAKLLGHQNLKQKIKHVVKLKDENSQLKSEVSKLRCQLAKKKQSETKLQEELNKVLGIKHFDPSKAFHHESKENFALKTPLKEGNTNCYRAPMECQESWK

SEQ ID NO: 16836 - protein, 725 aa, Homo sapiens
MSFPKAPLKRFNDPSGCAPSPGAYDVKTLEVLKGPVSFQKSQRFKQQKESKQNLNVDKDTTLPASARKVKSSESKKESQKNDKDLKILEKEIRVLLQERGAQDRRIQDLETELEKMEARLNAALREKTSLSANNATLEKQLIELTRTNELLKSKFSENGNQKNLRILSLELMKLRNKRETKMRGMMAKQEGMEMKLQVTQRSLEESQGKIAQLEGKLVSIEKEKIDEKSETEKLLEYIEEISCASDQVEKYKLDIAQLEENLKEKNDEILSLKQSLEENIVILSKQVEDLNVKCQLLEKEKEDHVNRNREHNENLNAEMQNLKQKFILEQQEREKLQQKELQIDSLLQQEKELSSSLHQKLCSFQEEMVKEKNLFEEELKQTLDELDKLQQKEEQAERLVKQLEEEAKSRAEELKLLEEKLKGKEAELEKSSAAHTQATLLLQEKYDSMVQSLEDVTAQFESYKALTASEIEDLKLENSSLQEKAAKAGKNAEDVQHQILATESSNQEYVRMLLDLQTKSALKETEIKEITVSFLQKITDLQNQLKQQEEDFRKQLEDEEGRKAEKENTTAELTEEINKWRLLYEELYNKTKPFQLQLDAFEVEKQALLNEHGAAQEQLNKIRDSYAKLLGHQNLKQKIKHVVKLKDENSQLKSEVSKLRCQLAKKKQSETKLQEELNKVLGIKHFDPSKAFHHESKENFALKTPLKEGNTNCYRAPMECQESWK

SEQ ID NO: 16837 - protein, 638 aa, Homo sapiens
MTLLIRVLLQERGAQDRRIQDLETELEKMEARLNAALREKTSLSANNATLEKQLIELTRTNELLKSKFSENGNQKNLRILSLELMKLRNKRETKMRGMMAKQEGMEMKLQVTQRSLEESQGKIAQLEGKLVSIEKEKIDEKSETEKLLEYIEEISCASDQVEKYKLDIAQLEENLKEKNDEILSLKQSLEENIVILSKQVEDLNVKCQLLEKEKEDHVNRNREHNENLNAEMQNLKQKFILEQQEREKLQQKELQIDSLLQQEKELSSSLHQKLCSFQEEMVKEKNLFEEELKQTLDELDKLQQKEEQAERLVKQLEEEAKSRAEELKLLEEKLKGKEAELEKSSAAHTQATLLLQEKYDSMVQSLEDVTAQFESYKALTASEIEDLKLENSSLQEKAAKAGKNAEDVQHQILATESSNQEYVRMLLDLQTKSALKETEIKEITVSFLQKITDLQNQLKQQEEDFRKQLEDEEGRKAEKENTTAELTEEINKWRLLYEELYNKTKPFQLQLDAFEVEKQALLNEHGAAQEQLNKIRDSYAKLLGHQNLKQKIKHVVKLKDENSQLKSEVSKLRCQLAKKKQSETKLQEELNKVLGIKHFDPSKAFHHESKENFALKTPLKEGNTNCYRAPMECQESWK

SEQ ID NO: 16838 - protein, 520 aa, Homo sapiens
MPGSLPLNAEACWPKDVGIVALEIYFPSQYVDQAELEKYDGVDAGKYTIGLGQAKMGFCTDREDINSLCMTVVQNLMERNNLSYDCIGRLEVGTETIIDKSKSVKTNLMQLFEESGNTDIEGIDTTNACYGGTAAVFNAVNWIESSSWDGRYALVVAGDIAVYATGNARPTGGVGAVALLIGPNAPLIFERGLRGTHMQHAYDFYKPDMLSEYPIVDGKLSIQCYLSALDRCYSVYCKKIHAQWQKEGNDKDFTLNDFGFMIFHSPYCKLVQKSLARMLLNDFLNDQNRDKNSIYSGLEAFGDVKLEDTYFDRDVEKAFMKASSELFSQKTKASLLVSNQNGNMYTSSVYGSLASVLAQYSPQQLAGKRIGVFSYGSGLAATLYSLKVTQDATPGSALDKITASLCDLKSRLDSRTGVAPDVFAENMKLREDTHHLVNYIPQGSIDSLFEGTWYLVRVDEKHRRTYARRPTPNDDTLDEGVGLVHSNIATEHIPSPAKKVPRLPATAAEPEAAVISNGEH

SEQ ID NO: 16839 - protein, 24 aa, Homo sapiens
MAPRGFSCLLLSTSEIDLPVKRRT

SEQ ID NO: 16840 - protein, 5059 aa, Homo sapiens
MPGAPLLRLLTAVSAAVAVAVAGAPGTVMPPTTGDATLAFVFDVTGSMWDELMQVIDGASRILERSLSRRSQAIANYALVPFHDPDIGPVTLTADPTVFQRELRELYVQGGGDCPEMSVGAIKAAVEVANPGSFIYVFSDARAKDYHKKEELLRLLQLKQSQVVFVLTGDCGDRTHPGYLAYEEIAATSSGQVFHLDKQQVTEVLKWVESAIQASKVHLLSTDHEEEGEHTWRLPFDPSLKEVTISLSGPGPEIEVQDPLGRILQEDEGLNVLLNIPDSAKVVAFKPEHPGLWSIKVYSSGRHSVRITGVSNIDFRAGFSTQPLLDLNHTLEWPLQGVPISLVINSTGLKAPGRLDSVELAQSSGKPLLTLPTKPLSNGSTHQLWGGPPFHTPKERFYLKVKGKDHEGNPLLRVSGVSYSGVAPGAPLVSMAPRIHGYLHQPLLVSCSVHSALPFRLQLRRGEARLGEERHFQESGNSSWEILRASKAEEGTYECTAVSRAGTGRAKAQIVVTDPPPQLVPAPNVTVSPGETAVLSCRVLGEAPYNLTWVRDWRVLPASTGRVAQLADLSLEISGIIPTDGGRYQCVASNANGVTRASVWLLVREAPQVSIHTSSQHFSQGVEVKVSCSASGYPTPHISWSRESQALQEDSRIHVDAQGTLIIQGVAPEDAGNYSCQATNEVGTDQETVTLYYTDPPSVSAVNAVVLVAVGEEAVLVCEASGVPPPRVIWYRGGLEMILAPEGSSSGKLRIPAAQERDAGTYTCRAVNELGDASAEIQLAVGHAPQLTELPRDVTVELGRSALLACRATGRPPPTVTWRRGDGQPLGLRLGAGRGSRSRQPDSGVLFFESVAPEDQAPYVCEARNVFGKVQAEARLIVTGHAPPQIASSAPTVRVLEGQPVSLPCIVLAGRPLPERHWLKDGRPLPPGSRHSIRADGSLHLDRALQEHAGRYSCVATNTAGSQHRDVELVVQVPPRIHPTATHHITNEGVAASLPCVASGVPAPTITWTKETNALTSRGPHYNVSKEGTLLIAQPSAQDAGAYVCTATNTVGFSSQEMRLSVNTKPRIHMNGSRNADVPLQVTAKAGEEVTLDCEAKGSPPPLVTWTKDSRPVPPITNRYGLLPSGSLRLAQVQVGDSGHYECTASNPAGSASHRYVLGVQVPPQVQPGPRVLKVLVGEALDLNCVAEGNPEPQLSWSKDGVVLQGRGPQGSVHFAAIRTSDAGRYRCEASNSAGVDAWEVELRVLEPPHWGADETSGLLERVAGENASLPCPARGTPKPQVTWRKGPSSEPLHGQPGVAVLEEGSLFLASVSPADSGDYECQATNEVGSTSRRAKLVVYVPPSIREDGRKANVSGMAGQSLTLECDANGFPVPEIVWLKDAQLIPKVGGHRLLDEGQSLHFPRIQEGDSGLYSCRAENQAGTAQRDFHLLVLTPPSVLGAGAAQEVLGLAGADVELQCWTSGVPTPQVEWTKDRQPVLPGGPHLQVQEDGQVLRITGSHVGDEGRYQCVAFSPAGQQARDFQLRVHAPPTIWGSNETGEVAVMEDHLVQLLCEARGVPTPNITWFKDGALLPTSTKVVYTRGGRQLQLGRAQSSDAGVYTCKASNAVGAAEKATRLDVYVPPTIEGAGGRPYVVKAVAGRPVALECVARGHPSPTLSWHHEGLPVAESNESRLETDGSVLRLESPGEASSGLYSCVASSPAGEAVLQYSVEVQVPPQLLVAEGLGQVTTIVGQPLELPCQASGSPVPTIQWLQNGRPAEELAGVQVASQGTTLHIDHVELDHSGLFACQATNEAGTAGAEVEVSVHEFPSVSIIGGENITAPFLQPVTLQCIGDGVPTPSLRWWKDGVALAAFGGNLQIEKVDLRDEGIYTCAATNLAGESKREVALKVLVPPNIEPGPVNKAVLENASVTLECLASGVPPPDVSWFKGHQPVSSWMGVTVSVDGRVLRIEQAQLSDAGSYRCVASNVAGSTELRYGLRVNVPPRITLPPSLPGPVLVNTPVRLTCNATGAPSPTLMWLKDGNPVSPAGTPGLQVFPGGRVLTLASARASDSGRYSCVAVSAVGEDRQDVVLQVHMPPSILGEELNVSVVANESVALECQSHAMPPPVLSWWKDGRPLEPRPGVHLSADKALLQVDRADVWDAGHYTCEALNQAGHSEKHYNLNVWVAPVFPLRESHTLTVREGHPTRLSCECRGVPFPKISWRKDGQPLPGEGAGLQHVSAVGRLLYLGQAQLAQEGTYTCECSNVVGNSSQDLQLEVHVPPQIAGPREPPTQVSVVQDGVATLECNATGKPPPTVTWERDGQPVGAELGLQLQNQGQSLHVERAQAAHTGRYSCVAENLAGRAERKFELSVLVPPELIGDLDPLTNITAALHSPLTLLCEAMGIPPPAIRWFRGEEPVSPGEDTYLLAGGWMLKMTQTQEQDSGLYSCLASNEAGEARRNFSVEVLVPPSIENEDLEEVIKVLDGQTAHLMCNVTGHPQPKLTWFKDGRPLARGDAHHISPDGVLLQVLQANLSSAGHYSCIAANAVGEKTKHFQLSVLLAPTILGGAEDSADEEVTVTVNNPISLICEALAFPSPNITWMKDGAPFEASRNIQLLPGTHGLQILNAQKEDAGQYTCVVTNELGEAVKNYHVEVLIPPSISKDDPLAEVGVKEVKTKVNSTLTLECESWAVPPPTIRWYKDGQPVTPSSRLQVLGEGRLLQIQPTQVSDSGRYLCVATNVAGEDDQDFNVLIQVPPMFQKVGDFSAAFEILSREEEARGGVTEYREIVENNPAYLYCDTNAIPPPDLTWYREDQPLSAGDEVSVLQGGRVLQIPLVRAENAGRYSCKASNEVGEDWLHYELLVLTPPVILGDTEELVEEVTVNASSTVSLQCPALGNPVPTISWLQNGLPFSPSPRLQVLEDGQVLQVSTAEVADAASYMCVAENQAGSAEKLFTLRVQVPPRIAGLDLEQVTAILNSSVSLPCDVHAHPNPEVTWYKDSQALSLGEEVFLLPGTHTLQLGRARLSDSGMYTCEALNAAGRDQKLVQLSVLVPPAFRQAPRGPQDAVLVRVGDKAVLSCETDALPEPTVTWYKDGQPLVLAQRTQALRGGQRLEIQEAQVSDKGLYSCKVSNVAGEAVRTFTLTVQVPPTFENPKTETVSQVAGSPLVLTCDVSGVPAPTVTWLKDRMPVESSAVHGVVSRGGRLQLSRLQPAQAGTYTCVAENTQAEARKDFVVAVLVAPRIRSSGVAREHHVLEGQEVRLDCEADGQPPPDVAWLKDGSPLGQDMGPHLRFYLDGGSLVLKGLRASDAGAYTCVAHNPAGEDARLHTVNVLVPPTIKQGADGSGTLVSRPGELVTMVCPVRGSPPIHVSWLKDGLPLPLSQRTLLHGSGHTLRISKVQLADAGIFTCVAASPAGVADRNFTLQVQVPPVLEPVEFQNDVVVVRGSLVELPCEARGVPLPLVSWMKDGEPLLSQSLEQGPSLQLEAVGAGDSGTYSCVAVSEAGEARRHFQLTVMEPPHIEDSGQPTELSLTPGAPMELLCDAQGTPQPNITWHKDGQALTRLENNSRATRVLRVENVQVRDAGLYTCLAESPAGAIEKSFRVRVQAPPNIVGPRGPRFVVGLAPGQLVLECSVEAEPAPKITWHRDGIVLQEDAHTQFPERGRFLQLQALSTADSGDYSCTARNAAGSTSVAFRVEIHTVPTIRSGPPAVNVSVNQTALLPCQADGVPAPLVSWRKDRVPLDPRSPRFEILPEGSLRIQPVLAQDAGHYLCLASNSAGSDRQGRDLRVLALLPCEASGSPKPLVVWWKDGQKLDFRLQQGAYRLLPSNALLLTAPGPQDSAQFECVVSNEVGEAHRLYQVTVHVPPTIADDQTDFTVTMMAPVVLTCHSTGIPAPTVSWSKAGAQLGARGSGYRVSPSGALEIGQALPIHAGRYTCSARNSAGVAHKHVFLTVQASPVVKPLPSVVRAVAEEEVLLPCEASGIPRPTITWQKEGLNVATGVSTQVLPGGQLRIAHASPEDAGNYLCIAKNSAGSAMGKTRLVVQVPPVIENGLPDLSTTEGSHAFLPCKARGSPEPNITWDKDGQPVSGAEGKFTIQPSGELLVKNLEGQDAGTYTCTAENAVGRARRRVHLTILVLPVFTTLPGDRSLRLGDRLWLRCAARGSPTPRIGWTVNDRPVTEGVSEQDGGSTLQRAAVSREDSGTYVCWAENRVGRTQAVSFVHVKEAPVLQGEAFSYLVEPVGGSIQLDCVVRGDPVPDIHWIKDGLPLRGSHLRHQLQNGSLTIRRTERDDAGRYQCLAENEMGVAKKVVILVLQSAPVFQVEPQDMTVRSGDDVALRCQATGEPTPTIEWLQAGQPLRASRRLRTLPDGSLWLENVETGDAGTYDCVAHNLLGSATARAFLVVRGEPQGSWGSMTGVINGRKFGVATLNTSVMQEAHSGVSSIHSSIRHVPANVGPLMRVLVVTIAPIYWALARESGEALNGHSLTGGRFRQESHVEFATGELLTMTQVARGLDPDGLLLLDVVVNGVVPESLADADLQVQDFEEHYVQTGPGQLFVGSTQRFFQGGLPSFLRCNHSIQYNAARGPQPQLVQHLRASAISSAFDPEAEALRFQLATALQAEENEVGCPEGFELDSQGAFCVDRDECSGGPSPCSHACLNAPGRFSCTCPTGFALAWDDRNCRDVDECAWDAHLCREGQRCVNLLGSYRCLPDCGPGFRVADGAGCEDVDECLEGLDDCHYNQLCENTPGGHRCSCPRGYRMQGPSLPCLDVNECLQLPKACAYQCHNLQGSYRCLCPPGQTLLRDGKACTSLERNGQNVTTVSHRGPLLPWLRPWASIPGTSYHAWVSLRPGPMALSSVGRAWCPPGFIRQNGVCTDLDECRVRNLCQHACRNTEGSYQCLCPAGYRLLPSGKNCQDINECEEESIECGPGQMCFNTRGSYQCVDTPCPATYRQGPSPGTCFRRCSQDCGTGGPSTLQYRLLPLPLGVRAHHDVARLTAFSEVGVPANRTELSMLEPDPRSPFALRPLRAGLGAVYTRRALTRAGLYRLTVRAAAPRHQSVFVLLIAVSPYPY

SEQ ID NO: 16841 - protein, 4192 aa, Homo sapiens
MPGAPLLRLLTAVSAAVAVAVAGAPGTVMPPTTGDATLAFVFDVTGSMWDELMQVIDGASRILERSLSRRSQAIANYALVPFHDPDIGPVTLTADPTVFQRELRELYVQGGGDCPEMSVGAIKAAVEVANPGSFIYVFSDARAKDYHKKEELLRLLQLKQSQVVFVLTGDCGDRTHPGYLAYEEIAATSSGQVFHLDKQQVTEVLKWVESAIQASKVHLLSTDHEEEGEHTWRLPFDPSLKEVTISLSGPGPEIEVQDPLGRILQEDEGLNVLLNIPDSAKVVAFKPEHPGLWSIKVYSSGRHSVRITGVSNIDFRAGFSTQPLLDLNHTLEWPLQGVPISLVINSTGLKAPGRLDSVELAQSSGKPLLTLPTKPLSNGSTHQLWGGPPFHTPKERFYLKVKGKDHEGNPLLRVSGVSYSGVAPGAPLVSMAPRIHGYLHQPLLVSCSVHSALPFRLQLRRGEARLGEERHFQESGNSSWEILRASKAEEGTYECTAVSRAGTGRAKAQIVVTDPPPQLVPAPNVTVSPGETAVLSCRVLGEAPYNLTWVRDWRVLPASTGRVAQLADLSLEISGIIPTDGGRYQCVASNANGVTRASVWLLVREAPQVSIHTSSQHFSQGVEVKVSCSASGYPTPHISWSRESQALQEDSRIHVDAQGTLIIQGVAPEDAGNYSCQATNEVGTDQETVTLYYTDPPSVSAVNAVVLVAVGEEAVLVCEASGVPPPRVIWYRGGLEMILAPEGSSSGKLRIPAAQERDAGTYTCRAVNELGDASAEIQLAVGHAPQLTELPRDVTVELGRSALLACRATGRPPPTVTWRRGDGQPLGLRLGAGRGSRSRQPDSGVLFFESVAPEDQAPYVCEARNVFGKVQAEARLIVTGHAPPQIASSAPTVRVLEGQPVSLPCIVLAGRPLPERHWLKDGRPLPPGSRHSIRADGSLHLDRALQEHAGRYSCVATNTAGSQHRDVELVVQVPPRIHPTATHHITNEGVAASLPCVASGVPAPTITWTKETNALTSRGPHYNVSKEGTLLIAQPSAQDAGAYVCTATNTVGFSSQEMRLSVNTKPRIHMNGSRNADVPLQVTAKAGEEVTLDCEAKGSPPPLVTWTKDSRPVPPITNRYGLLPSGSLRLAQVQVGDSGHYECTASNPAGSASHRYVLGVQVPPQVQPGPRVLKVLVGEALDLNCVAEGNPEPQLSWSKDGVVLQGRGPQGSVHFAAIRTSDAGRYRCEASNSAGVDAWEVELRVLEPPHWGADETSGLLERVAGENASLPCPARGTPKPQVTWRKGPSSEPLHGQPGVAVLEEGSLFLASVSPADSGDYECQATNEVGSTSRRAKLVVYVPPSIREDGRKANVSGMAGQSLTLECDANGFPVPEIVWLKDAQLIPKVGGHRLLDEGQSLHFPRIQEGDSGLYSCRAENQAGTAQRDFHLLVLTPPSVLGAGAAQEVLGLAGADVELQCWTSGVPTPQVEWTKDRQPVLPGGPHLQVQEDGQVLRITGSHVGDEGRYQCVAFSPAGQQARDFQLRVHAPPTIWGSNETGEVAVMEDHLVQLLCEARGVPTPNITWFKDGALLPTSTKVVYTRGGRQLQLGRAQSSDAGVYTCKASNAVGAAEKATRLDVYVPPTIEGAGGRPYVVKAVAGRPVALECVARGHPSPTLSWHHEGLPVAESNESRLETDGSVLRLESPGEASSGLYSCVASSPAGEAVLQYSVEVQVPPQLLVAEGLGQVTTIVGQPLELPCQASGSPVPTIQWLQNGRPAEELAGVQVASQGTTLHIDHVELDHSGLFACQATNEAGTAGAEVEVSVHEFPSVSIIGGENITAPFLQPVTLQCIGDGVPTPSLRWWKDGVALAAFGGNLQIEKVDLRDEGIYTCAATNLAGESKREVALKVLVPPNIEPGPVNKAVLENASVTLECLASGVPPPDVSWFKGHQPVSSWMGVTVSVDGRVLRIEQAQLSDAGSYRCVASNVAGSTELRYGLRVNVPPRITLPPSLPGPVLVNTPVRLTCNATGAPSPTLMWLKDGNPVSPAGTPGLQVFPGGRVLTLASARASDSGRYSCVAVSAVGEDRQDVVLQVHMPPSILGEELNVSVVANESVALECQSHAMPPPVLSWWKDGRPLEPRPGVHLSADKALLQVDRADVWDAGHYTCEALNQAGHSEKHYNLNVWVAPVFPLRESHTLTVREGHPTRLSCECRGVPFPKISWRKDGQPLPGEGAGLQHVSAVGRLLYLGQAQLAQEGTYTCECSNVVGNSSQDLQLEVHVPPQIAGPREPPTQVSVVQDGVATLECNATGKPPPTVTWERDGQPVGAELGLQLQNQGQSLHVERAQAAHTGRYSCVAENLAGRAERKFELSVLVPPELIGDLDPLTNITAALHSPLTLLCEAMGIPPPAIRWFRGEEPVSPGEDTYLLAGGWMLKMTQTQEQDSGLYSCLASNEAGEARRNFSVEVLVPPSIENEDLEEVIKVLDGQTAHLMCNVTGHPQPKLTWFKDGRPLARGDAHHISPDGVLLQVLQANLSSAGHYSCIAANAVGEKTKHFQLSVLLAPTILGGAEDSADEEVTVTVNNPISLICEALAFPSPNITWMKDGAPFEASRNIQLLPGTHGLQILNAQKEDAGQYTCVVTNELGEAVKNYHVEVLIPPSISKDDPLAEVGVKEVKTKVNSTLTLECESWAVPPPTIRWYKDGQPVTPSSRLQVLGEGRLLQIQPTQVSDSGRYLCVATNVAGEDDQDFNVLIQVPPMFQKVGDFSAAFEILSREEEARGGVTEYREIVENNPAYLYCDTNAIPPPDLTWYREDQPLSAGDEVSVLQGGRVLQIPLVRAENAGRYSCKASNEVGEDWLHYELLVLTPPVILGDTEELVEEVTVNASSTVSLQCPALGNPVPTISWLQNGLPFSPSPRLQVLEDGQVLQVSTAEVADAASYMCVAENQAGSAEKLFTLRVQVPPRIAGLDLEQVTAILNSSVSLPCDVHAHPNPEVTWYKDSQALSLGEEVFLLPGTHTLQLGRARLSDSGMYTCEALNAAGRDQKLVQLSVLVPPAFRQAPRGPQDAVLVRVGDKAVLSCETDALPEPTVTWYKDGQPLVLAQRTQALRGGQRLEIQEAQVSDKGLYSCKVSNVAGEAVRTFTLTVQVPPTFENPKTETVSQVAGSPLVLTCDVSGVPAPTVTWLKDRMPVESSAVHGVVSRGGRLQLSRLQPAQAGTYTCVAENTQAEARKDFVVAVLVAPRIRSSGVAREHHVLEGQEVRLDCEADGQPPPDVAWLKDGSPLGQDMGPHLRFYLDGGSLVLKGLRASDAGAYTCVAHNPAGEDARLHTVNVLVPPTIKQGADGSGTLVSRPGELVTMVCPVRGSPPIHVSWLKDGLPLPLSQRTLLHGSGHTLRISKVQLADAGIFTCVAASPAGVADRNFTLQVQVPPVLEPVEFQNDVVVVRGSLVELPCEARGVPLPLVSWMKDGEPLLSQSLEQGPSLQLEAVGAGDSGTYSCVAVSEAGEARRHFQLTVMEPPHIEDSGQPTELSLTPGAPMELLCDAQGTPQPNITWHKDGQALTRLENNSRATRVLRVENVQVRDAGLYTCLAESPAGAIEKSFRVRVQAPPNIVGPRGPRFVVGLAPGQLVLECSVEAEPAPKITWHRDGIVLQEDAHTQFPERGRFLQLQALSTADSGDYSCTARNAAGSTSVAFRVEIHTVPTIRSGPPAVNVSVNQTALLPCQADGVPAPLVSWRKDRVPLDPRSPRFEILPEGSLRIQPVLAQDAGHYLCLASNSAGSDRQGRDLRVLALLPCEASGSPKPLVVWWKDGQKLDFRLQQGAYRLLPSNALLLTAPGPQDSAQFECVVSNEVGEAHRLYQVTVHVPPTIADDQTDFTVTMMAPVVLTCHSTGIPAPTVSWSKAGAQLGARGSGYRVSPSGALEIGQALPIHAGRYTCSARNSAGVAHKHVFLTVQASPVVKPLPSVVRAVAEEEVLLPCEASGIPRPTITWQKEGLNVATGVSTQVLPGGQLRIAHASPEDAGNYLCIAKNSAGSAMGKTRLVVQVPPVIENGLPDLSTTEGSHAFLPCKARGSPEPNITWDKDGQPVSGAEGKFTIQPSGELLVKNLEGQDAGTYTCTAENAVGRARRRVHLTILVLPVFTTLPGDRSLRLGDRLWLRCAARGSPTPRIGWTVNDRPVTGLGLLGMGGTESQDTGRLRREGRWGDPT

SEQ ID NO: 16842 - protein, 3446 aa, Homo sapiens
MPGAPLLRLLTAVSAAVAVAVAGAPGTVMPPTTGDATLAFVFDVTGSMWDELMQVIDGASRILERSLSRRSQAIANYALVPFHDPDIGPVTLTADPTVFQRELRELYVQGGGDCPEMSVGAIKAAVEVANPGSFIYVFSDARAKDYHKKEELLRLLQLKQSQVVFVLTGDCGDRTHPGYLAYEEIAATSSGQVFHLDKQQVTEVLKWVESAIQASKVHLLSTDHEEEGEHTWRLPFDPSLKEVTISLSGPGPEIEVQDPLGRILQEDEGLNVLLNIPDSAKVVAFKPEHPGLWSIKVYSSGRHSVRITGVSNIDFRAGFSTQPLLDLNHTLEWPLQGVPISLVINSTGLKAPGRLDSVELAQSSGKPLLTLPTKPLSNGSTHQLWGGPPFHTPKERFYLKVKGKDHEGNPLLRVSGVSYSGVAPGAPLVSMAPRIHGYLHQPLLVSCSVHSALPFRLQLRRGEARLGEERHFQESGNSSWEILRASKAEEGTYECTAVSRAGTGRAKAQIVVTDPPPQLVPAPNVTVSPGETAVLSCRVLGEAPYNLTWVRDWRVLPASTGRVAQLADLSLEISGIIPTDGGRYQCVASNANGVTRASVWLLVREAPQVSIHTSSQHFSQGVEVKVSCSASGYPTPHISWSRESQALQEDSRIHVDAQGTLIIQGVAPEDAGNYSCQATNEVGTDQETVTLYYTDPPSVSAVNAVVLVAVGEEAVLVCEASGVPPPRVIWYRGGLEMILAPEGSSSGKLRIPAAQERDAGTYTCRAVNELGDASAEIQLAVGHAPQLTELPRDVTVELGRSALLACRATGRPPPTVTWRRGDGQPLGLRLGAGRGSRSRQPDSGVLFFESVAPEDQAPYVCEARNVFGKVQAEARLIVTGHAPPQIASSAPTVRVLEGQPVSLPCIVLAGRPLPERHWLKDGRPLPPGSRHSIRADGSLHLDRALQEHAGRYSCVATNTAGSQHRDVELVVQVPPRIHPTATHHITNEGVAASLPCVASGVPAPTITWTKETNALTSRGPHYNVSKEGTLLIAQPSAQDAGAYVCTATNTVGFSSQEMRLSVNTKPRIHMNGSRNADVPLQVTAKAGEEVTLDCEAKGSPPPLVTWTKDSRPVPPITNRYGLLPSGSLRLAQVQVGDSGHYECTASNPAGSASHRYVLGVQVPPQVQPGPRVLKVLVGEALDLNCVAEGNPEPQLSWSKDGVVLQGRGPQGSVHFAAIRTSDAGRYRCEASNSAGVDAWEVELRVLEPPHWGADETSGLLERVAGENASLPCPARGTPKPQVTWRKGPSSEPLHGQPGVAVLEEGSLFLASVSPADSGDYECQATNEVGSTSRRAKLVVYVPPSIREDGRKANVSGMAGQSLTLECDANGFPVPEIVWLKDAQLIPKVGGHRLLDEGQSLHFPRIQEGDSGLYSCRAENQAGTAQRDFHLLVLTPPSVLGAGAAQEVLGLAGADVELQCWTSGVPTPQVEWTKDRQPVLPGGPHLQVQEDGQVLRITGSHVGDEGRYQCVAFSPAGQQARDFQLRVHAPPTIWGSNETGEVAVMEDHLVQLLCEARGVPTPNITWFKDGALLPTSTKVVYTRGGRQLQLGRAQSSDAGVYTCKASNAVGAAEKATRLDVYVPPTIEGAGGRPYVVKAVAGRPVALECVARGHPSPTLSWHHEGLPVAESNESRLETDGSVLRLESPGEASSGLYSCVASSPAGEAVLQYSVEVQVPPQLLVAEGLGQVTTIVGQPLELPCQASGSPVPTIQWLQNGRPAEELAGVQVASQGTTLHIDHVELDHSGLFACQATNEAGTAGAEVEVSVHEFPSVSIIGGENITAPFLQPVTLQCIGDGVPTPSLRWWKDGVALAAFGGNLQIEKVDLRDEGIYTCAATNLAGESKREVALKVLVPPNIEPGPVNKAVLENASVTLECLASGVPPPDVSWFKGHQPVSSWMGVTVSVDGRVLRIEQAQLSDAGSYRCVASNVAGSTELRYGLRVNVPPRITLPPSLPGPVLVNTPVRLTCNATGAPSPTLMWLKDGNPVSPAGTPGLQVFPGGRVLTLASARASDSGRYSCVAVSAVGEDRQDVVLQVHMPPSILGEELNVSVVANESVALECQSHAMPPPVLSWWKDGRPLEPRPGVHLSADKALLQVDRADVWDAGHYTCEALNQAGHSEKHYNLNVWVAPVFPLRESHTLTVREGHPTRLSCECRGVPFPKISWRKDGQPLPGEGAGLQHVSAVGRLLYLGQAQLAQEGTYTCECSNVVGNSSQDLQLEVHVPPQIAGPREPPTQVSVVQDGVATLECNATGKPPPTVTWERDGQPVGAELGLQLQNQGQSLHVERAQAAHTGRYSCVAENLAGRAERKFELSVLVPPELIGDLDPLTNITAALHSPLTLLCEAMGIPPPAIRWFRGEEPVSPGEDTYLLAGGWMLKMTQTQEQDSGLYSCLASNEAGEARRNFSVEVLVPPSIENEDLEEVIKVLDGQTAHLMCNVTGHPQPKLTWFKDGRPLARGDAHHISPDGVLLQVLQANLSSAGHYSCIAANAVGEKTKHFQLSVLLAPTILGGAEDSADEEVTVTVNNPISLICEALAFPSPNITWMKDGAPFEASRNIQLLPGTHGLQILNAQKEDAGQYTCVVTNELGEAVKNYHVEVLIPPSISKDDPLAEVGVKEVKTKVNSTLTLECESWAVPPPTIRWYKDGQPVTPSSRLQVLGEGRLLQIQPTQVSDSGRYLCVATNVAGEDDQDFNVLIQVPPMFQKVGDFSAAFEILSREEEARGGVTEYREIVENNPAYLYCDTNAIPPPDLTWYREDQPLSAGDEVSVLQGGRVLQIPLVRAENAGRYSCKASNEVGEDWLHYELLVLTPPVILGDTEELVEEVTVNASSTVSLQCPALGNPVPTISWLQNGLPFSPSPRLQVLEDGQVLQVSTAEVADAASYMCVAENQAGSAEKLFTLRVQVPPRIAGLDLEQVTAILNSSVSLPCDVHAHPNPEVTWYKDSQALSLGEEVFLLPGTHTLQLGRARLSDSGMYTCEALNAAGRDQKLVQLSVLVPPAFRQAPRGPQDAVLVRVGDKAVLSCETDALPEPTVTWYKDGQPLVLAQRTQALRGGQRLEIQEAQVSDKGLYSCKVSNVAGEAVRTFTLTVQVPPTFENPKTETVSQVAGSPLVLTCDVSGVPAPTVTWLKDRMPVESSAVHGVVSRGGRLQLSRLQPAQAGTYTCVAENTQAEARKDFVVAVLVAPRIRSSGVAREHHVLEGQEVRLDCEADGQPPPDVAWLKDGSPLGQDMGPHLRFYLDGGSLVLKGLRASDAGAYTCVAHNPAGEDARLHTVNVLVPPTIKQGADGSGTLVSRPGELVTMVCPVRGSPPIHVSWLKDGLPLPLSQRTLLHGSGHTLRISKVQLADAGIFTCVAASPAGVADRNFTLQCPLSWSRWSSRMTWWWFVAPWWNSRARPGAFPCLSCRG

SEQ ID NO: 16843 - protein, 231 aa, Homo sapiens
MRQPAVRLVRLGRVPYAELLGLQDRWLRRLQAEPGIEAPSGTEAGALLLCEPAGPVYTAGLRGGLTPEETARLRALGAEVRVTGRGGLATFHGPGQLLCHPVLDLRRLGLRLRMHVASLEACAVRLCELQGLQDARARPPPYTGVWLDDRKICAIGVRCGRHITSHGLALNCSTDLTWFEHIVPCGLVGTGVTSLSKELQRHVTVEEVMPPFLVAFKEIYKCTLISEDSPN

SEQ ID NO: 16844 - protein, 17 aa, Homo sapiens
AEYFQHWGQGTLVTVSS

SEQ ID NO: 16845 - protein, 550 aa, Homo sapiens
MASVFHYFLLVLVFLDTHAAQPFCLPGCTCSEESFGRTLQCTSVSLGKIPGNLSEEFKQVRIENSPLFEMPQGSFINMSTLEYLWLNFNNISVIHLGALEHLPELRELRLEGNKLCSVPWTAFRATPLLRVLDLKRNKIDALPELALQFLVSLTYLDLSSNRLTVVSKSVFLNWPAYQKCRQPDCGAEILSSLVVALHDNPWVCDCRLRGLVQFVKSITLPVILVNSYLICQGPLSKAGQLFHETELSACMKPQISTPSANITIRAGQNVTLRCLAQASPSPSIAWTYPLSMWREFDVLTSSTGEDTALSELAIPAAHLVDSGNYTCMASNSIGKSNLVISLHVQPAQALHAPDSLSIPSEGNAYIDLRVVKQTVHGILLEWLAVADTSKEEWFTLYIASDEAFRKEVVHIGPGINTYAVDDLLPGTKYEACLSLEGQPPHQGQCVAFVTGRDAGGLEAREHLLHVTVVLCVVLLAVPVGAYAWAAQGPCSCSKWVLRGCLHRRKAPSCTPAAPQSKDGSFREHPAVCDDGEGHIDTEGDKEKGGTEDNS

SEQ ID NO: 16846 - protein, 560 aa, Homo sapiens
MASVFHYFLLVLVFLDTHAAQPFCLPGCTCSEESFGRTLQCTSVSLGKIPGNLSEEFKQVRIENSPLFEMPQGSFINMSTLEYLWLNFNNISVIHLGALEHLPELRELRLEGNKLCSVPWTAFRATPLLRVLDLKRNKIDALPELALQFLVSLTYLDLSSNRLTVVSKSVFLNWPAYQKCRQPDCGAEILSSLVVALHDNPWVCDCRLRGLVQFVKSITLPVILVNSYLICQGPLSKAGQLFHETELSACMKPQISTPSANITIRAGQNVTLRCLAQASPSPSIAWTYPLSMWREFDGLLGGKHLTPVLTSSTGEDTALSELAIPAAHLVDSGNYTCMASNSIGKSNLVISLHVQPAQALHAPDSLSIPSEGNAYIDLRVVKQTVHGILLEWLAVADTSKEEWFTLYIASDEAFRKEVVHIGPGINTYAVDDLLPGTKYEACLSLEGQPPHQGQCVAFVTGRDAGGLEAREHLLHVTVVLCVVLLAVPVGAYAWAAQGPCSCSKWVLRGCLHRRKAPSCTPAAPQSKDGSFREHPAVCDDGEGHIDTEGDKEKGGTEDNS

SEQ ID NO: 16847 - protein, 270 aa, Homo sapiens
MAPWGKRLAGVRGVLLDISGVLYDSGAGGGTAIAGSVEAVARLKRSRLKVRFCTNESQKSRAELVGQLQRLGFDISEQEVTAPAPAACQILKEQGLRPYLLIHDGVRSEFDQIDTSNPNCVVIADAGESFSYQNMNNAFQVLMELEKPVLISLGKGRYYKETSGLMLDVGPYMKALEYACGIKAEVVGKPSPEFFKSALQAIGVEAHQAVMIGDDIVGDVGGAQRCGMRALQVRTGKFRPSDEHHPEVKADGYVDNLAEAVDLLLQHADK

SEQ ID NO: 16848 - protein, 210 aa, Homo sapiens
MAPWGKRLAGVRGVLLDISGVLYDSGAGGGTAIAGSVEAVARLKRSRLKVRFCTNESQKSRAELVGQLQRLGFDISEQEVTAPAPAACQILKEQGLRPYLLIHDGVRSEFDQIDTSNPNCVVIADAGESFSYQNMNNAFQVLMELEKPVLISLGKGRYYKETSGLMLDVGPYMKALEYACGIKAEVVGKPSPEFFKSALQAIGVEAHQAQ

SEQ ID NO: 16849 - protein, 679 aa, Homo sapiens
MHLFACLCIVLSFLEGVGCLCPSQCTCDYHGRNDGSGSRLVLCNDMDMNELPTNLPVDTVKLRIEKTVIRRISAEAFYYLVELQYLWVTYNSVASIDPSSFYNLKQLHELRLDGNSLAAFPWASLLDMPLLRTLDLHNNKITSVPNEALRYLKNLAYLDLSSNRLTTLPPDFLESWTHLVSTPSGVLDLSPSRIILGLQDNPWFCDCHISKMIELSKVVDPAIVLLDPLMTCSEPERLTGILFQRAELEHCLKPSVMTSATKIMSALGSNVLLRCDATGFPTPQITWTRSDSSPVNYTVIQESPEEGVRWSIMSLTGISSKDAGDYKCKAKNLAGMSEAVVTVTVLGITTTPIPPDTSERTGDHPEWDVQPGSGRSTSVSSASSYLWSSSFSPTSSFSASTLSPPSTASFSLSPFSSSTVSSTTTLSTSISASTTMANKRSFQLHQGGKRNLKVAKNGSKLPPASTSKKEELALLDQTMLTETNAAIENLRVVSETKESVTLTWNMINTTHNSAVTVLYSKYGGKDLLLLNADSSKNQVTIDGLEPGGQYMACVCPKGVPPQKDQCITFSTERVEGDDSQWSLLLVVTSTACVVILPLICFLLYKVCKLQCKSEPFWEDDLAKETYIQFETLFPRSQSVGELWTRSHRDDSEKLLLCSRSSVESQVTFKSEGSRPEYYC

SEQ ID NO: 16850 - protein, 541 aa, Homo sapiens
MHLFACLCIVLSFLEGVGCLCPSQCTCDYHGRNDGSGSRLVLCNDMVEPHQEPRHSKVGLQDNPWFCDCHISKMIELSKVVDPAIVLLDPLMTCSEPERLTGILFQRAELEHCLKPSVMTSATKIMSALGSNVLLRCDATGFPTPQITWTRSDSSPVNYTVIQESPEEGVRWSIMSLTGISSKDAGDYKCKAKNLAGMSEAVVTVTVLGITTTPIPPDTSERTGDHPEWDVQPGSGRSTSVSSASSYLWSSSFSPTSSFSASTLSPPSTASFSLSPFSSSTVSSTTTLSTSISASTTMANKRSFQLHQGGKRNLKVAKNGSKLPPASTSKKEELALLDQTMLTETNAAIENLRVVSETKESVTLTWNMINTTHNSAVTVLYSKYGGKDLLLLNADSSKNQVTIDGLEPGGQYMACVCPKGVPPQKDQCITFSTERVEGDDSQWSLLLVVTSTACVVILPLICFLLYKVCKLQCKSEPFWEDDLAKETYIQFETLFPRSQSVGELWTRSHRDDSEKLLLCSRSSVESQVTFKSEGSRPEYYC

SEQ ID NO: 16851 - protein, 107 aa, Homo sapiens
MSESSSKSSQPLASKQEKDGTEKRGRGRPRKQPPVSPGTALVGSQKEPSEVPTPKRPRGRPKGSKNKGAAKTRKTTTTPGRKPRGRPKKLEKEEEEGISQESSEEEQ

SEQ ID NO: 16852 - protein, 96 aa, Homo sapiens
MSESSSKSSQPLASKQEKDGTEKRGRGRPRKQPPKEPSEVPTPKRPRGRPKGSKNKGAAKTRKTTTTPGRKPRGRPKKLEKEEEEGISQESSEEEQ

SEQ ID NO: 16853 - protein, 179 aa, Homo sapiens
MSESSSKSSQPLASKQEKDGTEKRGRGRPRKQPPVSPGTALVGSQKEPSEVPTPKRPRGRPKGSKKNWRRRKRRASRRSPRRRSSDPCVPPAPHWRSSFLLGLDSFAPLPPPPPLPQAHHHHRLWPPPPSSTCALTTTLHSTPAAAGLPWAEWGAVFPWPQFPAPPAHPRIHTCPPGQG

SEQ ID NO: 16854 - protein, 362 aa, Homo sapiens
MLVMAPRTVLLLLSAALALTETWAGSHSMRYFYTSVSRPGRGEPRFISVGYVDDTQFVRFDSDAASPREEPRAPWIEQEGPEYWDRNTQIYKAQAQTDRESLRNLRGYYNQSEAGSHTLQSMYGCDVGPDGRLLRGHDQYAYDGKDYIALNEDLRSWTAADTAAQITQRKWEAAREAEQRRAYLEGECVEWLRRYLENGKDKLERADPPKTHVTHHPISDHEATLRCWALGFYPAEITLTWQRDGEDQTQDTELVETRPAGDRTFQKWAAVVVPSGEEQRYTCHVQHEGLPKPLTLRWEPSSQSTVPIVGIVAGLAVLAVVVIGAVVAAVMCRRKSSGGKGGSYSQAACSDSAQGSDVSLTA

SEQ ID NO: 16855 - protein, 139 aa, Homo sapiens
MSISSALAMVFMGAKGNTAAQMSQALCFSKIGGEDGDIHRGFQSLLVAINRTDTEYVLRTANGLFGEKSYDFLTGFTDSCGKFYQATIKQLDFVNDTEKSTTRVNSWVADKTKGENILLFYFDNILNSFIVSSLQNCQI

SEQ ID NO: 16856 - protein, 489 aa, Homo sapiens
MTPIVTVLICLRLSLGPRTHVQAGTLPKPTLWAEPGSVITQGSPVTLWCQGILETQEYRLYREKKTAPWITRIPQEIVKKGQFPIPSITWEHTGRYRCFYGSHTAGWSEPSDPLELVVTGAYIKPTLSALPSPVVTSGGNVTLHCVSQVAFGSFILCKEGEDEHPQCLNSQPRTHGWSRAIFSVGPVSPSRRWSYRCYAYDSNSPHVWSLPSDLLELLVLGVSKKPSLSVQPGPIVAPGESLTLQCVSDVSYDRFVLYKEGERDFLQLPGPQPQAGLSQANFTLGPVSRSYGGQYRCSGAYNLSSEWSAPSDPLDILIAGQFRGRPFISVHPGPTVASGENVTLLCQSWGPFHTFLLTKAGAADAPLRLRSIHEYPKYQAEFPMSPVTSAHSGTYRCYGSLSSNPYLLSHPSDSLELMVSGAAETLSPPQNKSDSKAGAANTLSPSQNKTASHPQDYTVENLIRMGIAGLVLVVLGILLFEAQHSQRSL

SEQ ID NO: 16857 - protein, 289 aa, Homo sapiens
MTPIVTVLICLRLSLGPRTHVQAGTLPKPTLWAEPGSVITQGSPVTLWCQGILETQEYRLYREKKTAPWITRIPQEIVKKGQFPIPSITWEHTGRYRCFYGSHTAGWSEPSDPLELVVTGAYIKPTLSALPSPVVTSGGNVTLHCVSQVAFGSFILCKEGEDEHPQCLNSQPRTHGWSRAIFSVGPVSPSRRWSYRCYAYDSNSPHVWSLPSDLLELLVLGAAETLSPPQNKSDSKAGAANTLSPSQNKTASHPQDYTVENLIRMGIAGLVLVVLGILLFEAQHSQRSL

SEQ ID NO: 16858 - protein, 358 aa, Homo sapiens
MVDGTLLLLLSEALALTQTWAGSHSLKYFHTSVSRPGRGEPRFISVGYVDDTQFVRFDNDAASPRMVPRAPWMEQEGSEYWDRETRSARDTAQIFRVNLRTLRGYYNQSEAGSHTLQWMHGCELGPDGRFLRGYEQFAYDGKDYLTLNEDLRSWTAVDTAAQISEQKSNDASEAEHQRAYLEDTCVEWLHKYLEKGKETLLHLEPPKTHVTHHPISDHEATLRCWALGFYPAEITLTWQQDGEGHTQDTELVETRPAGDGTFQKWAAVVVPSGEEQRYTCHVQHEGLPEPVTLRWKPASQPTIPIVGIIAGLVLLGSVVSGAVVAAVIWRKKSSGGKGGSYSKAEWSDSAQGSESHSL

SEQ ID NO: 16859 - protein, 429 aa, Homo sapiens
MSGGVYGGDEVGALVFDIGSYTVRAGYAGEDCPKVDFPTAIGMVVERDDGSTLMEIDGDKGKQGGPTYYIDTNALRVPRENMEAISPLKNGMVEDWDSFQAILDHTYKMHVKSEASLHPVLMSEAPWNTRAKREKLTELMFEHYNIPAFFLCKTAVLTAFANGRSTGLILDSGATHTTAIPVHDGYVLQQGIVKSPLAGDFITMQCRELFQEMNIELVPPYMIASKEAVREGSPANWKRKEKLPQVTRSWHNYMCNCVIQDFQASVLQVSDSTYDEQVAAQMPTVHYEFPNGYNCDFGAERLKIPEGLFDPSNVKGLSGNTMLGVSHVVTTSVGMCDIDIRPGLYGSVIVAGGNTLIQSFTDRLNRELSQKTPPSMRLKLIANNTTVERRFSSWIGGSILASLGTFQQMWISKQEYEEGGKQCVERKCP

SEQ ID NO: 16860 - protein, 387 aa, Homo sapiens
MVVERDDGSTLMEIDGDKGKQGGPTYYIDTNALRVPRENMEAISPLKNGMVEDWDSFQAILDHTYKMHVKSEASLHPVLMSEAPWNTRAKREKLTELMFEHYNIPAFFLCKTAVLTAFANGRSTGLILDSGATHTTAIPVHDGYVLQQGIVKSPLAGDFITMQCRELFQEMNIELVPPYMIASKEAVREGSPANWKRKEKLPQVTRSWHNYMCNCVIQDFQASVLQVSDSTYDEQVAAQMPTVHYEFPNGYNCDFGAERLKIPEGLFDPSNVKGLSGNTMLGVSHVVTTSVGMCDIDIRPGLYGSVIVAGGNTLIQSFTDRLNRELSQKTPPSMRLKLIANNTTVERRFSSWIGGSILASLGTFQQMWISKQEYEEGGKQCVERKCP

SEQ ID NO: 16861 - protein, 98 aa, Homo sapiens
MLRSTFTVHWTTILGICRPIKPIYKSQACPLSEKRNADNHLVSEDNTFKEPERYISSSCVLTSILYLGEKTFSFRTLISPRGMKLVEILQQPSLTMVA

SEQ ID NO: 16862 - protein, 489 aa, Homo sapiens
MEPGLEHALRRTPSWSSLGGSEHQEMSFLEQENSSSWPSPAVTSSSERIRGKRRAKALRWTRQKSVEEGEPPGQGEGPRSRPAAESTGLEATFPKTTPLAQADPAGVGTPPTGWDCLPSDCTASAAGSSTDDVELATEFPATEAWECELEGLLEERPALCLSPQAPFPKLGWDDELRKPGAQIYMRFMQEHTCYDAMATSSKLVIFDTMLEIKKAFFALVANGVRAAPLWDSKKQSFVGMLTITDFILVLHRYYRSPLVQIYEIEQHKIETWREIYLQGCFKPLVSISPNDSLFEAVYTLIKNRIHRLPVLDPVSGNVLHILTHKRLLKFLHIFGSLLPRPSFLYRTIQDLGIGTFRDLAVVLETAPILTALDIFVDRRVSALPVVNECGQVVGLYSRFDVIHLAAQQTYNHLDMSVGEALRQRTLCLEGVLSCQPHESLGEVIDRIAREQVHRLVLVDETQHLLGVVSLSDILQALVLSPAGIDALGA

SEQ ID NO: 16863 - protein, 464 aa, Homo sapiens
MSFLEQENSSSWPSPAVTSSSERIRGKRRAKALRWTRQKSVEEGEPPGQGEGPRSRPAAESTGLEATFPKTTPLAQADPAGVGTPPTGWDCLPSDCTASAAGSSTDDVELATEFPATEAWECELEGLLEERPALCLSPQAPFPKLGWDDELRKPGAQIYMRFMQEHTCYDAMATSSKLVIFDTMLEIKKAFFALVANGVRAAPLWDSKKQSFVGMLTITDFILVLHRYYRSPLVQIYEIEQHKIETWREIYLQGCFKPLVSISPNDSLFEAVYTLIKNRIHRLPVLDPVSGNVLHILTHKRLLKFLHIFGSLLPRPSFLYRTIQDLGIGTFRDLAVVLETAPILTALDIFVDRRVSALPVVNECGQVVGLYSRFDVIHLAAQQTYNHLDMSVGEALRQRTLCLEGVLSCQPHESLGEVIDRIAREQVHRLVLVDETQHLLGVVSLSDILQALVLSPAGIDALGA

SEQ ID NO: 16864 - protein, 388 aa, Homo sapiens
MDKLDANVSSEEGFGSVEKVVLLTFLSTVILMAILGNLLVMVAVCWDRQLRKIKTNYFIVSLAFADLLVSVLVMPFGAIELVQDIWIYGEVFCLVRTSLDVLLTTASIFHLCCISLDRYYAICCQPLVYRNKMTPLRIALMLGGCWVIPTFISFLPIMQGWNNIGIIDLIEKRKFNQNSNSTYCVFMVNKPYAITCSVVAFYIPFLLMVLAYYRIYVTAKEHAHQIQMLQRAGASSESRPQSADQHSTHRMRTETKAAKTLCIIMGCFCLCWAPFFVTNIVDPFIDYTVPGQVWTAFLWLGYINSGLNPFLYAFLNKSFRRAFLIILCCDDERYRRPSILGQTVPCSTTTINGSTHVLRDAVECGGQWESQCHPPATSPLVAAQPSDT

SEQ ID NO: 16865 - protein, 387 aa, Homo sapiens
MDKLDANVSSEEGFGSVEKVVLLTFLSTVILMAILGNLLVMVAVCWDRQLRKIKTNYFIVSLAFADLLVSVLVMPFGAIELVQDIWIYGEVFCLVRTSLDVLLTTASIFHLCCISLDRYYAICCQPLVYRNKMTPLRIALMLGGCWVIPTFISFLPIMQGWNNIGIIDLIEKRKFNQNSNSTYCVFMVNKPYAITCSVVAFYIPFLLMVLAYYRIYVTAKEHAHQIQMLQRAGASSESRPQSADQHSTHRMRTETKAAKTLCIIMGCFCLCWAPFFVTNIVDPFIDYTVPGQVWTAFLWLGYINSGLNPFLYAFLNKSFRRAFLIILCCDDERYRRPSILGQTVPCSTTTINGSTHVLRYTVLHRGHHQELEKLPIHNDPESLESCF

SEQ ID NO: 16866 - protein, 360 aa, Homo sapiens
MDKLDANVSSEEGFGSVEKVVLLTFLSTVILMAILGNLLVMVAVCWDRQLRKIKTNYFIVSLAFADLLVSVLVMPFGAIELVQDIWIYGEVFCLVRTSLDVLLTTASIFHLCCISLDRYYAICCQPLVYRNKMTPLRIALMLGGCWVIPTFISFLPIMQGWNNIGIIDLIEKRKFNQNSNSTYCVFMVNKPYAITCSVVAFYIPFLLMVLAYYRIYVTAKEHAHQIQMLQRAGASSESRPQSADQHSTHRMRTETKAAKTLCIIMGCFCLCWAPFFVTNIVDPFIDYTVPGQVWTAFLWLGYINSGLNPFLYAFLNKSFRRAFLIILCCDDERYRRPSILGQTVPCSTTTINGSTHVLRF

SEQ ID NO: 16867 - protein, 380 aa, Homo sapiens
MDKLDANVSSEEGFGSVEKVVLLTFLSTVILMAILGNLLVMVAVCWDRQLRKIKTNYFIVSLAFADLLVSVLVMPFGAIELVQDIWIYGEVFCLVRTSLDVLLTTASIFHLCCISLDRYYAICCQPLVYRNKMTPLRIALMLGGCWVIPTFISFLPIMQGWNNIGIIDLIEKRKFNQNSNSTYCVFMVNKPYAITCSVVAFYIPFLLMVLAYYRIYVTAKEHAHQIQMLQRAGASSESRPQSADQHSTHRMRTETKAAKTLCIIMGCFCLCWAPFFVTNIVDPFIDYTVPGQVWTAFLWLGYINSGLNPFLYAFLNKSFRRAFLIILCCDDERYRRPSILGQTVPCSTTTINGSTHVLSSGTETDRRNFGIRKRRLTKPS

SEQ ID NO: 16868 - protein, 378 aa, Homo sapiens
MDKLDANVSSEEGFGSVEKVVLLTFLSTVILMAILGNLLVMVAVCWDRQLRKIKTNYFIVSLAFADLLVSVLVMPFGAIELVQDIWIYGEVFCLVRTSLDVLLTTASIFHLCCISLDRYYAICCQPLVYRNKMTPLRIALMLGGCWVIPTFISFLPIMQGWNNIGIIDLIEKRKFNQNSNSTYCVFMVNKPYAITCSVVAFYIPFLLMVLAYYRIYVTAKEHAHQIQMLQRAGASSESRPQSADQHSTHRMRTETKAAKTLCIIMGCFCLCWAPFFVTNIVDPFIDYTVPGQVWTAFLWLGYINSGLNPFLYAFLNKSFRRAFLIILCCDDERYRRPSILGQTVPCSTTTINGSTHVLSGCSPVSSFLLLFCNRPVPV

SEQ ID NO: 16869 - protein, 402 aa, Homo sapiens
MDKLDANVSSEEGFGSVEKVVLLTFLSTVILMAILGNLLVMVAVCWDRQLRKIKTNYFIVSLAFADLLVSVLVMPFGAIELVQDIWIYGEVFCLVRTSLDVLLTTASIFHLCCISLDRYYAICCQPLVYRNKMTPLRIALMLGGCWVIPTFISFLPIMQGWNNIGIIDLERSLNQGLGQDFHAIEKRKFNQNSNSTYCVFMVNKPYAITCSVVAFYIPFLLMVLAYYRIYVTAKEHAHQIQMLQRAGASSESRPQSADQHSTHRMRTETKAAKTLCIIMGCFCLCWAPFFVTNIVDPFIDYTVPGQVWTAFLWLGYINSGLNPFLYAFLNKSFRRAFLIILCCDDERYRRPSILGQTVPCSTTTINGSTHVLRDAVECGGQWESQCHPPATSPLVAAQPSDT

SEQ ID NO: 16870 - protein, 359 aa, Homo sapiens
MDKLDANVSSEEGFGSVEKVVLLTFLSTVILMAILGNLLVMVAVCWDRQLRKIKTNYFIVSLAFADLLVSVLVMPFGAIELVQDIWIYGEVFCLVRTSLDVLLTTASIFHLCCISLDRYYAICCQPLVYRNKMTPLRIALMLGGCWVIPTFISFLPIMQGWNNIGIIDLIEKRKFNQNSNSTYCVFMVNKPYAITCSVVAFYIPFLLMVLAYYRIYVTAKEHAHQIQMLQRAGASSESRPQSADQHSTHRMRTETKAAKTLCIIMGCFCLCWAPFFVTNIVDPFIDYTVPGQVWTAFLWLGYINSGLNPFLYAFLNKSFRRAFLIILCCDDERYRRPSILGQTVPCSTTTINGSTHVLR

SEQ ID NO: 16871 - protein, 428 aa, Homo sapiens
MDKLDANVSSEEGFGSVEKVVLLTFLSTVILMAILGNLLVMVAVCWDRQLRKIKTNYFIVSLAFADLLVSVLVMPFGAIELVQDIWIYGEVFCLVRTSLDVLLTTASIFHLCCISLDRYYAICCQPLVYRNKMTPLRIALMLGGCWVIPTFISFLPIMQGWNNIGIIDLIEKRKFNQNSNSTYCVFMVNKPYAITCSVVAFYIPFLLMVLAYYRIYVTAKEHAHQIQMLQRAGASSESRPQSADQHSTHRMRTETKAAKTLCIIMGCFCLCWAPFFVTNIVDPFIDYTVPGQVWTAFLWLGYINSGLNPFLYAFLNKSFRRAFLIILCCDDERYRRPSILGQTVPCSTTTINGSTHVLRTDFLFDRDILARYWTKPARAGPFSGTLSIRCLTARKPVLGDAVECGGQWESQCHPPATSPLVAAQPSDT

SEQ ID NO: 16872 - protein, 411 aa, Homo sapiens
MDKLDANVSSEEGFGSVEKVVLLTFLSTVILMAILGNLLVMVAVCWDRQLRKIKTNYFIVSLAFADLLVSVLVMPFGAIELVQDIWIYGEVFCLVRTSLDVLLTTASIFHLCCISLDRYYAICCQPLVYRNKMTPLRIALMLGGCWVIPTFISFLPIMQGWNNIGIIDLIEKRKFNQNSNSTYCVFMVNKPYAITCSVVAFYIPFLLMVLAYYRIYVTAKEHAHQIQMLQRAGASSESRPQSADQHSTHRMRTETKAAKTLCIIMGCFCLCWAPFFVTNIVDPFIDYTVPGQVWTAFLWLGYINSGLNPFLYAFLNKSFRRAFLIILCCDDERYRRPSILGQTVPCSTTTINGSTHVLSSGTETDRKKLWNKEEKIDQTIQMPKRKRKKKASLSYEDLILLGRKSCFREGK

SEQ ID NO: 16873 - protein, 440 aa, Homo sapiens
MVPEPGPTANSTPAWGAGPPSAPGGSGWVAAALCVVIALTAAANSLLIALICTQPALRNTSNFFLVSLFTSDLMVGLVVMPPAMLNALYGRWVLARGLCLLWTAFDVMCCSASILNLCLISLDRYLLILSPLRYKLRMTPLRALALVLGAWSLAALASFLPLLLGWHELGHARPPVPGQCRLLASLPFVLVASGLTFFLPSGAICFTYCRILLAARKQAVQVASLTTGMASQASETLQVPRTPRPGVESADSRRLATKHSRKALKASLTLGILLGMFFVTWLPFFVANIVQAVCDCISPGLFDVLTWLGYCNSTMNPIIYPLFMRDFKRALGRFLPCPRCPRERQASLASPSLRTSHSGPRPGLSLQQVLPLPLPPDSDSDSDAGSGGSSGLRLTAQLLLPGEATQDPPLPTRAAAAVNFFNIDPAEPELRPHPLGIPTN

SEQ ID NO: 16874 - protein, 343 aa, Homo sapiens
MDPEHCAPFRVGPAPGPYVASGDEPPGPQGTPAAAPHLHPAPPRGPRLTRFPACGPLEPYLPEPAKPPAKYLQDLGPGPALNGGHFYEGPAEAEEKTSKAASFPQLPLDCRGGPRDGPSNLQGSPGPCLASLHLPLSPGLPDSMELAKNKSKKRRNRTTFSTFQLEELEKVFQKTHYPDVYAREQLALRTDLTEARVQVWFQNRRAKWRKRERYGKIQEGRNPFTAAYDISVLPRTDSHPQLQNSLWASPGSGSPGGPCLVSPEGIPSPCMSPYSHPHGSVAGFMGVPAPSAAHPGIYSIHGFPPTLGGHSFEPSSDGDYKSPSLVSLRVKPKEPPGLLNWTT

SEQ ID NO: 16875 - protein, 1135 aa, Homo sapiens
METQKDEAAQAKGAAASGSTREQTAEKGAKNKAAEATEGPTSEPSSSGPGRLKKTAMKLFGGKKGICTLPSFFGGGRSKGSGKGSSKKGLSKSKTHDGLSEAAHGPEDVVSEGTGFSLPLPELPCQFPSSQSAHGALETGSRCKTSVAGATEKAVAEKFPSMPKPKKGLKGFFSSIRRHRKSKVTGAEQSEPGAKGPERVRARPHEHVSSAPQVPCFEETFQAPRKENANPQDAPGPKVSPTPEPSPPATEKMACKDPEKPMEACASAHVQPKPAPEASSLEEPHSPETGEKVVAGEVNPPNGPVGDPLSLLFGDVTSLKSFDSLTGCGDIIAEQDMDSMTDSMASGGQRANRDGTKRSSCLVTYQGGGEEMALPDDDDEEEEEEEEVELEEEEEEVKEEEEDDDLEYLWETAQMYPRPNMNLGYHPTTSPGHHGYMLLDPVRSYPGLAPGELLTPQSDQQESAPNSDEGYYDSTTPGFEDDSGEALGLVRRDCLPRDSYSGDALYEFYEPDDSLENSPPGDDCLYDLHGRSSEMFDPFLNFEPFLSSRPPGAMETEEERLVTIQKQLLYWELRREQLEAQEARAREAHAREAHAREAYTREAYGREAYAREAHTWEAHGREARTREAQAREVRCRETQVRETQARQEKPVLEYQMRPLGPSVMGLAAGVSGTSQISHRGITSAFPTTASSEPDWRDFRPLEKRYEGTCSKKDQSTCLMQLFQSDAMFEPDMQEANFGGSPRRAYPTYSPPEDPEEEEVEKEGNATVSFSQALVEFTSNGNLFSSMSCSSDSDSSFTQNLPELPPMVTFDIADVERDGEGKCEENPEFHNDEDLAASLEAFELGYYHKHAFNNYHSRFYQGLPWGVSSLPRYLGLPGLHPRPPPAAMALNRRSRSLDTAETLEMELSNSHLVQGYLESDELQAQQEDSDEEDEEEEEGEWSRDSPLSLYTEPPGAYDWPAWAPCPLPVGPGPAWISPNQLDRPSSQSPYRQATCCIPPMTMSISLSVPESRAPGESGPQLARPSHLHLPMGPCYNLQPQASQSMRARPRDVLLPVDEPSCSSSSGGFSPSPLPQAKPVGITHGIPQLPRVRPEHPQPQPTHYGPSSLDLSKERAEQGASLATSYSSTAMNGNLAK

SEQ ID NO: 16876 - protein, 804 aa, Homo sapiens
METQKDEAAQAKGAAASGSTREQTAEKGAKNKAAEATEGPTSEPSSSGPGRLKKTAMKLFGGKKGICTLPSFFGGGRSKGSGKGSSKKGLSKSKTHDGLSEAAHGPEDVVSEGTGFSLPLPELPCQFPSSQSAHGALETGSRCKTSVAGATEKAVAEKFPSMPKPKKGLKGFFSSIRRHRKSKVTGAEQSEPGAKGPERVRARPHEHVSSAPQVPCFEETFQAPRKENANPQDAPGPKVSPTPEPSPPATEKMACKDPEKPMEACASAHVQPKPAPEASSLEEPHSPETGEKVVAGEVNPPNGPVGDPLSLLFGDVTSLKSFDSLTGCGDIIAEQDMDSMTDSMASGGQRANRDGTKRSSCLVTYQGGGEEMALPDDDDEEEEEEEEVELEEEEEEVKEEEEDDDLEYLWETAQMYPRPNMNLGYHPTTSPGHHGYMLLDPVRSYPGLAPGELLTPQSDQQESAPNSDEGYYDSTTPGFEDDSGEALGLVRRDCLPRDSYSGDALYEFYEPDDSLENSPPGDDCLYDLHGRSSEMFDPFLNFEPFLSSRPPGAMETEEERLVTIQKQLLYWELRREQLEAQEARAREAHAREAHAREAYTREAYGREAYAREAHTWEAHGREARTREAQAREVRCRETQVRETQARQEKPVLEYQMRPLGPSVMGLAAGVSGTSQISHRGITSAFPTTASSEPDWRDFRPLEKRYEGTCSKKDQSTCLMQLFQSDAMFEPDMQEANFGGSPRRAYPTYSPPEDPEEEEVEKEGNATVSFSQALVEFTSNGNLFSSIRCPGTEDKRQVTQACGTW

SEQ ID NO: 16877 - protein, 605 aa, Homo sapiens
MGGCFSKPKPVELKIEVVLPEKERGKEELSASGKGSPRAYQGNGTARHFHTEERLSTPHPYPSPQDCVEAAVCHVKDLENGQMREVELGWGKVLLVKDNGEFHALGHKCPHYGAPLVKGVLSRGRVRCPWHGACFNISTGDLEDFPGLDSLHKFQVKIEKEKVYVRASKQALQLQRRTKVMAKCISPSAGYSSSTNVLIVGAGAAGLVCAETLRQEGFSDRIVLCTLDRHLPYDRPKLSKSLDTQPEQLALRPKEFFRAYGIEVLTEAQVVTVDVRTKKVVFKDGFKLEYSKLLLAPGSSPKTLSCKGKEVENVFTIRTPEDANRVVRLARGRNVVVVGAGFLGMEVAAYLTEKAHSVSVVELEETPFRRFLGERVGRALMKMFENNRVKFYMQTEVSELRGQEGKLKEVVLKSSKVVRADVCVVGIGAVPATGFLRQSGIGLDSRGFIPVNKMMQTNVPGVFAAGDAVTFPLAWRNNRKVNIPHWQMAHAQGRVAAQNMLAQEAEMSTVPYLWTAMFGKSLRYAGYGEGFDDVIIQGDLEELKFVAFYTKGDEVIAVASMNYDPIVSKVAEVLASGRAIRKREVELFVLHSKTGDMSWLTGKGS

SEQ ID NO: 16878 - protein, 604 aa, Homo sapiens
MGGCFSKPKPGAALPTVELKIEVVLPEKERGKEELSASGKGSPRAYQGNGTARHFHTEERLSTPHPYPSPQDCVEAAVCHVKDLENGQMREVELGWGKVLLVKDNGEFHALGHKCPHYGAPLVKGVLSRGRVRCPWHGACFNISTGDLEDFPGLDSLHKFQVKIEKEKVYVRASKQALQLQRRTKVMAKCISPSAGYSSSTNVLIVGAGAAGLVCAETLRQEGFSDRIVLCTLDRHLPYDRPKLSKSLDTQPEQLALRPKEFFRAYGIEVLTEAQVVTVDVRTKKVVFKDGFKLEYSKLLLAPGSSPKTLSCKGKEVENVFTIRTPEDANRVVRLARGRNVVVVGAGFLGMEVAAYLTEKAHSVSVVELEETPFRRFLGERVGRALMKMFENNRVKFYMQTEVSELRGQEGKLKEVVLKSSKVVRADVCVVGIGAVPATGFLRQSGIGLDSRGFIPVNKMMQTNVPGVFAAGDAVTFPLAWRNNRKVNIPHWQMAHAQGRVAAQNMLAQEAEMSTVPYLWTAMFGKSLRYAGYGEGFDDVIIQGDLEELKFVAFYTKGDEVIAVASMNYDPIVSKVAEVLASGRAIRKREVETGDMSWLTGKGS

SEQ ID NO: 16879 - protein, 598 aa, Homo sapiens
MGGCFSKPKPVELKIEVVLPEKERGKEELSASGKGSPRAYQGNGTARHFHTEERLSTPHPYPSPQDCVEAAVCHVKDLENGQMREVELGWGKVLLVKDNGEFHALGHKCPHYGAPLVKGVLSRGRVRCPWHGACFNISTGDLEDFPGLDSLHKFQVKIEKEKVYVRASKQALQLQRRTKVMAKCISPSAGYSSSTNVLIVGAGAAGLVCAETLRQEGFSDRIVLCTLDRHLPYDRPKLSKSLDTQPEQLALRPKEFFRAYGIEVLTEAQVVTVDVRTKKVVFKDGFKLEYSKLLLAPGSSPKTLSCKGKEVENVFTIRTPEDANRVVRLARGRNVVVVGAGFLGMEVAAYLTEKAHSVSVVELEETPFRRFLGERVGRALMKMFENNRVKFYMQTEVSELRGQEGKLKEVVLKSSKVVRADVCVVGIGAVPATGFLRQSGIGLDSRGFIPVNKMMQTNVPGVFAAGDAVTFPLAWRNNRKVNIPHWQMAHAQGRVAAQNMLAQEAEMSTVPYLWTAMFGKSLRYAGYGEGFDDVIIQGDLEELKFVAFYTKGDEVIAVASMNYDPIVSKVAEVLASGRAIRKREVETGDMSWLTGKGS

SEQ ID NO: 16880 - protein, 258 aa, Homo sapiens [sequence omitted]

SEQ ID NO: 16881 - protein, 240 aa, Homo sapiens
MKNISRYLTDIKPLPPNIKDRLIKIMSMQGQITDSNISEILHPEVQTLDLRSCDISDAALLHLSNCRKLKKLNLNASKGNRVSVTSEGIKAVASSCSYLHEASLKRCCNLTDEGVVALALNCQLLKIIDLGGCLSITDVSLHALGKNCPFLQCVDFSATQVSDSGVIALVSGPCAKKLEEIHMGHCVNLTDGAVEAVLTYCPQIRILLFHGCPLITDHSREVLEQLVGPNKLKQVTWTVY

SEQ ID NO: 16882 - protein, 3080 aa, Homo sapiens
MKEHIIYQKLYGLILMSSFIFLSDTLSLKGKKLDFFGRGDTYVSLIDTIPELSRFTACIDLVFMDDNSRYWMAFSYITNNALLGREDIDLGLAGDHQQLILYRLGKTFSIRHHLASFQWHTICLIWDGVKGKLELFLNKERILEVTDQPHNLTPHGTLFLGHFLKNESSEVKSMMRSFPGSLYYFQLWDHILENEEFMKCLDGNIVSWEEDVWLVNKIIPTVDRTLRCFVPENMTIQEKSTTVSQQIDMTTPSQITGVKPQNTAHSSTLLSQSIPIFATDYTTISYSNTTSPPLETMTAQKILKTLVDETATFAVDVLSTSSAISLPTQSISIDNTTNSMKKTKSPSSESTKTTKMVEAMATEIFQPPTPSNFLSTSRFTKNSVVSTTSAIKSQSAVTKTTSLFSTIESTSMSTTPCLKQKSTNTGALPISTAGQEFIESTAAGTVPWFTVEKTSPASTHVGTASSFPPEPVLISTAAPVDSVFPRNQTAFPLATTDMKIAFTVHSLTLPTRLIETTPAPRTAETELTSTNFQDVSLPRVEDAMSTSMSKETSSKTFSFLTSFSFTGTESVQTVIDAEATRTALTPEITLASTVAETMLSSTITGRVYTQNTPTADGHLLTLMSTRSASTSKAPESGPTSTTDEAAHLFSSNETIWTSRPDQALLASMNTTTILTFVPNENFTSAFHENTTYTEYLSATTNITPLKASPEGKGTTANDATTARYTTAVSKLTSPWFANFSIVSGTTSITNMPEFKLTTLLLKTIPMSTKPANELPLTPRETVVPSVDIISTLACIQPNFSTEESASETTQTEINGAIVFGGTTTPVPKSATTQRLNATVTRKEATSHYLMRKSTIAAVAEVSPFSTMLEVTDESAQRVTASVTVSSFPDIEKLSTPLDNKTATTEVRESWLLTKLVKTTPRSSYNEMTEMFNFNHTYVAHWTSETSEGISAGSPTSGSTHIFGEPLGASTTRISETSFSTTPTDRTATSLSDGILPPQPTAAHSSATPVPVTHMFSLPVNGSSVVAEETEVTMSEPSTLARAFSTSVLSDVSNLSSTTMTTALVPPLDQTASTTIVIVPTHGDLIRTTSEATVISVRKTSMAVPSLTETPFHSLRLSTPVTAKAETTLFSTSVDTVTPSTHTLVCSKPPPDNIPPASSTHVISTTSTPEATQPISQVEETSTYALSFPYTFSGGGVVASLATGTTETSVVDETTPSHISANKLTTSVNSHISSSATYRVHTPVSIQLVTSTSVLSSDKDQMTISLGKTPRTMEVTEMSPSKNSFISYSRGTPSLEMTDTGFPETTKISSHQTHSPSEIPLGTPSDGNLASSPTSGSTQITPTLTSSNTVGVHIPEMSTSLGKTALPSQALTITTFLCPEKESTSALPAYTPRTVEMIVNSTYVTHSVSYGQDTSFVDTTTSSSTRISNPMDINTTFSHLHSLRTQPEVTSVASFISESTQTFPESLSLSTAGLYNDGFTVLSDRITTAFSVPNVPTMLPRESSMATSTPIYQMSSLPVNVTAFTSKKVSDTPPIVITKSSKTMHPGCLKSPCTATSGPMSEMSSIPVNNSAFTPATVSSDTSTRVGLFSTLLSSVTPRTTMTMQTSTLDVTPVIYAGATSKNKMVSSAFTTEMIEAPSRITPTTFLSPTEPTLPFVKTVPTTIMAGIVTPFVGTTAFSPLSSKSTGAISSIPKTTFSPFLSATQQSSQADEATTLGILSGITNRSLSTVNSGTGVALTDTYSRITVPENMLSPTHADSLHTSFNIQVSPSLTSFKSASGPTKNVKTTTNCFSSNTRKMTSLLEKTSLTNYATSLNTPVSYPPWTPSSATLPSLTSFVYSPHSTEAEISTPKTSPPPTSQMVEFPVLGTRMTSSNTQPLLMTSWNIPTAEGSQFPISTTINVPTSNEMETETLHLVPGPLSTFTASQTGLVSKDVMAMSSIPMSGILPNHGLSENPSLSTSLRAITSTLADVKHTFEKMTTSVTPGTTLPSILSGATSGSVISKSPILTWLLSSLPSGSPPATVSNAPHVMTSSTVEVSKSTFLTSDMISAHPFTNLTTLPSATMSTILTRTIPTPTLGGITTGFPTSLPMSINVTDDIVYISTHPEASSRTTITANPRTVSHPSSFSRKTMSPSTTDHTLSVGAMPLPSSTITSSWNRIPTASSPSTLIIPKPTLDSLLNIMTTTSTVPGASFPLISTGVTYPFTATVSSPISSFFETTWLDSTPSFLSTEASTSPTATKSTVSFYNVEMSFSVFVEEPRIPITSVINEFTENSLNSIFQNSEFSLATLETQIKSRDISEEEMVMDRAILEQREGQEMATISYVPYSCVCQVIIKASSSLASSELMRKIKSKIHGNFTHGNFTQDQLTLLVNCEHVAVKKLEPGNCKADETASKYKGTYKWLLTNPTETAQTRCIKNEDGNATRFCSISINTGKSQWEKPKFKQCKLLQELPDKIVDLANITISDENAEDVAEHILNLINESPALGKEETKIIVSKISDISQCDEISMNLTHVMLQIINVVLEKQNNSASDLHEISNEILRIIERTGHKMEFSGQIANLTVAGLALAVLRGDHTFDGMAFSIHSYEEGTDPEIFLGNVPVGGILASIYLPKSLTERIPLSNLQTILFNFFGQTSLFKTKNVTKALTTYVVSASISDDMFIQNLADPVVITLQHIGGNQNYGQVHCAFWDFENNNGLGGWNSSGCKVKETNVNYTICQCDHLTHFGVLMDLSRSTVDSVNEQILALITYTGCGISSIFLGVAVVTYIAFHKLRKDYPAKILINLCTALLMLNLVFLINSWLSSFQKVGVCITAAVALHYFLLVSFTWMGLEAVHMYLALVKVFNIYIPNYILKFCLVGWGIPAIMVAITVSVKKDLYGTLSPTTPFCWIKDDSIFYISVVAYFCLIFLMNLSMFCTVLVQLNSVKSQIQKTRRKMILHDLKGTMSLTFLLGLTWGFAFFAWGPMRNFFLYLFAIFNTLQGFFIFVFHCVMKESVREQWQIHLCCGWLRLDNSSDGSSRCQIKVGYKQEGLKKIFEHKLLTPSLKSTATSSTFKSLGSAQGTPSEISFPNDDFDKDPYCSSP

SEQ ID NO: 16883 - protein, 2804 aa, Homo sapiens
MDDNSRYWMAFSYITNNALLGREDIDLGLAGDHQQLILYRLGKTFSIRHHLASFQWHTICLIWDGVKGKLELFLNKERILEVTDQPHNLTPHGTLFLGHFLKNESSEVKSMMRSFPGSLYYFQLWDHILENEEFMKCLDGNIVSWEEDVWLVNKIIPTVDRTLRCFVPENMTIQEKSTTVSQQIDMTTPSQITGVKPQNTAHSSTLLSQSIPIFATDYTTISYSNTTSPPLETMTAQKILKTLVDETATFAVDVLSTSSAISLPTQSISIDNTTNSMKKTKSPSSESTKTTKMVEAMATEIFQPPTPSNFLSTSRFTKNSVVSTTSAIKSQSAVTKTTSLFSTIESTSMSTTPCLKQKSTNTGALPISTAGQEFIESTAAGTVPWFTVEKTSPASTHVGTASSFPPEPVLISTAAPVDSVFPRNQTAFPLATTDMKIAFTVHSLTLPTRLIETTPAPRTAETELTSTNFQDVSLPRVEDAMSTSMSKETSSKTFSFLTSFSFTGTESVQTVIDAEATRTALTPEITLASTVAETMLSSTITGRVYTQNTPTADGHLLTLMSTRSASTSKAPESGPTSTTDEAAHLFSSNETIWTSRPDQALLASMNTTTILTFVPNENFTSAFHENTTYTEYLSATTNITPLKASPEGKGTTANDATTARYTTAVSKLTSPWFANFSIVSGTTSITNMPEFKLTTLLLKTIPMSTKPANELPLTPRETVVPSVDIISTLACIQPNFSTEESASETTQTEINGAIVFGGTTTPVPKSATTQRLNATVTRKEATSHYLMRKSTIAAVAEVSPFSTMLEVTDESAQRVTASVTVSSFPDIEKLSTPLDNKTATTEVRESWLLTKLVKTTPRSSYNEMTEMFNFNHTYVAHWTSETSEGISAGSPTSGSTHIFGEPLGASTTRISETSFSTTPTDRTATSLSDGILPPQPTAAHSSATPVPVTHMFSLPVNGSSVVAEETEVTMSEPSTLARAFSTSVLSDVSNLSSTTMTTALVPPLDQTASTTIVIVPTHGDLIRTTSEATVISVRKTSMAVPSLTETPFHSLRLSTPVTAKAETTLFSTSVDTVTPSTHTLVCSKPPPDNIPPASSTHVISTTSTPEATQPISQVEETSTYALSFPYTFSGGGVVASLATGTTETSVVDETTPSHISANKLTTSVNSHISSSATYRVHTPVSIQLVTSTSVLSSDKDQMTISLGKTPRTMEVTEMSPSKNSFISYSRGTPSLEMTDTGFPETTKISSHQTHSPSEIPLGTPSDGNLASSPTSGSTQITPTLTSSNTVGVHIPEMSTSLGKTALPSQALTITTFLCPEKESTSALPAYTPRTVEMIVNSTYVTHSVSYGQDTSFVDTTTSSSTRISNPMDINTTFSHLHSLRTQPEVTSVASFISESTQTFPESLSLSTAGLYNDGFTVLSDRITTAFSVPNVPTMLPRESSMATSTPIYQMSSLPVNVTAFTSKKVSDTPPIVITKSSKTMHPGCLKSPCTATSGPMSEMSSIPVNNSAFTPATVSSDTSTRVGLFSTLLSSVTPRTTMTMQTSTLDVTPVIYAGATSKNKMVSSAFTTEMIEAPSRITPTTFLSPTEPTLPFVKTVPTTIMAGIVTPFVGTTAFSPLSSKSTGAISSIPKTTFSPFLSATQQSSQADEATTLGILSGITNRSLSTVNSGTGVALTDTYSRITVPENMLSPTHADSLHTSFNIQVSPSLTSFKSASGPTKNVKTTTNCFSSNTRKMTSLLEKTSLTNYATSLNTPVSYPPWTPSSATLPSLTSFVYSPHSTEAEISTPKTSPPPTSQMVEFPVLGTRMTSSNTQPLLMTSWNIPTAEGSQFPISTTINVPTSNEMETETLHLVPGPLSTFTASQTGLVSKDVMAMSSIPMSGILPNHGLSENPSLSTSLRAITSTLADVKHTFEKMTTSVTPGTTLPSILSGATSGSVISKSPILTWLLSSLPSGSPPATVSNAPHVMTSSTVEVSKSTFLTSDMISAHPFTNLTTLPSATMSTILTRTIPTPTLGGITTGFPTSLPMSINVTDDIVYISTHPEASSRTTITANPRTVSHPSSFSRKTMSPSTTDHTLSVGAMPLPSSTITSSWNRIPTASSPSTLIIPKPTLDSLLNIMTTTSTVPGASFPLISTGVTYPFTATVSSPISSFFETTWLDSTPSFLSTEASTSPTATKSTEPGNCKADETASKYKGTYKWLLTNPTETAQTRCIKNEDGNATRFCSISINTGKSQWEKPKFKQCKLLQELPDKIVDLANITISDENAEDVAEHILNLINESPALGKEETKIIVSKISDISQCDEISMNLTHVMLQIINVVLEKQNNSASDLHEISNEILRIIERTGHKMEFSGQIANLTVAGLALAVLRGDHTFDGMAFSIHSYEEGTDPETKNVTKALTTYVVSASISDDMFIQNLADPVVITLQHIGGNQNYGQVHCAFWDFENNNGLGGWNSSGCKVKETNVNYTICQCDHLTHFGVLMDLSRSTVDSVNEQILALITYTGCGISSIFLGVAVVTYIAFHKLRKDYPAKILINLCTALLMLNLVFLINSWLSSFQKVGVCITAAVALHYFLLVSFTWMGLEAVHMYLALVKVFNIYIPNYILKFCLVGWGIPAIMVAITVSVKKDLYGTLSPTTPFCWIKDDSIFYISVVAYFCLIFLMNLSMFCTVLVQLNSVKSQIQKTRRKMILHDLKGTMSLTFLLGLTWGFAFFAWGPMRNFFLYLFAIFNTLQDGSSRCQIKVGYKQEGLKKIFEHKLLTPSLKSTATSSTFKSLGSAQGTPSEISFPNAPELSALHVVASEPTTG

SEQ ID NO: 16884 - protein, 2875 aa, Homo sapiens
MKEHIIYQKLYGLILMSSFIFLSVVPENMTIQEKSTTVSQQIDMTTPSQITGVKPQNTAHSSTLLSQSIPIFATDYTTISYSNTTSPPLETMTAQKILKTLVDETATFAVDVLSTSSAISLPTQSISIDNTTNSMKKTKSPSSESTKTTKMVEAMATEIFQPPTPSNFLSTSRFTKNSVVSTTSAIKSQSAVTKTTSLFSTIESTSMSTTPCLKQKSTNTGALPISTAGQEFIESTAAGTVPWFTVEKTSPASTHVGTASSFPPEPVLISTAAPVDSVFPRNQTAFPLATTDMKIAFTVHSLTLPTRLIETTPAPRTAETELTSTNFQDVSLPRVEDAMSTSMSKETSSKTFSFLTSFSFTGTESVQTVIDAEATRTALTPEITLASTVAETMLSSTITGRVYTQNTPTADGHLLTLMSTRSASTSKAPESGPTSTTDEAAHLFSSNETIWTSRPDQALLASMNTTTILTFVPNENFTSAFHENTTYTEYLSATTNITPLKASPEGKGTTANDATTARYTTAVSKLTSPWFANFSIVSGTTSITNMPEFKLTTLLLKTIPMSTKPANELPLTPRETVVPSVDIISTLACIQPNFSTEESASETTQTEINGAIVFGGTTTPVPKSATTQRLNATVTRKEATSHYLMRKSTIAAVAEVSPFSTMLEVTDESAQRVTASVTVSSFPDIEKLSTPLDNKTATTEVRESWLLTKLVKTTPRSSYNEMTEMFNFNHTYVAHWTSETSEGISAGSPTSGSTHIFGEPLGASTTRISETSFSTTPTDRTATSLSDGILPPQPTAAHSSATPVPVTHMFSLPVNGSSVVAEETEVTMSEPSTLARAFSTSVLSDVSNLSSTTMTTALVPPLDQTASTTIVIVPTHGDLIRTTSEATVISVRKTSMAVPSLTETPFHSLRLSTPVTAKAETTLFSTSVDTVTPSTHTLVCSKPPPDNIPPASSTHVISTTSTPEATQPISQVEETSTYALSFPYTFSGGGVVASLATGTTETSVVDETTPSHISANKLTTSVNSHISSSATYRVHTPVSIQLVTSTSVLSSDKDQMTISLGKTPRTMEVTEMSPSKNSFISYSRGTPSLEMTDTGFPETTKISSHQTHSPSEIPLGTPSDGNLASSPTSGSTQITPTLTSSNTVGVHIPEMSTSLGKTALPSQALTITTFLCPEKESTSALPAYTPRTVEMIVNSTYVTHSVSYGQDTSFVDTTTSSSTRISNPMDINTTFSHLHSLRTQPEVTSVASFISESTQTFPESLSLSTAGLYNDGFTVLSDRITTAFSVPNVPTMLPRESSMATSTPIYQMSSLPVNVTAFTSKKVSDTPPIVITKSSKTMHPGCLKSPCTATSGPMSEMSSIPVNNSAFTPATVSSDTSTRVGLFSTLLSSVTPRTTMTMQTSTLDVTPVIYAGATSKNKMVSSAFTTEMIEAPSRITPTTFLSPTEPTLPFVKTVPTTIMAGIVTPFVGTTAFSPLSSKSTGAISSIPKTTFSPFLSATQQSSQADEATTLGILSGITNRSLSTVNSGTGVALTDTYSRITVPENMLSPTHADSLHTSFNIQVSPSLTSFKSASGPTKNVKTTTNCFSSNTRKMTSLLEKTSLTNYATSLNTPVSYPPWTPSSATLPSLTSFVYSPHSTEAEISTPKTSPPPTSQMVEFPVLGTRMTSSNTQPLLMTSWNIPTAEGSQFPISTTINVPTSNEMETETLHLVPGPLSTFTASQTGLVSKDVMAMSSIPMSGILPNHGLSENPSLSTSLRAITSTLADVKHTFEKMTTSVTPGTTLPSILSGATSGSVISKSPILTWLLSSLPSGSPPATVSNAPHVMTSSTVEVSKSTFLTSDMISAHPFTNLTTLPSATMSTILTRTIPTPTLGGITTGFPTSLPMSINVTDDIVYISTHPEASSRTTITANPRTVSHPSSFSRKTMSPSTTDHTLSVGAMPLPSSTITSSWNRIPTASSPSTLIIPKPTLDSLLNIMTTTSTVPGASFPLISTGVTYPFTATVSSPISSFFETTWLDSTPSFLSTEASTSPTATKSTVSFYNVEMSFSVFVEEPRIPITSVINEFTENSLNSIFQNSEFSLATLETQIKSRDISEEEMVMDRAILEQREGQEMATISYVPYSCVCQVIIKASSSLASSELMRKIKSKIHGNFTHGNFTQDQLTLLVNCEHVAVKKLEPGNCKADETASKYKGTYKWLLTNPTETAQTRCIKNEDGNATRFCSISINTGKSQWEKPKFKQCKLLQELPDKIVDLANITISDENAEDVAEHILNLINESPALGKEETKIIVSKISDISQCDEISMNLTHVMLQIINVVLEKQNNSASDLHEISNEILRIIERTGHKMEFSGQIANLTVAGLALAVLRGDHTFDGMAFSIHSYEEGTDPEIFLGNVPVGGILASIYLPKSLTERIPLSNLQTILFNFFGQTSLFKTKNVTKALTTYVVSASISDDMFIQNLADPVVITLQHIGGNQNYGQVHCAFWDFENNNGLGGWNSSGCKVKETNVNYTICQCDHLTHFGVLMDLSRSTVDSVNEQILALITYTGCGISSIFLGVAVVTYIAFHKLRKDYPAKILINLCTALLMLNLVFLINSWLSSFQKVGVCITAAVALHYFLLVSFTWMGLEAVHMYLALVKVFNIYIPNYILKFCLVGWGIPAIMVAITVSVKKDLYGTLSPTTPFCWIKDDSIFYISVVAYFCLIFLMNLSMFCTVLVQLNSVKSQIQKTRRKMILHDLKGTMSLTFLLGLTWGFAFFAWGPMRNFFLYLFAIFNTLQGFFIFVFHCVMKESVREQWQIHLCCGWLRLDNSSDGSSRCQIKVGYKQEGLKKIFEHKLLTPSLKSTATSSTFKSLGSAQGTPSEISFPNDDFDKDPYCSSP

SEQ ID NO: 16885 - protein, 514 aa, Homo sapiens
MTLIWRHLLRPLCLVTSAPRILEMHPFLSLGTSRTSVTKLSLHTKPRMPPCDFMPERYQSLGYNRVLEIHKEHLSPVVTAYFQKPLLLHQGHMEWLFDAEGSRYLDFFSGIVTVSVGHCHPKVNAVAQKQLGRLWHTSTVFFHPPMHEYAEKLAALLPEPLKVIFLVNSGSEANELAMLMARAHSNNIDIISFRGAYHGCSPYTLGLTNVGTYKMELPGGTGCQPTMCPDVFRGPWGGSHCRDSPVQTIRKCSCAPDCCQAKDQYIEQFKDTLSTSVAKSIAGFFAEPIQGVNGVVQYPKGFLKEAFELVRARGGVCIADEVQTGFGRLGSHFWGFQTHDVLPDIVTMAKGIGNGFPMAAVITTPEIAKSLAKCLQHFNTFGGNPMACAIGSAVLEVIKEENLQENSQEVGTYMLLKFAKLRDEFEIVGDVRGKGLMIGIEMVQDKISCRPLPREEVNQIHEDCKHMGLLVGRGSIFSQTFRIAPSMCITKPEVDFAVEVFRSALTQHMERRAK

SEQ ID NO: 16886 - protein, 439 aa, Homo sapiens
MTLIWRHLLRPLCLVTSAPRILEMHPFLSLGTSRTSVTKLSLHTKPRMPPCDFMPERYQSLGYNRVLEIHKEHLSPVVTAYFQKPLLLHQGHMEWLFDAEGSRYLDFFSGIVTVSVGHCHPKVNAVAQKQLGRLWHTSTVFFHPPMHEYAEKLAALLPEPLKVIFLVNSGSEANELAMLMARAHSNNIDIISFRGAYHGCSPYTLGLTNVGTYKMELPGGTGCQPTMCPDVFRGPWGGSHCRDSPVQTIRKCSCAPDCCQAKDQYIEQFKDTLSTSVAKSIAGFFAEPIQGVNGVVQYPKGFLKEAFELVRARGGVCIADEVIKEENLQENSQEVGTYMLLKFAKLRDEFEIVGDVRGKGLMIGIEMVQDKISCRPLPREEVNQIHEDCKHMGLLVGRGSIFSQTFRIAPSMCITKPEVDFAVEVFRSALTQHMERRAK

SEQ ID NO: 16887 - protein, 330 aa, Homo sapiens
MADIIARLREDGIQKRVIQEGRGELPDFQDGTKATFHYRTLHSDDEGTVLDDSRARGKPMELIIGKKFKLPVWETIVCTMREGEIAQFLCDIKHVVLYPLVAKSLRNIAVGKDPLEGQRHCCGVAQMREHSSLGHADLDALQQNPQPLIFHMEMLKVESPGTYQQDPWAMTDEEKAKAVPLIHQEGNRLYREGHVKEAAAKYYDAIACLKNLQMKEQPGSPEWIQLDQQITPLLLNYCQCKLVVEEYYEVLDHCSSILNKYDDNVKAYFKRGKAHAAVWNAQEAQADFAKVLELDPALAPVVSRELQALEARIRQKDEEDKARFRGIFSH

SEQ ID NO: 16888 - protein, 906 aa, Homo sapiens
MQAAVAVSVPFLLLCVLGTCPPARCGQAGDASLMELEKRKENRFVERQSIVPLRLIYRSGGEDESRHDALDTRVRGDLGGPQLTHVDQASFQVDAFGTSFILDVVLNHDLLSSEYIERHIEHGGKTVEVKGGEHCYYQGHIRGNPDSFVALSTCHGLHGMFYDGNHTYLIEPEENDTTQEDFHFHSVYKSRLFEFSLDDLPSEFQQVNITPSKFILKPRPKRSKRQLRRYPRNVEEETKYIELMIVNDHLMFKKHRLSVVHTNTYAKSVVNMADLIYKDQLKTRIVLVAMETWATDNKFAISENPLITLREFMKYRRDFIKEKSDAVHLFSGSQFESSRSGAAYIGGICSLLKGGGVNEFGKTDLMAVTLAQSLAHNIGIISDKRKLASGECKCEDTWSGCIMGDTGYYLPKKFTQCNIEEYHDFLNSGGGACLFNKPSKLLDPPECGNGFIETGEECDCGTPAECVLEGAECCKKCTLTQDSQCSDGLCCKKCKFQPMGTVCREAVNDCDIRETCSGNSSQCAPNIHKMDGYSCDGVQGICFGGRCKTRDRQCKYIWGQKVTASDKYCYEKLNIEGTEKGNCGKDKDTWIQCNKRDVLCGYLLCTNIGNIPRLGELDGEITSTLVVQQGRTLNCSGGHVKLEEDVDLGYVEDGTPCGPQMMCLEHRCLPVASFNFSTCLSSKEGTICSGNGVCSNELKCVCNRHWIGSDCNTYFPHNDDAKTGITLSGNGVAGTNIIIGIIAGTILVLALILGITAWGYKNYREQRQLPQGDYVKKPGDGDSFYSDIPPGVSTNSASSSKKRSNGLSHSWSERIPDTKHISDICENGRPRSNSWQGNLGGNKKKIRGKRFRPRSNSTETLSPAKSPSSSTGSIASSRKYPYPMPPLPDEDKKVNRQSARLWETSI

SEQ ID NO: 16889 - protein, 899 aa, Homo sapiens
MQAAVAVSVPFLLLCVLGTCPPARCGQAGDASLMELEKRKENRFVERQSIVPLRLIYRSGGEDESRHDALDTRVRGDLGGPQLTHVDQASFQVDAFGTSFILDVVLNHDLLSSEYIERHIEHGGKTVEVKGGEHCYYQGHIRGNPDSFVALSTCHGLHGMFYDGNHTYLIEPEENDTTQEDFHFHSVYKSRLFEFSLDDLPSEFQQVNITPSKFILKPRPKRSKRQLRRYPRNVEEETKYIELMIVNDHLMFKKHRLSVVHTNTYAKSVVNMADLIYKDQLKTRIVLVAMETWATDNKFAISENPLITLREFMKYRRDFIKEKSDAVHLFSGSQFESSRSGAAYIGGICSLLKGGGVNEFGKTDLMAVTLAQSLAHNIGIISDKRKLASGECKCEDTWSGCIMGDTGYYLPKKFTQCNIEEYHDFLNSGGGACLFNKPSKLLDPPECGNGFIETGEECDCGTPAECVLEGAECCKKCTLTQDSQCSDGLCCKKCKFQPMGTVCREAVNDCDIRETCSGNSSQCAPNIHKMDGYSCDGVQGICFGGRCKTRDRQCKYIWGQKVTASDKYCYEKLNIEGTEKGNCGKDKDTWIQCNKRDVLCGYLLCTNIGNIPRLGELDGEITSTLVVQQGRTLNCSGGHVKLEEDVDLGYVEDGTPCGPQMMCLEHRCLPVASFNFSTCLSSKEGTICSGNGVCSNELKCVCNRHWIGSDCNTYFPHNDDAKTGITLSGNGVAGTNIIIGIIAGTILVLALILGITAWGYKNYREQRSNGLSHSWSERIPDTKHISDICENGRPRSNSWQGNLGGNKKKIRGKRFRPRSNSTEYLNPWFKRDYNVAKWVEDVNKNTEGPYFRTLSPAKSPSSSTGSIASSRKYPYPMPPLPDEDKKVNRQSARLWETSI

SEQ ID NO: 16890 - protein, 859 aa, Homo sapiens
MQAAVAVSVPFLLLCVLGTCPPARCGQAGDASLMELEKRKENRFVERQSIVPLRLIYRSGGEDESRHDALDTRVRGDLGGPQLTHVDQASFQVDAFGTSFILDVVLNHDLLSSEYIERHIEHGGKTVEVKGGEHCYYQGHIRGNPDSFVALSTCHGLHGMFYDGNHTYLIEPEENDTTQEDFHFHSVYKSRLFEFSLDDLPSEFQQVNITPSKFILKPRPKRSKRQLRRYPRNVEEETKYIELMIVNDHLMFKKHRLSVVHTNTYAKSVVNMADLIYKDQLKTRIVLVAMETWATDNKFAISENPLITLREFMKYRRDFIKEKSDAVHLFSGSQFESSRSGAAYIGGICSLLKGGGVNEFGKTDLMAVTLAQSLAHNIGIISDKRKLASGECKCEDTWSGCIMGDTGYYLPKKFTQCNIEEYHDFLNSGGGACLFNKPSKLLDPPECGNGFIETGEECDCGTPAECVLEGAECCKKCTLTQDSQCSDGLCCKKCKFQPMGTVCREAVNDCDIRETCSGNSSQCAPNIHKMDGYSCDGVQGICFGGRCKTRDRQCKYIWGQKVTASDKYCYEKLNIEGTEKGNCGKDKDTWIQCNKRDVLCGYLLCTNIGNIPRLGELDGEITSTLVVQQGRTLNCSGGHVKLEEDVDLGYVEDGTPCGPQMMCLEHRCLPVASFNFSTCLSSKEGTICSGNGVCSNELKCVCNRHWIGSDCNTYFPHNDDAKTGITLSGNGVAGTNIIIGIIAGTILVLALILGITAWGYKNYREQRQLPQGDYVKKPGDGDSFYSDIPPGVSTNSASSSKKRSNGLSHSWSERIPDTKHISDICENGRPRSNSWQGNLGGNKKKIRGKRFRPRSNSTE

SEQ ID NO: 16891 - protein, 823 aa, Homo sapiens
MQAAVAVSVPFLLLCVLGTCPPARCGQAGDASLMELEKRKENRFVERQSIVPLRLIYRSGGEDESRHDALDTRVRGDLGGPQLTHVDQASFQVDAFGTSFILDVVLNHDLLSSEYIERHIEHGGKTVEVKGGEHCYYQGHIRGNPDSFVALSTCHGLHGMFYDGNHTYLIEPEENDTTQEDFHFHSVYKSRLFEFSLDDLPSEFQQVNITPSKFILKPRPKRSKRQLRRYPRNVEEETKYIELMIVNDHLMFKKHRLSVVHTNTYAKSVVNMADLIYKDQLKTRIVLVAMETWATDNKFAISENPLITLREFMKYRRDFIKEKSDAVHLFSGSQFESSRSGAAYIGGICSLLKGGGVNEFGKTDLMAVTLAQSLAHNIGIISDKRKLASGECKCEDTWSGCIMGDTGYYLPKKFTQCNIEEYHDFLNSGGGACLFNKPSKLLDPPECGNGFIETGEECDCGTPAECVLEGAECCKKCTLTQDSQCSDGLCCKKCKFQPMGTVCREAVNDCDIRETCSGNSSQCAPNIHKMDGYSCDGVQGICFGGRCKTRDRQCKYIWGQKVTASDKYCYEKLNIEGTEKGNCGKDKDTWIQCNKRDVLCGYLLCTNIGNIPRLGELDGEITSTLVVQQGRTLNCSGGHVKLEEDVDLGYVEDGTPCGPQMMCLEHRCLPVASFNFSTCLSSKEGTICSGNGVCSNELKCVCNRHWIGSDCNTYFPHNDDAKTGITLSGNGVAGTNIIIGIIAGTILVLALILGITAWGYKNYREQRSNGLSHSWSERIPDTKHISDICENGRPRSNSWQGNLGGNKKKIRGKRFRPRSNSTE

SEQ ID NO: 16892 - protein, 870 aa, Homo sapiens
MQAAVAVSVPFLLLCVLGTCPPARCGQAGDASLMELEKRKENRFVERQSIVPLRLIYRSGGEDESRHDALDTRVRGDLGGPQLTHVDQASFQVDAFGTSFILDVVLNHDLLSSEYIERHIEHGGKTVEVKGGEHCYYQGHIRGNPDSFVALSTCHGLHGMFYDGNHTYLIEPEENDTTQEDFHFHSVYKSRLFEFSLDDLPSEFQQVNITPSKFILKPRPKRSKRQLRRYPRNVEEETKYIELMIVNDHLMFKKHRLSVVHTNTYAKSVVNMADLIYKDQLKTRIVLVAMETWATDNKFAISENPLITLREFMKYRRDFIKEKSDAVHLFSGSQFESSRSGAAYIGGICSLLKGGGVNEFGKTDLMAVTLAQSLAHNIGIISDKRKLASGECKCEDTWSGCIMGDTGYYLPKKFTQCNIEEYHDFLNSGGGACLFNKPSKLLDPPECGNGFIETGEECDCGTPAECVLEGAECCKKCTLTQDSQCSDGLCCKKCKFQPMGTVCREAVNDCDIRETCSGNSSQCAPNIHKMDGYSCDGVQGICFGGRCKTRDRQCKYIWGQKVTASDKYCYEKLNIEGTEKGNCGKDKDTWIQCNKRDVLCGYLLCTNIGNIPRLGELDGEITSTLVVQQGRTLNCSGGHVKLEEDVDLGYVEDGTPCGPQMMCLEHRCLPVASFNFSTCLSSKEGTICSGNGVCSNELKCVCNRHWIGSDCNTYFPHNDDAKTGITLSGNGVAGTNIIIGIIAGTILVLALILGITAWGYKNYREQRSNGLSHSWSERIPDTKHISDICENGRPRSNSWQGNLGGNKKKIRGKRFRPRSNSTETLSPAKSPSSSTGSIASSRKYPYPMPPLPDEDKKVNRQSARLWETSI

SEQ ID NO: 16893 - protein, 503 aa, Homo sapiens
MTLGSPRKGLLMLLMALVTQGDPVKPSRGPLVTCTCESPHCKGPTCRGAWCTVVLVREEGRHPQEHRGCGNLHRELCRGRPTEFVNHYCCDSHLCNHNVSLVLEATQPPSEQPGTDGQLALILGPVLALLALVALGVLGLWHVRRRQEKQRGLHSELGESSLILKASEQGDSMLGDLLDSDCTTGSGSGLPFLVQRTVARQVALVECVGKGRYGEVWRGLWHGESVAVKIFSSRDEQSWFRETEIYNTVLLRHDNILGFIASDMTSRNSSTQLWLITHYHEHGSLYDFLQRQTLEPHLALRLAVSAACGLAHLHVEIFGTQGKPAIAHRDFKSRNVLVKSNLQCCIADLGLAVMHSQGSDYLDIGNNPRVGTKRYMAPEVLDEQIRTDCFESYKWTDIWAFGLVLWEIARRTIVNGIVEDYRPPFYDVVPNDPSFEDMKKVVCVDQQTPTIPNRLAADPVLSGLAQMMRECWYPNPSARLTALRIKKTLQKISNSPEKPKVIQ

SEQ ID NO: 16894 - protein, 1603 aa, Homo sapiens
MRVKPQGLVVTSSAVCSSPDYLREPKYYPGGPPTPRPLLPTRPPASPPDKAFSTHAFSENPRPPPRRDPSTRRPPVLAKGDDPLPPRAARPVSQARCPTPVGDGSSSRRCWDNGRVNLRPVVQLIDIMKDLTRLSQDLQHSGVHLDCGGLRLSRPPAPPPGDLQYSFFSSPSLANSIRSPEERATPHAKSERPSHPLYEPEPEPRDSPQPGQGHSPGATAAATGLPPEPEPDSTDYSELADADILSELASLTCPEAQLLEAQALEPPSPEPEPQLLDPQPRFLDPQALEPLGEALELPPLQPLADPLGLPGLALQALDTLPDSLESQLLDPQALDPLPKLLDVPGRRLEPQQPLGHCPLAEPLRLDLCSPHGPPGPEGHPKYALRRTDRPKILCRRRKAGRGRKADAGPEGRLLPLPMPTGLVAALAEPPPPPPPPPPALPGPGPVSVPELKPESSQTPVVSTRKGKCRGVRRMVVKMAKIPVSLGRRNKTTYKVSSLSSSLSVEGKELGLRVSAEPTPLLKMKNNGRNVVVVFPPGEMPIILKRKRGRPPKNLLLGPGKPKEPAVVAAEAATVAAATMAMPEVKKRRRRKQKLASPQPSYAADANDSKAEYSDVLAKLAFLNRQSQCAGRCSPPRCWTPSEPESVHQAPDTQSISHFLHRVQGFRRRGGKAGGFGGRGGGHAAKSARCSFSDFFEGIGKKKKVVAVAAAGVGGPGLTELGHPRKRGRGEVDAVTGKPKRKRRSRKNGTLFPEQVPSGPGFGEAGAEWAGDKGGGWAPHHGHPGGQAGRNCGFQGTEARAFASTGLESGASGRGSYYSTGAPSGQTELSQERQNLFTGYFRSLLDSDDSSDLLDFALSASRPESRKASGTYAGPPTSALPAQRGLATFPSRGAKASPVAVGSSGAGADPSFQPVLSARQTFPPGRAASYGLTPAASDCRAAETFPKLVPPPSAMARSPTTHPPANTYLPQYGGYGAGQSVFAPTKPFTGQDCANSKDCSFAYGSGNSLPASPSSAHSAGYAPPPTGGPCLPPSKASFFSSSEGAPFSGSAPTPLRCDSRASTVSPGGYMVPKGTTASATSAASAASSSSSSFQPSPENCRQFAGASQWPFRQGYGGLDWASEAFSQLYNPSFDCHVSEPNVILDISNYTPQKVKQQTAVSETFSESSSDSTQFNQPVGGGGFRRANSEASSSEGQSSLSSLEKLMMDWNEASSAPGYNWNQSVLFQSSSKPGRGRRKKVDLFEASHLGFPTSASAAASGYPSKRSTGPRQPRGGRGGGACSAKKERGGAAAKAKFIPKPQPVNPLFQDSPDLGLDYYSGDSSMSPLPSQSRAFGVGERDPCDFIGPYSMNPSTPSDGTFGQGFHCDSPSLGAPELDGKHFPPLAHPPTVFDAGLQKAYSPTCSPTLGFKEELRPPPTKLAACEPLKHGLQGASLGHAAAAQAHLSCRDLPLGQPHYDSPSCKGTAYWYPPGSAARSPPYEGKVGTGLLADFLGRTEAACLSAPHLASPPATPKADKEPLEMARPPGPPRGPAAAAAGYGCPLLSDLTLSPVPRDSLLPLQDTAYRYPGFMPQAHPGLGGGPKSGFLGPMAEPHPEDTFTVTSL

SEQ ID NO: 16895 - protein, 832 aa, Homo sapiens
MKPPGSSSRQPPLAGCSLAGASCGPQRGPAGSVPASAPARTPPCRLLLVLLLLPPLAASSRPRAWGAAAPSAPHWNETAEKNLGVLADEDNTLQQNSSSNISYSNAMQKEITLPSRLIYYINQDSESPYHVLDTKARHQQKHNKAVHLAQASFQIEAFGSKFILDLILNNGLLSSDYVEIHYENGKPQYSKGGEHCYYHGSIRGVKDSKVALSTCNGLHGMFEDDTFVYMIEPLELVHDEKSTGRPHIIQKTLAGQYSKQMKNLTMERGDQWPFLSELQWLKRRKRAVNPSRGIFEEMKYLELMIVNDHKTYKKHRSSHAHTNNFAKSVVNLVDSIYKEQLNTRVVLVAVETWTEKDQIDITTNPVQMLHEFSKYRQRIKQHADAVHLISRVTFHYKRSSLSYFGGVCSRTRGVGVNEYGLPMAVAQVLSQSLAQNLGIQWEPSSRKPKCDCTESWGGCIMEETGVSHSRKFSKCSILEYRDFLQRGGGACLFNRPTKLFEPTECGNGYVEAGEECDCGFHVECYGLCCKKCSLSNGAHCSDGPCCNNTSCLFQPRGYECRDAVNECDITEYCTGDSGQCPPNLHKQDGYACNQNQGRCYNGECKTRDNQCQYIWGTKAAGSDKFCYEKLNTEGTEKGNCGKDGDRWIQCSKHDVFCGFLLCTNLTRAPRIGQLQGEIIPTSFYHQGRVIDCSGAHVVLDDDTDVGYVEDGTPCGPSMMCLDRKCLQIQALNMSSCPLDSKGKVCSGHGVCSNEATCICDFTWAGTDCSIRDPVRNLHPPKDEGPKGPSATNLIIGSIAGAILVAAIVLGGTGWGFKNVKKRRFDPTQQGPI

SEQ ID NO: 16896 - protein, 832 aa, Homo sapiens
MKPPGSSSRQPPLAGCSLAGASCGPQRGPAGSVPASAPARTPPCRLLLVLLLLPPLAASSRPRAWGAAAPSAPHWNETAEKNLGVLADEDNTLQQNSSSNISYSNAMQKEITLPSRLIYYINQDSESPYHVLDTKARHQQKHNKAVHLAQASFQIEAFGSKFILDLILNNGLLSSDYVEIHYENGKPQYSKGGEHCYYHGSIRGVKDSKVALSTCNGLHGMFEDDTFVYMIEPLELVHDEKSTGRPHIIQKTLAGQYSKQMKNLTMERGDQWPFLSELQWLKRRKRAVNPSRGIFEEMKYLELMIVNDHKTYKKHRSSHAHTNNFAKSVVNLVDSIYKEQLNTRVVLVAVETWTEKDQIDITTNPVQMLHEFSKYRQRIKQHADAVHLISRVTFHYKRSSLSYFGGVCSRTRGVGVNEYGLPMAVAQVLSQSLAQNLGIQWEPSSRKPKCDCTESWGGCIMEETGVSHSRKFSKCSILEYRDFLQRGGGACLFNRPTKLFEPTECGNGYVEAGEECDCGFHVECYGLCCKKCSLSNGAHCSDGPCCNNTSCLFQPRGYECRDAVNECDITEYCTGDSGQCPPNLHKQDGYACNQNQGRCYNGECKTRDNQCQYIWGTKAAGSDKFCYEKLNTEGTEKGNCGKDGDRWIQCSKHDVFCGFLLCTNLTRAPRIGQLQGEIIPTSFYHQGRVIDCSGAHVVLDDDTDVGYVEDGTPCGPSMMCLDRKCLQIQALNMSSCPLDSKGKVCSGHGVCSNEATCICDFTWAGTDCSIRDPVRNLHPPKDEGPKVNMATSRLIGAVAGTLLALGVIFGGTGWGIENVKKRRFDPTQQGPI

SEQ ID NO: 16897 - protein, 832 aa, Homo sapiens
MKPPGSSSRQPPLAGCSLAGASCGPQRGPAGSVPASAPARTPPCRLLLVLLLLPPLAASSRPRAWGAAAPSAPHWNETAEKNLGVLADEDNTLQQNSSSNISYSNAMQKEITLPSRLIYYINQDSESPYHVLDTKARHQQKHNKAVHLAQASFQIEAFGSKFILDLILNNGLLSSDYVEIHYENGKPQYSKGGEHCYYHGSIRGVKDSKVALSTCNGLHGMFEDDTFVYMIEPLELVHDEKSTGRPHIIQKTLAGQYSKQMKNLTMERGDQWPFLSELQWLKRRKRAVNPSRGIFEEMKYLELMIVNDHKTYKKHRSSHAHTNNFAKSVVNLVDSIYKEQLNTRVVLVAVETWTEKDQIDITTNPVQMLHEFSKYRQRIKQHADAVHLISRVTFHYKRSSLSYFGGVCSRTRGVGVNEYGLPMAVAQVLSQSLAQNLGIQWEPSSRKPKCDCTESWGGCIMEETGVSHSRKFSKCSILEYRDFLQRGGGACLFNRPTKLFEPTECGNGYVEAGEECDCGFHVECYGLCCKKCSLSNGAHCSDGPCCNNTSCLFQPRGYECRDAVNECDITEYCTGDSGQCPPNLHKQDGYACNQNQGRCYNGECKTRDNQCQYIWGTKAAGSDKFCYEKLNTEGTEKGNCGKDGDRWIQCSKHDVFCGFLLCTNLTRAPRIGQLQGEIIPTSFYHQGRVIDCSGAHVVLDDDTDVGYVEDGTPCGPSMMCLDRKCLQIQALNMSSCPLDSKGKVCSGHGVCSNEATCICDFTWAGTDCSIRDPVRNLHPPKDEGPKEMSRREGSILLSKAPSESAALDGHRLALLDSGYDILAAVLLELLSL

SEQ ID NO: 16898 - protein, 152 aa, Homo sapiens
MRGPGHPLLLGLLLVLGAAGRGRGGAEPREPADGQALLRLVVELVQELRKHHSAEHKGLQLLGRDCALGRAEAAGLGPSPEQRVEIVPRDLRMKDKFLKHLTGPLYFSPKCSKHFHRLYHNTRDCTIPAYYKRCARLLTRLAVSPVCMEDKQ

SEQ ID NO: 16899 - protein, 91 aa, Homo sapiens
MRGPGHPLLLGLLLVLGPSPEQRVEIVPRDLRMKDKFLKHLTGPLYFSPKCSKHFHRLYHNTRDCTIPAYYKRCARLLTRLAVSPVCMEDK

SEQ ID NO: 16900 - protein, 5890 aa, Homo sapiens
MEKEETTRELLLPNWQGSGSHGLTIAQRDDGVFVQEVTQNSPAARTGVVKEGDQIVGATIYFDNLQSGEVTQLLNTMGHHTVGLKLHRKGDRSPEPGQTWTREVFSSCSSEVVLSGDDEEYQRIYTTKIKPRLKSEDGVEGDLGETQSRTITVTRRVTAYTVDVTGREGAKDIDISSPEFKIKIPRHELTEISNVDVETQSGKTVIRLPSGSGAASPTGSAVDIRAGAISASGPELQGAGHSKLQVTMPGIKVGGSGVNVNAKGLDLGGRGGVQVPAVDISSSLGGRAVEVQGPSLESGDHGKIKFPTMKVPKFGVSTGREGQTPKAGLRVSAPEVSVGHKGGKPGLTIQAPQLEVSVPSANIEGLEGKLKGPQITGPSLEGDLGLKGAKPQGHIGVDASAPQIGGSITGPSVEVQAPDIDVQGPGSKLNVPKMKVPKFSVSGAKGEETGIDVTLPTGEVTVPGVSGDVSLPEIATGGLEGKMKGTKVKTPEMIIQKPKISMQDVDLSLGSPKLKGDIKVSAPGVQGDVKGPQVALKGSRVDIETPNLEGTLTGPRLGSPSGKTGTCRISMSEVDLNVAAPKVKGGVDVTLPRVEGKVKVPEVDVRGPKVDVSAPDVEAHGPEWNLKMPKMKMPTFSTPGAKGEGPDVHMTLPKGDISISGPKVNVEAPDVNLEGLGGKLKGPDVKLPDMSVKTPKISMPDVDLHVKGTKVKGEYDVTVPKLEGELKGPKVDIDAPDVDVHGPDWHLKMPKMKMPKFSVPGFKAEGPEVDVNLPKADVDISGPKIDVTAPDVSIEEPEGKLKGPKFKMPEMNIKVPKISMPDVDLHLKGPNVKGEYDVTMPKVESEIKVPDVELKSAKMDIDVPDVEVQGPDWHLKMPKMKMPKFSMPGFKAEGPEVDVNLPKADVDISGPKVGVEVPDVNIEGPEGKLKGPKFKMPEMNIKAPKISMPDVDLHMKGPKVKGEYDMTVPKLEGDLKGPKVDVSAPDVEMQGPDWNLKMPKIKMPKFSMPSLKGEGPEFDVNLSKANVDISAPKVDTNAPDLSLEGPEGKLKGPKFKMPEMHFRAPKMSLPDVDLDLKGPKMKGNVDISAPKIEGEMQVPDVDIRGPKVDIKAPDVEGQGLDWSLKIPKMKMPKFSMPSLKGEGPEVDVNLPKADVVVSGPKVDIEAPDVSLEGPEGKLKGPKFKMPEMHFKTPKISMPDVDLHLKGPKVKGDVDVSVPKVEGEMKVPDVEIKGPKMDIDAPDVEVQGPDWHLKMPKMKMPKFSMPGFKGEGREVDVNLPKADIDVSGPKVDVEVPDVSLEGPEGKLKGPKFKMPEMHFKAPKISMPDVDLNLKGPKLKGDVDVSLPEVEGEMKVPDVDIKGPKVDISAPDVDVHGPDWHLKMPKVKMPKFSMPGFKGEGPEVDVKLPKADVDVSGPKMDAEVPDVNIEGPDAKLKGPKFKMPEMSIKPQKISIPDVGLHLKGPKMKGDYDVTVPKVEGEIKAPDVDIKGPKVDINAPDVEVHGPDWHLKMPKVKMPKFSMPGFKGEGPEVDMNLPKADLGVSGPKVDIDVPDVNLEAPEGKLKGPKFKMPSMNIQTHKISMPDVGLNLKAPKLKTDVDVSLPKVEGDLKGPEIDVKAPKMDVNVGDIDIEGPEGKLKGPKFKMPEMHFKAPKISMPDVDLHLKGPKVKGDMDVSVPKVEGEMKVPDVDIKGPKVDIDAPDVEVHDPDWHLKMPKMKMPKFSMPGFKAEGPEVDVNLPKADIDVSGPSVDTDAPDLDIEGPEGKLKGSKFKMPKLNIKAPKVSMPDVDLNLKGPKLKGEIDASVPELEGDLRGPQVDVKGPFVEAEVPDVDLECPDAKLKGPKFKMPEMHFKAPKISMPDVDLHLKGPKVKGDADVSVPKLEGDLTGPSVGVEVPDVELECPDAKLKGPKFKMPDMHFKAPKISMPDVDLHLKGPKVKGDVDVSVPKLEGDLTGPSVGVEVPDVELECPDAKLKGPKFKMPEMHFKTPKISMPDVDLHLKGPKVKGDMDVSVPKVEGEMKVPDVDIKGPKMDIDAPDVDVHGPDWHLKMPKMKMPKFSMPGFKAEGPEVDVNLPKADVVVSGPKVDVEVPDVSLEGPEGKLKGPKLKMPEMHFKAPKISMPDVDLHLKGPKVKGDVDVSLPKLEGDLTGPSVDVEVPDVELECPDAKLKGPKFKMPEMHFKTPKISMPDVNLNLKGPKVKGDMDVSVPKVEGEMKVPDVDIRGPKVDIDAPDVDVHGPDWHLKMPKMKMPKFSMPGFKGEGPEVDVNLPKADVDVSGPKVDVEVPDVSLEGPEGKLKGPKFKMPEMHFKTPKISMPDVDFNLKGPKIKGDVDVSAPKLEGELKGPELDVKGPKLDADMPEVAVEGPNGKWKTPKFKMPDMHFKAPKISMPDLDLHLKSPKAKGEVDVDVPKLEGDLKGPHVDVSGPDIDIEGPEGKLKGPKFKMPDMHFKAPNISMPDVDLNLKGPKIKGDVDVSVPEVEGKLEVPDMNIRGPKVDVNAPDVQAPDWHLKMPKMKMPKFSMPGFKAEGPEVDVNLPKADVDISGPKVDIEGPDVNIEGPEGKLKGPKLKMPEMNIKAPKISMPDFDLHLKGPKVKGDVDVSLPKVEGDLKGPEVDIKGPKVDINAPDVGVQGPDWHLKMPKVKMPKFSMPGFKGEGPDGDVKLPKADIDVSGPKVDIEGPDVNIEGPEGKLKGPKFKMPEMNIKAPKISMPDIDLNLKGPKVKGDVDVSLPKVEGDLKGPEVDIKGPKVDIDAPDVDVHGPDWHLKMPKIKMPKISMPGFKGEGPDVDVNLPKADIDVSGPKVDVECPDVNIEGPEGKWKSPKFKMPEMHFKTPKISMPDIDLNLTGPKIKGDVDVTGPKVEGDLKGPEVDLKGPKVDIDVPDVNVQGPDWHLKMPKMKMPKFSMPGFKAEGPEVDVNLPKADVDVSGPKVDVEGPDVNIEGPEGKLKGPKFKMPEMNIKAPKIPMPDFDLHLKGPKVKGDVDISLPKVEGDLKGPEVDIRGPQVDIDVPDVGVQGPDWHLKMPKVKMPKFSMPGFKGEGPDVDVNLPKADLDVSGPKVDIDVPDVNIEGPEGKLKGPKFKMPEMNIKAPKISMPDIDLNLKGPKVKGDMDVSLPKVEGDMKVPDVDIKGPKVDINAPDVDVQGPDWHLKMPKIKMPKISMPGFKGEGPEVDVNLPKADLDVSGPKVDVDVPDVNIEGPDAKLKGPKFKMPEMNIKAPKISMPDLDLNLKGPKMKGEVDVSLANVEGDLKGPALDIKGPKIDVDAPDIDIHGPDAKLKGPKLKMPDMHVNMPKISMPEIDLNLKGSKLKGDVDVSGPKLEGDIKAPSLDIKGPEVDVSGPKLNIEGKSKKSRFKLPKFNFSGSKVQTPEVDVKGKKPDIDITGPKVDINAPDVEVQGKVKGSKFKMPFLSISSPKVSMPDVELNLKSPKVKGDLDIAGPNLEGDFKGPKVDIKAPEVNLNAPDVDVHGPDWNLKMPKMKMPKFSVSGLKAEGPDVAVDLPKGDINIEGPSMNIEGPDLNVEGPEGGLKGPKFKMPDMNIKAPKISMPDIDLNLKGPKVKGDVDISLPKLEGDLKGPEVDIKGPKVDINAPDVDVHGPDWHLKMPKVKMPKFSMPGFKGEGPEVDVTLPKADIDISGPNVDVDVPDVNIEGPDAKLKGPKFKMPEMNIKAPKISMPDFDLNLKGPKMKGDVVVSLPKVEGDLKGPEVDIKGPKVDIDTPDINIEGSEGKFKGPKFKIPEMHLKAPKISMPDIDLNLKGPKVKGDVDVSLPKMEGDLKGPEVDIKGPKVDINAPDVDVQGPDWHLKMPKVKMPKFSMPGFKGEGPDVDVNLPKADLDVSGPKVDIDVPDVNIEGPEGKLKGPKFKMPEMNIKAPKISMPDIDLNLKGPKVKGDMDVSLPKVEGDMQVPDLDIKGPKVDINAPDVDVRGPDWHLKMPKIKMPKISMPGFKGEGPEVDVNLPKADLDVSGPKVDVDVPDVNIEGPDAKLKGPKFKMPEMNIKAPKISMPDFDLHLKGPKVKGDVDVSLPKMEGDLKAPEVDIKGPKVDIDAPDVDVHGPDWHLKMPKVKMPKFSMPGFKGEGPEVDVNLPKADIDVSGPKVDIDTPDIDIHGPEGKLKGPKFKMPDLHLKAPKISMPEVDLNLKGPKMKGDVDVSLPKVEGDLKGPEVDIKGPKVDIDVPDVDVQGPDWHLKMPKVKMPKFSMPGFKGEGPDVDVNLPKADLDVSGPKVDIDVPDVNIEGPDAKLKGPKFKMPEMNIKAPKISMPDFDLHLKGPKVKGDVDVSLPKVEGDLKGPEVDIKGPKVDIDAPDVDVHGPDWHLKMPKVKMPKFSMPGFKGEGPDVDVTLPKADIEISGPKVDIDAPDVSIEGPDAKLKGPKFKMPEMNIKAPKISMPDIDFNLKGPKVKGDVDVSLPKVEGDLKGPEIDIKGPSLDIDTPDVNIEGPEGKLKGPKFKMPEMNIKAPKISMPDFDLHLKGPKVKGDVDVSLPKVESDLKGPEVDIEGPEGKLKGPKFKMPDVHFKSPQISMSDIDLNLKGPKIKGDMDISVPKLEGDLKGPKVDVKGPKVGIDTPDIDIHGPEGKLKGPKFKMPDLHLKAPKISMPEVDLNLKGPKVKGDMDISLPKVEGDLKGPEVDIRDPKVDIDVPDVDVQGPDWHLKMPKVKMPKFSMPGFKGEGPDVDVNLPKADIDVSGPKVDVDVPDVNIEGPDAKLKGPKFKMPEMSIKAPKISMPDIDLNLKGPKVKGDVDVTLPKVEGDLKGPEADIKGPKVDINTPDVDVHGPDWHLKMPKVKMPKFSMPGFKGEGPDVDVSLPKADIDVSGPKVDVDIPDVNIEGPDAKLKGPKFKMPEINIKAPKISIPDVDLDLKGPKVKGDFDVSVPKVEGTLKGPEVDLKGPRLDFEGPDAKLSGPSLKMPSLEISAPKVTAPDVDLHLKAPKIGFSGPKLEGGEVDLKGPKVEAPSLDVHMDSPDINIEGPDVKIPKFKKPKFGFGAKSPKADIKSPSLDVTVPEAELNLETPEISVGGKGKKSKFKMPKIHMSGPKIKAKKQGFDLNVPGGEIDASLKAPDVDVNIAGPDAALKVDVKSPKTKKTMFGKMYFPDVEFDIKSPKFKAEAPLPSPKLEGELQAPDLELSLPAIHVEGLDIKAKAPKVKMPDVDISVPKIEGDLKGPKVQANLGAPDINIEGLDAKVKTPSFGISAPQVSIPDVNVNLKGPKIKGDVPSVGLEGPDVDLQGPEAKIKFPKFSMPKIGIPGVKMEGGGAEVHAQLPSLEGDLRGPDVKLEGPDVSLKGPGVDLPSVNLSMPKVSGPDLDLNLKGPSLKGDLDASVPSMKVHAPGLNLSGVGGKMQVGGDGVKVPGIDATTKLNVGAPDVTLRGPSLQGDLAVSGDIKCPKVSVGAPDLSLEASEGSIKLPKMKLPQFGISTPGSDLHVNAKGPQVSGELKGPGVDVNLKGPRISAPNVDFNLEGPKVKGSLGATGEIKGPTVGGGLPGIGVQGLEGNLQMPGIKSSGCDVNLPGVNVKLPTGQISGPEIKGGLKGSEVGFHGAAPDISVKGPAFNMASPESDFGINLKGPKIKGGADVSGGVSAPDISLGEGHLSVKGSGGEWKGPQVSSALNLDTSKFAGGLHFSGPKVEGGVKGGQIGLQAPGLSVSGPQGHLESGSGKVTFPKMKIPKFTFSGRELVGREMGVDVHFPKAEASIQAGAGDGEWEESEVKLKKSKIKMPKFNFSKPKGKGGVTGSPEASISGSKGDLKSSKASLGSLEGEAEAEASSPKGKFSLFKSKKPRHRSNSFSDEREFSGPSTPTGTLEFEGGEVSLEGGKVKGKHGKLKFGTFGGLGSKSKGHYEVTGSDDETGKLQGSGVSLASKKSRLSSSSSNDSGNKVGIQLPEVELSVSTKKE

SEQ ID NO: 16901 - protein, 149 aa, Homo sapiens
MEKEETTRELLLPNWQGSGSHGLTIAQRDDGVFVQEVTQNSPAARTGVVKEGDQIVGATIYFDNLQSGEVTQLLNTMGHHTVGLKLHRKGDRSPEPGQTWTREVFSSCSSEVVLNTPQPSALECKDQNKQKEASSQAGAVSVSTPNAGL

SEQ ID NO: 16902 - protein, 859 aa, Homo sapiens
MEIEVSVAECKSVPGITSTPHPMDHPSAFYSPPHNGLLTDHHESLDNDVAREIRYLDEVLEANCCDSAVDGTYNGTSSPEPGAVVLVGGLSPPVHEATQPEPTERTASRQAPPHIELSNSSPDPMAEAERTNGHSPSQPRDALGDSLQVPVSPSSTTSSRCSSRDGEFTLTTLKKEAKFELRAFHEDKKPSKLFEDDEHEKEQYCIRKVRPSEEMLELEKERRELIRSQAVKKNPGIAAKWWNPPQEKTIEEQLDEEHLESHKKYKERKERRAQQEQLLLQKQLQQQQQQPPSQLCTAPASSHERASMIDKAKEDIVTEQIDFSAARKQFQLMENSRQAVAKGQSTPRLFSIKPFYRPLGSVNSDKPLTNPRPPSVGGPPEDSGASAAKGQKSPGALETPSAAGSQGNTASQGKEGPYSEPSKRGPLSKLWAEDGEFTSARAVLTVVKDDDHGILDQFSRSVNVSLTQEELDSGLDELSVRSQDTTVLETLSNDFSMDNISDSGASNETTNALQENSLADFSLPQTPQTDNPSEGRGEGVSKSFSDHGFYSPSSTLGDSPLVDDPLEYQAGLLVQNAIQQAIAEQVDKAVSKTSRDGAEQQGPEATVEEAEAAAFGSEKPQSMFEPPQVSSPVQEKRDVLPKILPAEDRALRERGPPQPLPAVQPSGPINMEETRPEGSYFSKYSEAAELRSTASLLATQESDVMVGPFKLRSRKQRTLSMIEEEIRAAQEREEELKRQRQVLQSTQSPRTKNAPSLPSRTCYKTAPGKIEKVKPPPSPTTEGPSLQPDLAPEEAAGTQRPKNLMQTLMEDYETHKSKRRERMDDSSVLEATRVNRRKSALALRWEAGIYANQEEEDNE

SEQ ID NO: 16903 - protein, 1103 aa, Homo sapiens
MAEAELHKERLQAIAEKRKRQTEIEGKRQQLDEQILLLQHSKSKVLREKWLLQGIPAGTAEEEEARRRQSEEDEFRVKQLEDNIQRLEQEIQTLESEESQISAKEQIILEKLKETEKSFKDFQKGFSSTDGDAVNYISSQLPDLPILCSRTAEPSPGQDGTSRAAGVGWENVLLKEGESASNATETSGPDMTIKKPPQLSEDDIWLKSEGDNYSATLLEPAASSLSPDHKNMEIEVSVAECKSVPGITSTPHPMDHPSAFYSPPHNGLLTDHHESLDNDVAREIRYLDEVLEANCCDSAVDGTYNGTSSPEPGAVVLVGGLSPPVHEATQPEPTERTASRQAPPHIELSNSSPDPMAEAERTNGHSPSQPRDALGDSLQVPVSPSSTTSSRCSSRDGEFTLTTLKKEAKFELRAFHEDKKPSKLFEDDEHEKEQYCIRKVRPSEEMLELEKERRELIRSQAVKKNPGIAAKWWNPPQEKTIEEQLDEEHLESHKKYKERKERRAQQEQLLLQKQLQQQQQQPPSQLCTAPASSHERASMIDKAKEDIVTEQIDFSAARKQFQLMENSRQAVAKGQSTPRLFSIKPFYRPLGSVNSDKPLTNPRPPSVGGPPEDSGASAAKGQKSPGALETPSAAGSQGNTASQGKEGPYSEPSKRGPLSKLWAEDGEFTSARAVLTVVKDDDHGILDQFSRSVNVSLTQEELDSGLDELSVRSQDTTVLETLSNDFSMDNISDSGASNETTNALQENSLADFSLPQTPQTDNPSEGRGEGVSKSFSDHGFYSPSSTLGDSPLVDDPLEYQAGLLVQNAIQQAIAEQVDKAVSKTSRDGAEQQGPEATVEEAEAAAFGSEKPQSMFEPPQVSSPVQEKRDVLPKILPAEDRALRERGPPQPLPAVQPSGPINMEETRPEGSYFSKYSEAAELRSTASLLATQESDVMVGPFKLRSRKQRTLSMIEEEIRAAQEREEELKRQRQVLQSTQSPRTKNAPSLPSRTCYKTAPGKIEKVKPPPSPTTEGPSLQPDLAPEEAAGTQRPKNLMQTLMEDYETHKSKRRERMDDSSYTSKLLSCKVTSEVLEATRVNRRKSALALRWEAGIYANQEEEDNE

SEQ ID NO: 16904 - protein, 948 aa, Homo sapiens
MRWPQPGAAARLPPESPGPPESPGPPEREAAAARRWTGAEPQDCAPGSGRPEKPPQLSEDDIWLKSEGDNYSATLLEPAASSLSPDHKNMEIEVSVAECKSVPGITSTPHPMDHPSAFYSPPHNGLLTDHHESLDNDVAREIRYLDEVLEANCCDSAVDGTYNGTSSPEPGAVVLVGGLSPPVHEATQPEPTERTASRQAPPHIELSNSSPDPMAEAERTNGHSPSQPRDALGDSLQVPVSPSSTTSSRCSSRDGEFTLTTLKKEAKFELRAFHEDKKPSKLFEDDEHEKEQYCIRKVRPSEEMLELEKERRELIRSQAVKKNPGIAAKWWNPPQEKTIEEQLDEEHLESHKKYKERKERRAQQEQLLLQKQLQQQQQQPPSQLCTAPASSHERASMIDKAKEDIVTEQIDFSAARKQFQLMENSRQAVAKGQSTPRLFSIKPFYRPLGSVNSDKPLTNPRPPSVGGPPEDSGASAAKGQKSPGALETPSAAGSQGNTASQGKEGPYSEPSKRGPLSKLWAEDGEFTSARAVLTVVKDDDHGILDQFSRSVNVSLTQEELDSGLDELSVRSQDTTVLETLSNDFSMDNISDSGASNETTNALQENSLADFSLPQTPQTDNPSEGRGEGVSKSFSDHGFYSPSSTLGDSPLVDDPLEYQAGLLVQNAIQQAIAEQVDKAVSKTSRDGAEQQGPEATVEEAEAAAFGSEKPQSMFEPPQVSSPVQEKRDVLPKILPAEDRALRERGPPQPLPAVQPSGPINMEETRPEGSYFSKYSEAAELRSTASLLATQESDVMVGPFKLRSRKQRTLSMIEEEIRAAQEREEELKRQRQVLQSTQSPRTKNAPSLPSRTCYKTAPGKIEKVKPPPSPTTEGPSLQPDLAPEEAAGTQRPKNLMQTLMEDYETHKSKRRERMDDSSVLEATRVNRRKSALALRWEAGIYANQEEEDNE

SEQ ID NO: 16905 - protein, 1090 aa, Homo sapiens
MAEAELHKERLQAIAEKRKRQTEIEGKRQQLDEQILLLQHSKSKVLREKWLLQGIPAGTAEEEEARRRQSEEDEFRVKQLEDNIQRLEQEIQTLESEESQISAKEQIILEKLKETEKSFKDFQKGFSSTDGDAVNYISSQLPDLPILCSRTAEPSPGQDGTSRAAGVGWENVLLKEGESASNATETSGPDMTIKKPPQLSEDDIWLKSEGDNYSATLLEPAASSLSPDHKNMEIEVSVAECKSVPGITSTPHPMDHPSAFYSPPHNGLLTDHHESLDNDVAREIRYLDEVLEANCCDSAVDGTYNGTSSPEPGAVVLVGGLSPPVHEATQPEPTERTASRQAPPHIELSNSSPDPMAEAERTNGHSPSQPRDALGDSLQVPVSPSSTTSSRCSSRDGEFTLTTLKKEAKFELRAFHEDKKPSKLFEDDEHEKEQYCIRKVRPSEEMLELEKERRELIRSQAVKKNPGIAAKWWNPPQEKTIEEQLDEEHLESHKKYKERKERRAQQEQLLLQKQLQQQQQQPPSQLCTAPASSHERASMIDKAKEDIVTEQIDFSAARKQFQLMENSRQAVAKGQSTPRLFSIKPFYRPLGSVNSDKPLTNPRPPSVGGPPEDSGASAAKGQKSPGALETPSAAGSQGNTASQGKEGPYSEPSKRGPLSKLWAEDGEFTSARAVLTVVKDDDHGILDQFSRSVNVSLTQEELDSGLDELSVRSQDTTVLETLSNDFSMDNISDSGASNETTNALQENSLADFSLPQTPQTDNPSEGRGEGVSKSFSDHGFYSPSSTLGDSPLVDDPLEYQAGLLVQNAIQQAIAEQVDKAVSKTSRDGAEQQGPEATVEEAEAAAFGSEKPQSMFEPPQVSSPVQEKRDVLPKILPAEDRALRERGPPQPLPAVQPSGPINMEETRPEGSYFSKYSEAAELRSTASLLATQESDVMVGPFKLRSRKQRTLSMIEEEIRAAQEREEELKRQRQVLQSTQSPRTKNAPSLPSRTCYKTAPGKIEKVKPPPSPTTEGPSLQPDLAPEEAAGTQRPKNLMQTLMEDYETHKSKRRERMDDSSVLEATRVNRRKSALALRWEAGIYANQEEEDNE

SEQ ID NO: 16906 - protein, 961 aa, Homo sapiens
MRWPQPGAAARLPPESPGPPESPGPPEREAAAARRWTGAEPQDCAPGSGRPEKPPQLSEDDIWLKSEGDNYSATLLEPAASSLSPDHKNMEIEVSVAECKSVPGITSTPHPMDHPSAFYSPPHNGLLTDHHESLDNDVAREIRYLDEVLEANCCDSAVDGTYNGTSSPEPGAVVLVGGLSPPVHEATQPEPTERTASRQAPPHIELSNSSPDPMAEAERTNGHSPSQPRDALGDSLQVPVSPSSTTSSRCSSRDGEFTLTTLKKEAKFELRAFHEDKKPSKLFEDDEHEKEQYCIRKVRPSEEMLELEKERRELIRSQAVKKNPGIAAKWWNPPQEKTIEEQLDEEHLESHKKYKERKERRAQQEQLLLQKQLQQQQQQPPSQLCTAPASSHERASMIDKAKEDIVTEQIDFSAARKQFQLMENSRQAVAKGQSTPRLFSIKPFYRPLGSVNSDKPLTNPRPPSVGGPPEDSGASAAKGQKSPGALETPSAAGSQGNTASQGKEGPYSEPSKRGPLSKLWAEDGEFTSARAVLTVVKDDDHGILDQFSRSVNVSLTQEELDSGLDELSVRSQDTTVLETLSNDFSMDNISDSGASNETTNALQENSLADFSLPQTPQTDNPSEGRGEGVSKSFSDHGFYSPSSTLGDSPLVDDPLEYQAGLLVQNAIQQAIAEQVDKAVSKTSRDGAEQQGPEATVEEAEAAAFGSEKPQSMFEPPQVSSPVQEKRDVLPKILPAEDRALRERGPPQPLPAVQPSGPINMEETRPEGSYFSKYSEAAELRSTASLLATQESDVMVGPFKLRSRKQRTLSMIEEEIRAAQEREEELKRQRQVLQSTQSPRTKNAPSLPSRTCYKTAPGKIEKVKPPPSPTTEGPSLQPDLAPEEAAGTQRPKNLMQTLMEDYETHKSKRRERMDDSSYTSKLLSCKVTSEVLEATRVNRRKSALALRWEAGIYANQEEEDNE

SEQ ID NO: 16907 - protein, 69 aa, Homo sapiens
MVFAPGEKPGNEPEEVKLQNASKQIVQNAILQAVQQVSQESQRREERISDNRDHIQLGVGELTKKHEKK

SEQ ID NO: 16908 - protein, 381 aa, Homo sapiens
MGDRERNKKRLLELLRAPDTGNAHCADCGAADPDWASYKLGIFICLNCCGVHRNFPDISRVKSVRLDFWDDSIVEFMIHNGNLRVKAKFEARVPAFYYIPQANDCLVLKEQWIRAKYERREFMADGETISLPGNREGFLWKRGRDNSQFLRRKFVLLAREGLLKYFTKEQGKSPKAVISIKDLNATFQTEKIGHPHGLQITYRRDGHTRNLFVYHESGKEIVDWFNALRAARLQYLKMAFPELPESELVPFLTRNYLKQGFMEKTGPKQKEPFKKRWFALDCHERRLLYYKNPLDAFEQGQVFLGNKEQGYEAYEDLPKGIRGNRWKAGLTIVTPERRFVLTCPSEKEQQEWLESLRGVLSSPLTPLNRLTASTESGRSSR

SEQ ID NO: 16909 - protein, 380 aa, Homo sapiens
MGDRERNKKRLLELLRAPDTGNAHCADCGAADPDWASYKLGIFICLNCCGVHRNFPDISRVKSVRLDFWDDSIVEFMIHNGNLRVKAKFEARVPAFYYIPQANDCLVLKEQWIRAKYERREFMADGETISLPGNREGFLWKRGRDNSQFLRRKFVLLAREGLLKYFTKEQGKSPKAVISIKDLNATFQTEKIGHPHGLQITYRRDGHTRNLFVYHESGKEIVDWFNALRAARLQYLKMAFPELPESELVPFLTRNYLKQGFMEKTGPKKEPFKKRWFALDCHERRLLYYKNPLDAFEQGQVFLGNKEQGYEAYEDLPKGIRGNRWKAGLTIVTPERRFVLTCPSEKEQQEWLESLRGVLSSPLTPLNRLTASTESGRSSR

SEQ ID NO: 16910 - protein, 658 aa, Homo sapiens
MAEAAAAAGGTGLGAGASYGSAADRDRDPDPDRAGRRLRVLSGHLLGRPREALSTNECKARRAASAATAAPTATPAAQESGTIPKKRQEVMKWNGWGYNDSKFIFNKKGQIELTGKRYPLSGMGLPTFKEWIQNTLGVNVEHKTTSKASLNPSDTPPSVVNEDFLHDLKETNISYSQEADDRVFRAHGHCLHEIFLLREGMFERIPDIVLWPTCHDDVVKIVNLACKYNLCIIPIGGGTSVSYGLMCPADETRTIISLDTSQMNRILWVDENNLTAHVEAGITGQELERQLKESGYCTGHEPDSLEFSTVGGWVSTRASGMKKNIYGNIEDLVVHIKMVTPRGIIEKSCQGPRMSTGPDIHHFIMGSEGTLGVITEATIKIRPVPEYQKYGSVAFPNFEQGVACLREIAKQRCAPASIRLMDNKQFQFGHALKPQVSSIFTSFLDGLKKFYITKFKGFDPNQLSVATLLFEGDREKVLQHEKQVYDIAAKFGGLAAGEDNGQRGYLLTYVIAYIRDLALEYYVLGESFETSAPWDRVVDLCRNVKERITRECKEKGVQFAPFSTCRVTQTYDAGACIYFYFAFNYRGISDPLTVFEQTEAAAREEILANGGSLSHHHGVGKLRKQWLKESISDVGFGMLKSVKEYVDPNNIFGNRNLL

SEQ ID NO: 16911 - protein, 407 aa, Homo sapiens
MAVPWLVLLLALPIFFLGVFVWAVFEHFLTTDIPATLQHPAKLRFLHCIFLYLVTLGNIFEKLGICSMPKFIRFLHDSVRIKKDPELVVTDLRFGTIPVRLFQPKAASSRPRRGIIFYHGGATVFGSLDCYHGLCNYLARETESVLLMIGYRKLPDHHSPALFQDCMNASIHFLKALETYGVDPSRVVVCGESVGGAAVAAITQALVGRSDLPRIRAQVLIYPVVQAFCLQLPSFQQNQNVPLLSRKFMVTSLCNYLAIDLSWRDAILNGTCVPPDVWRKYEKWLSPDNIPKKFKNRGYQPWSPGPFNEAAYLEAKHMLDVENSPLIADDEVIAQLPEAFLVSCENDILRDDSLLYKKRLEDQGVRVTWYHLYDGFHGSIIFFDKKALSFPCSLKIVNAVVSYIKGI

SEQ ID NO: 16912 - protein, 1091 aa, Homo sapiens
MWQEAMRRRRYLRDRSEEAAGGGDGLPRSRDWLYESYYCMSQQHPLIVFLLLIVMGSCLALLAVFFALGLEVEDHVAFLITVPTALAIFFAIFILVCIESVFKKLLRLFSLVIWICLVAMGYLFMCFGGTVSPWDQVSFFLFIIFVVYTMLPFNMRDAIIASVLTSSSHTIVLSVCLSATPGGKEHLVWQILANVIIFICGNLAGAYHKHLMELALQQTYQDTCNCIKSRIKLEFEKRQQERLLLSLLPAHIAMEMKAEIIQRLQGPKAGQMENTNNFHNLYVKRHTNVSILYADIVGFTRLASDCSPGELVHMLNELFGKFDQIAKENECMRIKILGDCYYCVSGLPISLPNHAKNCVKMGLDMCEAIKKVRDATGVDINMRVGVHSGNVLCGVIGLQKWQYDVWSHDVTLANHMEAGGVPGRVHISSVTLEHLNGAYKVEEGDGDIRDPYLKQHLVKTYFVINPKGERRSPQHLFRPRHTLDGAKMRASVRMTRYLESWGAAKPFAHLHHRDSMTTENGKISTTDVPMGQHNFQNRTLRTKSQKKRFEEELNERMIQAIDGINAQKQWLKSEDIQRISLLFYNKVLEKEYRATALPAFKYYVTCACLIFFCIFIVQILVLPKTSVLGISFGAAFLLLAFILFVCFAGQLLQCSKKASPLLMWLLKSSGIIANRPWPRISLTIITTAIILMMAVFNMFFLSDSEETIPPTANTTNTSFSASNNQVAILRAQNLFFLPYFIYSCILGLISCSVFLRVNYELKMLIMMVALVGYNTILLHTHAHVLGDYSQVLFERPGIWKDLKTMGSVSLSIFFITLLVLGRQNEYYCRLDFLWKNKFKKEREEIETMENLNRVLLENVLPAHVAEHFLARSLKNEELYHQSYDCVCVMFASIPDFKEFYTESDVNKEGLECLRLLNEIIADFDDLLSKPKFSGVEKIKTIGSTYMAATGLSAVPSQEHSQEPERQYMHIGTMVEFAFALVGKLDAINKHSFNDFKLRVGINHGPVIAGVIGAQKPQYDIWGNTVNVASRMDSTGVLDKIQVTEETSLVLQTLGYTCTCRGIINVKGKGDLKTYFVNTEMSRSLSQSNVAS

SEQ ID NO: 16913 - protein, 911 aa, Homo sapiens
MDLRWARDLHLREASRSVAFTTLRLGAVTTGLLTFREPGDKEKSGKGLGKRWRIQREESQERLLLSLLPAHIAMEMKAEIIQRLQGPKAGQMENTNNFHNLYVKRHTNVSILYADIVGFTRLASDCSPGELVHMLNELFGKFDQIAKENECMRIKILGDCYYCVSGLPISLPNHAKNCVKMGLDMCEAIKKVRDATGVDINMRVGVHSGNVLCGVIGLQKWQYDVWSHDVTLANHMEAGGVPGRVHISSVTLEHLNGAYKVEEGDGDIRDPYLKQHLVKTYFVINPKGERRSPQHLFRPRHTLDGAKMRASVRMTRYLESWGAAKPFAHLHHRDSMTTENGKISTTDVPMGQHNFQNRTLRTKSQKKRFEEELNERMIQAIDGINAQKQWLKSEDIQRISLLFYNKVLEKEYRATALPAFKYYVTCACLIFFCIFIVQILVLPKTSVLGISFGAAFLLLAFILFVCFAGQLLQCSKKASPLLMWLLKSSGIIANRPWPRISLTIITTAIILMMAVFNMFFLSDSEETIPPTANTTNTSFSASNNQVAILRAQNLFFLPYFIYSCILGLISCSVFLRVNYELKMLIMMVALVGYNTILLHTHAHVLGDYSQVLFERPGIWKDLKTMGSVSLSIFFITLLVLGRQNEYYCRLDFLWKNKFKKEREEIETMENLNRVLLENVLPAHVAEHFLARSLKNEELYHQSYDCVCVMFASIPDFKEFYTESDVNKEGLECLRLLNEIIADFDDLLSKPKFSGVEKIKTIGSTYMAATGLSAVPSQEHSQEPERQYMHIGTMVEFAFALVGKLDAINKHSFNDFKLRVGINHGPVIAGVIGAQKPQYDIWGNTVNVASRMDSTGVLDKIQVTEETSLVLQTLGYTCTCRGIINVKGKGDLKTYFVNTEMSRSLSQSNVAS

SEQ ID NO: 16914 - protein, 698 aa, Homo sapiens
MQAHELFRYFRMPELVDFRQYVRTLPTNTLMGFGAFAALTTFWYATRPKPLKPPCDLSMQSVEVAGSGGARRSALLDSDEPLVYFYDDVTTLYEGFQRGIQVSNNGPCLGSRKPDQPYEWLSYKQVAELSECIGSALIQKGFKTAPDQFIGIFAQNRPEWVIIEQGCFAYSMVIVPLYDTLGNEAITYIVNKAELSLVFVDKPEKAKLLLEGVENKLIPGLKIIVVMDAYGSELVERGQRCGVEVTSMKAMEDLGRANRRKPKPPAPEDLAVICFTSGTTGNPKGAMVTHRNIVSDCSAFVKATENTVNPCPDDTLISFLPLAHMFERVVECVMLCHGAKIGFFQGDIRLLMDDLKVLQPTVFPVVPRLLNRMFDRIFGQANTTLKRWLLDFASKRKEAELRSGIIRNNSLWDRLIFHKVQSSLGGRVRLMVTGAAPVSATVLTFLRAALGCQFYEGYGQTECTAGCCLTMPGDWTAGHVGAPMPCNLIKLVDVEEMNYMAAEGEGEVCVKGPNVFQGYLKDPAKTAEALDKDGWLHTGDIGKWLPNGTLKIIDRKKHIFKLAQGEYIAPEKIENIYMRSEPVAQVFVHGESLQAFLIAIVVPDVETLCSWAQKRGFEGSFEELCRNKDVKKAILEDMVRLGKDSGLKPFEQVKGITLHPELFSIDNGLLTPTMKAKRPELRNYFRSQIDDLYSTIKV

SEQ ID NO: 16915 - protein, 688 aa, Homo sapiens
MQAHELFRYFRMPELVDFRQYVRTLPTNTLMGFGAFAALTTFWYATRPKPLKPPCDLSMQSVEVAGSGGARRSALLDSDEPLVYFYDDVTTLYEGFQRGIQVSNNGPCLGSRKPDQPYEWLSYKQVAELSECIGSALIQKGFKTAPDQFIGIFAQNRPEWVIIEQGCFAYSMVIVPLYDTLGNEAITYIVNKAELSLVFVDKPEKAKLLLEGVENKLIPGLKIIVVMDAYGSELVERGQRCGVEVTSMKAMEDLGRANRRKPKPPAPEDLAVICFTSGTTGNPKGAMVTHRNIVSDCSAFVKATENTVNPCPDDTLISFLPLAHMFERVVECVMLCHGAKIGFFQGDIRLLMDDLKVLQPTVFPVVPRLLNRMFDRIFGQANTTLKRWLLDFASKRKEAELRSGIIRNNSLWDRLIFHKVQSSLGGRVRLMVTGAAPVSATVLTFLRAALGCQFYEGYGQTECTAGCCLTMPGDWTAGHVGAPMPCNLIKLVDVEEMNYMAAEGEGEGYLKDPAKTAEALDKDGWLHTGDIGKWLPNGTLKIIDRKKHIFKLAQGEYIAPEKIENIYMRSEPVAQVFVHGESLQAFLIAIVVPDVETLCSWAQKRGFEGSFEELCRNKDVKKAILEDMVRLGKDSGLKPFEQVKGITLHPELFSIDNGLLTPTMKAKRPELRNYFRSQIDDLYSTIKV

SEQ ID NO: 16916 - protein, 698 aa, Homo sapiens
MQAHELFRYFRMPELVDFRQYVRTLPTNTLMGFGAFAALTTFWYATRPKPLKPPCDLSMQSVEVAGSGGARRSALLDSDEPLVYFYDDVTTLYEGFQRGIQVSNNGPCLGSRKPDQPYEWLSYKQVAELSECIGSALIQKGFKTAPDQFIGIFAQNRPEWVIIEQGCFAYSMVIVPLYDTLGNEAITYIVNKAELSLVFVDKPEKAKLLLEGVENKLIPGLKIIVVMDAYGSELVERGQRCGVEVTSMKAMEDLGRANRRKPKPPAPEDLAVICFTSGTTGNPKGAMVTHRNIVSDCSAFVKATEKALPLSASDTHISYLPLAHIYEQLLKCVMLCHGAKIGFFQGDIRLLMDDLKVLQPTVFPVVPRLLNRMFDRIFGQANTTLKRWLLDFASKRKEAELRSGIIRNNSLWDRLIFHKVQSSLGGRVRLMVTGAAPVSATVLTFLRAALGCQFYEGYGQTECTAGCCLTMPGDWTAGHVGAPMPCNLIKLVDVEEMNYMAAEGEGEVCVKGPNVFQGYLKDPAKTAEALDKDGWLHTGDIGKWLPNGTLKIIDRKKHIFKLAQGEYIAPEKIENIYMRSEPVAQVFVHGESLQAFLIAIVVPDVETLCSWAQKRGFEGSFEELCRNKDVKKAILEDMVRLGKDSGLKPFEQVKGITLHPELFSIDNGLLTPTMKAKRPELRNYFRSQIDDLYSTIKV

SEQ ID NO: 16917 - protein, 901 aa, Homo sapiens
MMMVMQPEGLGAGEGRFAGGGGGGEYMEQEEDWDRDLLLDPAWEKQQRKTFTAWCNSHLRKAGTQIENIEEDFRNGLKLMLLLEVISGERLPRPDKGKMRFHKIANVNKALDFIASKGVKLVSIGAEEIVDGNLKMTLGMIWTIILRFAIQDISVEETSAKEGLLLWCQRKTAPYRNVNVQNFHTSWKDGLALCALIHRHRPDLIDYAKLRKDDPIGNLNTAFEVAEKYLDIPKMLDAEDIVNTPKPDEKAIMTYVSCFYHAFAGAEQAETAANRICKVLAVNQENEKLMEEYEKLASELLEWIRRTVPWLENRVGEPSMSAMQRKLEDFRDYRRLHKPPRIQEKCQLEINFNTLQTKLRLSHRPAFMPSEGKLVSDIANAWRGLEQVEKGYEDWLLSEIRRLQRLQHLAEKFRQKASLHEAWTRGKEEMLSQRDYDSALLQEVRALLRRHEAFESDLAAHQDRVEHIAALAQELNELDYHEAASVNSRCQAICDQWDNLGTLTQKRRDALERMEKLLETIDRLQLEFARRAAPFNNWLDGAVEDLQDVWLVHSVEETQSLLTAHDQFKATLPEADRERGAIMGIQGEIQKICQTYGLRPCSTNPYITLSPQDINTKWDMVRKLVPSCDQTLQEELARQQVNERLRRQFAAQANAIGPWIQAKVEEVGRLAAGLAGSLEEQMAGLRQQEQNIINYKTNIDRLEGDHQLLQESLVFDNKHTVYSMEHIRVGWEQLLTSIARTINEVENQVLTRDAKGLSQEQLNEFRASFNHFDRKQNGMMEPDDFRACLISMGYDLGEVEFARIMTMVDPNAAGVVTFQAFIDFMTRETAETDTTEQVVASFKILAGDKNYITPEELRRELPAKQAEYCIRRMVPYKGSGAPAGALDYVAFSSALYGESDL

SEQ ID NO: 16918 - protein, 215 aa, Homo sapiens
MGATAGWAVTVYDKPASFFKEAPLDLQHRLFMKLGSTHSPFRARSEPEDPDTERSAFTERDSGSGLVTRLHERPALLVSSTSWTEFEQLTLDGQNLPSLVCVITGKGPLREYYSRLIHQKHFQHIQVCIPWLEGRGLPPLLGSVDLDVCLDTSSSGLDLPMKVVDMFRCCLPACAVNFKCLHELVKHEENRLVFEDSEELAAQLQYFADAFLKLS

SEQ ID NO: 16919 - protein, 577 aa, Homo sapiens
MQWLMRFRTLWGIHKSFHNIHPAPSQLRCRSLSEFGAPRWNDYEVPEEFNFASYVLDYWAQKEKEGKRGPNPAFWWVNGQGDEVKWSFREMGDLTRRVANVFTQTCGLQQGDHLALMLPRVPEWWLVAVGCMRTGIIFIPATILLKAKDILYRLQLSKAKGIVTIDALASEVDSIASQCPSLKTKLLVSDHSREGWLDFRSLVKSASPEHTCVKSKTLDPMVIFFTSGTTGFPKMAKHSHGLALQPSFPGSRKLRSLKTSDVSWCLSDSGWIVATIWTLVEPWTAGCTVFIHHLPQFDTKVIIQTLLKYPINHFWGVSSIYRMILQQDFTSIRFPALEHCYTGGEVVLPKDQEEWKRRTGLLLYENYGQSETGLICATYWGMKIKPGFMGKATPPYDVQVIDDKGSILPPNTEGNIGIRIKPVRPVSLFMCYEGDPEKTAKVECGDFYNTGDRGKMDEEGYICFLGRSDDIINASGYRIGPAEVESALVEHPAVAESAVVGSPDPIRGEVVKAFIVLTPQFLSHDKDQLTKELQQHVKSVTAPYKYPRKVEFVSELPKTITGKIERKELRKKETGQM

SEQ ID NO: 16920 - protein, 204 aa, Homo sapiens
MQWLMRFRTLWGIHKSFHNIHPAPSQLRCRSLSEFGAPRWNDYEVPEEFNFASYVLDYWAQKEKEGKRGPNPAFWWVNGQGDEVKWSFREMGDLTRRVANVFTQTCGLQQGDHLALMLPRVPEWWLVAVGCMRTGIIFIPATILLKAKDILYRLQLSKAKGIVTIDALASEVDSIASQCPSLKTKLLVSDHSREGWLDFRSLVK

SEQ ID NO: 16921 - protein, 1216 aa, Homo sapiens
MPLSSHLLPALVLFLAGSSGWAWVPNHCRSPGQAVCNFVCDCRDCSDEAQCGYHGASPTLGAPFACDFEQDPCGWRDISTSGYSWLRDRAGAALEGPGPHSDHTLGTDLGWYMAVGTHRGKEASTAALRSPTLREAASSCKLRLWYHAASGDVAELRVELTHGAETLTLWQSTGPWGPGWQELAVTTGRIRGDFRVTFSATRNATHRGAVALDDLEFWDCGLPTPQANCPPGHHHCQNKVCVEPQQLCDGEDNCGDLSDENPLTCGRHIATDFETGLGPWNRSEGWSRNHRAGGPERPSWPRRDHSRNSAQGSFLVSVAEPGTPAILSSPEFQASGTSNCSLVFYQYLSGSEAGCLQLFLQTLGPGAPRAPVLLRRRRGELGTAWVRDRVDIQSAYPFQILLAGQTGPGGVVGLDDLILSDHCRPVSEVSTLQPLPPGPRAPAPQPLPPSSRLQDSCKQGHLACGDLCVPPEQLCDFEEQCAGGEDEQACGTTDFESPEAGGWEDASVGRLQWRRVSAQESQGSSAAAAGHFLSLQRAWGQLGAEARVLTPLLGPSGPSCELHLAYYLQSQPRGFLALVVVDNGSRELAWQALSSSAGIWKVDKVLLGARRRPFRLEFVGLVDLDGPDQQGAGVDNVTLRDCSPTVTTERDREVSCNFERDTCSWYPGHLSDTHWRWVESRGPDHDHTTGQGHFVLLDPTDPLAWGHSAHLLSRPQVPAAPTECLSFWYHLHGPQIGTLRLAMRREGEETHLWSRSGTQGNRWHEAWATLSHQPGSHAQYQLLFEGLRDGYHGTMALDDVAVRPGPCWAPNYCSFEDSDCGFSPGGQGLWRRQANASGHAAWGPPTDHTTETAQGHYMVVDTSPDALPRGQTASLTSKEHRPLAQPACLTFWYHGSLRSPGTLRVYLEERGRHQVLSLSAHGGLAWRLGSMDVQAERAWRVVFEAVAAGVAHSYVALDDLLLQDGPCPQPGSCDFESGLCGWSHLAWPGLGGYSWDWGGGATPSRYPQPPVDHTLGTEAGHFAFFETGVLGPGGRAAWLRSEPLPATPASCLRFWYHMGFPEHFYKGELKVLLHSAQGQLAVWGAGGHRRHQWLEAQVEVASAKEFQIVFEATLGGQPALGPIALDDVEYLAGQHCQQPAPSPGNTAAPGSVPAVVGSALLLLMLLVLLGLGGRRWLQKKGSCPFQSNTEATAPGFDNILFNADGVTLPASVTSDP

SEQ ID NO: 16922 - protein, 1137 aa, Homo sapiens
MPLSSHLLPALVLFLAGSSGWAWVPNHCRSPGQAVCNFVCDCRDCSDEAQCGYHGASPTLGAPFACDFEQDPCGWRDISTSGYSWLRDRAGAALEGPGPHSDHTLGTDLGWYMAVGTHRGKEASTAALRSPTLREAASSCKLRLWYHAASGDVAELRVELTHGAETLTLWQSTGPWGPGWQELAVTTGRIRGDFRVTFSATRNATHRGAVALDDLEFWDCGLPTPQANCPPGHHHCQNKVCVEPQQLCDGEDNCGDLSDENPLTCGRHIATDFETGLGPWNRSEGWSRNHRAGGPERPSWPRRDHSRNSAQGSFLVSVAEPGTPAILSSPEFQASGTSNCSLVFYQYLSGSEAGCLQLFLQTLGPGAPRAPVLLRRRRGELGTAWVRDRVDIQSAYPFQILLAGQTGPGGVVGLDDLILSDHCRPVSEVSTLQPLPPGPRAPAPQPLPPSSRLQDSCKQGHLACGDLCVPPEQLCDFEEQCAGGEDEQACGTTDFESPEAGGWEDASVGRLQWRRVSAQESQGSSAAAAGHFLSLQRAWGQLGAEARVLTPLLGPSGPSCELHLAYYLQSQPREVSCNFERDTCSWYPGHLSDTHWRWVESRGPDHDHTTGQGHFVLLDPTDPLAWGHSAHLLSRPQVPAAPTECLSFWYHLHGPQIGTLRLAMRREGEETHLWSRSGTQGNRWHEAWATLSHQPGSHAQYQLLFEGLRDGYHGTMALDDVAVRPGPCWAPNYCSFEDSDCGFSPGGQGLWRRQANASGHAAWGPPTDHTTETAQGHYMVVDTSPDALPRGQTASLTSKEHRPLAQPACLTFWYHGSLRSPGTLRVYLEERGRHQVLSLSAHGGLAWRLGSMDVQAERAWRVVFEAVAAGVAHSYVALDDLLLQDGPCPQPGSCDFESGLCGWSHLAWPGLGGYSWDWGGGATPSRYPQPPVDHTLGTEAGHFAFFETGVLGPGGRAAWLRSEPLPATPASCLRFWYHMGFPEHFYKGELKVLLHSAQGQLAVWGAGGHRRHQWLEAQVEVASAKEFQIVFEATLGGQPALGPIALDDVEYLAGQHCQQPAPSPGNTAAPGSVPAVVGSALLLLMLLVLLGLGGRRWLQKKGSCPFQSNTEATAPGFDNILFNADGVTLPASVTSDP

SEQ ID NO: 16923 - protein, 960 aa, Homo sapiens
MPLSSHLLPALVLFLAGSSGWAWVPNHCRSPGQAVCNFVCDCRDCSDEAQCGYHGASPTLGAPFACDFEQDPCGWRDISTSGYSWLRDRAGAALEGPGPHSDHTLGTDLGWYMAVGTHRGKEASTAALRSPTLREAASSCKLRLWYHAASGDVAELRVELTHGAETLTLWQSTGPWGPGWQELAVTTGRIRGDFRVTFSATRNATHRGAVALDDLEFWDCGLPTPQANCPPGHHHCQNKVCVEPQQLCDGEDNCGDLSDENPLTCGRHIATDFETGLGPWNRSEGWSRNHRAGGPERPSWPRRDHSRNSAQGSFLVSVAEPGTPAILSSPEFQASGTSNCSLVFYQYLSGSEAGCLQLFLQTLGPGAPRAPVLLRRRRGELGTAWVRDRVDIQSAYPFQILLAGQTGPGGVVGLDDLILSDHCRPVSEVSTLQPLPPGPRAPAPQPLPPSSRLQDSCKQGHLACGDLCVPPEQLCDFEEQCAGGEDEQACGTTDFESPEAGGWEDASVGRLQWRRVSAQESQGSSAAAAGHFLSLQRAWGQLGAEARVLTPLLGPSGPSCELHLAYYLQSQPRGFLALVVVDNGSRELAWQALSSSAGIWKVDKVLLGARRRPFRLEFVGLVDLDGPDQQGAGVDNVTLRDCSPTVTTERDREVSCNFERDTCSWYPGHLSDTHWRWVESRGPDHDHTTGQGHFVLLDPTDPLAWGHSAHLLSRPQVPAAPTECLSFWYHLHGPQIGTLRLAMRREGEETHLWSRSGTQGNRWHEAWATLSHQPGSHAQYQLLFEGLRDGYHGTMALDDVAVRPGPCWAPNYCSFEDSDCGFSPGGQGLWRRQANASGHAAWGPPTDHTTETAQGHYMVVDTSPDALPRGQTASLTSKEHRPLAQPACLTFWYHGSLRSPGTLRVYLEERGRHQVLSLSAHGGLAWRLGSMDVQAERAWRVSAGWGAPPPPPPPRAAWTR

SEQ ID NO: 16924 - protein, 963 aa, Homo sapiens
MDAPWGAGERWLHGAAVDRSGVSLGPPPTPQVNQGTLGPQVAPVAAGEVVKTAGGVCKFSGQRLSWWQAQESCEQQFGHLALQPPDGVLASRLRDPVWVGQREAPLRRPPQRRARTTAVLVFDERTADRAARLRSPLPELAALTACTHVQWDCASPDPAALFSVAAPALPNALQLRAFAEPGGVVRAALVVRGQHAPFLAAFRADGRWHHVCATWEQRGGRWALFSDGRRRAGARGLGAGHPVPSGGILVLGQDQDSLGGGFSVRHALSGNLTDFHLWARALSPAQLHRARACAPPSEGLLFRWDPGALDVTPSLLPTVWVRLLCPVPSEECPTWNPGPRSEGSELCLEPQPFLCCYRTEPYRRLQDAQSWPGQDVISRVNALANDIVLLPDPLSEVHGALSPAEASSFLGLLEHVLAMEMAPLGPAALLAVVRFLKRVVALGAGDPELLLTGPWEQLSQGVVSVASLVLEEQVADTWLSLREVIGGPMALVASVQRLAPLLSTSMTSERPRMRIQHRHAGLSGVTVIHSWFTSRVFQHTLEGPDLEPQAPASSEEANRVQRFLSTQVGSAIISSEVWDVTGEVNVAMTFHLQHRAQSPLFPPHPPSPYTGGAWATTGCSVAALYLDSTACFCNHSTSFAILLQIYEVQRGPEEESLLRTLSFVGCGVSFCALTTTFLLFLVAGVPKSERTTVHKNLTFSLASAEGFLMTSEWAKANEVACVAVTVAMHFLFLVAFSWMLVEGLLLWRKVVAVSMHPGPGMRLYHATGWGVPVGIVAVTLAMLPHDYVAPGHCWLNVHTNAIWAFVGPVLFVLTANTCILARVVMITVSSARRRARMLSPQPCLQQQIWTQIWATVKPVLVLLPVLGLTWLAGILVHLSPAWAYAAVGLNSIQGLYIFLVYAACNEEVRSALQRMAEKKVAEVLRALGVWGGAAKEHSLPFSVLPLFLPPKPSTPRHPLKAPA

SEQ ID NO: 16925 - protein, 187 aa, Homo sapiens
MERSAFMELDAGSRLVMHLREWPALLVSSTGWTEFEQLTLDGHNLPSLVCVITGSVDLGVCLHMSSSGLDLPMKVVDMFGCCLPVCAVNFKCLHELVKHEENGLVFEDSEELAALQMLFSNFPDPAGKLNQFWKNLRESQQLRWDESWVQTVLPLVMDIQLLGQRLKPRDPCCPSRSFFSESQGKPF

SEQ ID NO: 16926 - protein, 886 aa, Homo sapiens
MRGFNLLLFWGCCVMHSWEGHIRPTRKPNTKGNNCRDSTLCPAYATCTNTVDSYYCACKQGFLSSNGQNHFKDPGVRCKDIDECSQSPQPCGPNSSCKNLSGRYKCSCLDGFSSPTGNDWVPGKPGNFSCTDINECLTSSVCPEHSDCVNSMGSYSCSCQVGFISRNSTCEDVDECADPRACPEHATCNNTVGNYSCFCNPGFESSSGHLSFQGLKASCEDIDECTEMCPINSTCTNTPGSYFCTCHPGFAPSNGQLNFTDQGVECRDIDECRQDPSTCGPNSICTNALGSYSCGCIAGFHPNPEGSQKDGNFSCQRVLFKCKEDVIPDNKQIQQCQEGTAVKPAYVSFCAQINNIFSVLDKVCENKTTVVSLKNTTESFVPVLKQISTWTKFTKEETSSLATVFLESVESMTLASFWKPSANITPAVRTEYLDIESKVINKECSEENVTLDLVAKGDKMKIGCSTIEESESTETTGVAFVSFVGMESVLNERFFKDHQAPLTTSEIKLKMNSRVVGGIMTGEKKDGFSDPIIYTLENIQPKQKFERPICVSWSTDVKGGRWTSFGCVILEASETYTICSCNQMANLAVIMASGELTMDFSLYIISHVGIIISLVCLVLAIATFLLCRSIRNHNTYLHLHLCVCLLLAKTLFLAGIHKTDNKMGCAIIAGFLHYLFLACFFWMLVEAVILFLMVRNLKVVNYFSSRNIKMLHICAFGYGLPMLVVVISASVQPQGYGMHNRCWLNTETGFIWSFLGPVCTVIVINSLLLTWTLWILRQRLSSVNAEVSTLKDTRLLTFKAFAQLFILGCSWVLGIFQIGPVAGVMAYLFTIINSLQGAFIFLIHCLLNGQVREEYKRWITGKTKPSSQSQTSRILLSSMPSASKTG

SEQ ID NO: 16927 - protein, 821 aa, Homo sapiens
MRGFNLLLFWGCCVMHSWEGHIRPTRKPNTKGNNCRDSTLCPAYATCTNTVDSYYCACKQGFLSSNGQNHFKDPGVRCKDIDECSQSPQPCGPNSSCKNLSGRYKCSCLDGFSSPTGNDWVPGKPGNFSCTDINECLTSSVCPEHSDCVNSMGSYSCSCQVGFISRNSTCEDVDECADPRACPEHATCNNTVGNYSCFCNPGFESSSGHLSFQGLKASCEDIDECTEMCPINSTCTNTPGSYFCTCHPGFAPSNGQLNFTDQGVECRDIDECRQDPSTCGPNSICTNALGSYSCGCIAGFHPNPEGSQKDGNFSCQRVLFKCKEDVIPDNKQIQQCQEGTAVKPAYVSFCAQINNIFSVLDKVCENKTTVVSLKNTTESFVPVLKQISTWTKFTKEETSSLATVFLESVESMTLASFWKPSANITPAVRTEYLDIESKVINKECSEENVTLDLVAKGDKMKIGCSTIEESESTETTGVAFVSFVGMESVLNERFFKDHQAPLTTSEIKLKMNSRVVGGIMTGEKKDGFSDPIIYTLENIQPKQKFERPICVSWSTDVKGGRWTSFGCVILEASETYTICSCNQMANLAVIMASGELTMGCAIIAGFLHYLFLACFFWMLVEAVILFLMVRNLKVVNYFSSRNIKMLHICAFGYGLPMLVVVISASVQPQGYGMHNRCWLNTETGFIWSFLGPVCTVIVINSLLLTWTLWILRQRLSSVNAEVSTLKDTRLLTFKAFAQLFILGCSWVLGIFQIGPVAGVMAYLFTIINSLQGAFIFLIHCLLNGQVREEYKRWITGKTKPSSQSQTSRILLSSMPSASKTG

SEQ ID NO: 16928 - protein, 867 aa, Homo sapiens
MRGFNLLLFWGCCVMHSWEGHIRPTRKPNTKGNNCRDSTLCPAYATCTNTVDSYYCACKQGFLSSNGQNHFKDPGVRCKDINECLTSSVCPEHSDCVNSMGSYSCSCQVGFISRNSTCEDVDECADPRACPEHATCNNTVGNYSCFCNPGFESSSGHLSFQGLKASCEDIDECTEMCPINSTCTNTPGSYFCTCHPGFAPSNGQLNFTDQGVECRDIDECRQDPSTCGPNSICTNALGSYSCGCIAGFHPNPEGSQKDGNFSCQRVLFKCKEDVIPDNKQIQQCQEGTAVKPAYVSFCAQINNIFSVLDKVCENKTTVVSLKNTTESFVPVLKQISTWTKFTKEETSSLATVFLESVESMTLASFWKPSANITPAVRTEYLDIESKVINKECSEENVTLDLVAKGDKMKIGCSTIEESESTETTGVAFVSFVGMESVLNERFFKDHQAPLTTSEIKLKMNSRVVGGIMTGEKKDGFSDPIIYTLENIQPKQKFERPICVSWSTDVKGGRWTSFGCVILEASETYTICSCNQMANLAVIMASGELTMDFSLYIISHVGIIISLVCLVLAIATFLLCRSIRNHNTYLHLHLCVCLLLAKTLFLAGIHKTDNKMGCAIIAGFLHYLFLACFFWMLVEAVILFLMVRNLKVVNYFSSRNIKMLHICAFGYGLPMLVVVISASVQPQGYGMHNRCWLNTETGFIWSFLGPVCTVIVVSKYYNSLAKCVLKEEQGDLRDLEFPGTCAAERINSLLLTWTLWILRQRLSSVNAEVSTLKDTRLLTFKAFAQLFILGCSWVLGIFQIGPVAGVMAYLFTIINSLQGAFIFLIHCLLNGQVREEYKRWITGKTKPSSQSQTSRILLSSMPSASKTG

SEQ ID NO: 16929 - protein, 709 aa, Homo sapiens
MRGFNLLLFWGCCVMHSWEGHIRPTRKPNTKGNNCRDSTLCPAYATCTNTVDSYYCACKQGFLSSNGQNHFKDPGVRCKDIDECSQSPQPCGPNSSCKNLSGRYKCSCLDGFSSPTGNDWVPGKPGNFSCTDINECLTSRVLFKCKEDVIPDNKQIQQCQEGTAVKPAYVSFCAQINNIFSVLDKVCENKTTVVSLKNTTESFVPVLKQISTWTKFTKEETSSLATVFLESVESMTLASFWKPSANITPAVRTEYLDIESKVINKECSEENVTLDLVAKGDKMKIGCSTIEESESTETTGVAFVSFVGMESVLNERFFKDHQAPLTTSEIKLKMNSRVVGGIMTGEKKDGFSDPIIYTLENIQPKQKFERPICVSWSTDVKGGRWTSFGCVILEASETYTICSCNQMANLAVIMASGELTMDFSLYIISHVGIIISLVCLVLAIATFLLCRSIRNHNTYLHLHLCVCLLLAKTLFLAGIHKTDNKMGCAIIAGFLHYLFLACFFWMLVEAVILFLMVRNLKVVNYFSSRNIKMLHICAFGYGLPMLVVVISASVQPQGYGMHNRCWLNTETGFIWSFLGPVCTVIVINSLLLTWTLWILRQRLSSVNAEVSTLKDTRLLTFKAFAQLFILGCSWVLGIFQIGPVAGVMAYLFTIINSLQGAFIFLIHCLLNGQVREEYKRWITGKTKPSSQSQTSRILLSSMPSASKTG

SEQ ID NO: 16930 - protein, 745 aa, Homo sapiens
MRGFNLLLFWGCCVMHSWEGHIRPTRKPNTKGNNCRDSTLCPAYATCTNTVDSYYCACKQGFLSSNGQNHFKDPGVRCKDIDECTEMCPINSTCTNTPGSYFCTCHPGFAPSNGQLNFTDQGVECRDIDECRQDPSTCGPNSICTNALGSYSCGCIAGFHPNPEGSQKDGNFSCQRVLFKCKEDVIPDNKQIQQCQEGTAVKPAYVSFCAQINNIFSVLDKVCENKTTVVSLKNTTESFVPVLKQISTWTKFTKEETSSLATVFLESVESMTLASFWKPSANITPAVRTEYLDIESKVINKECSEENVTLDLVAKGDKMKIGCSTIEESESTETTGVAFVSFVGMESVLNERFFKDHQAPLTTSEIKLKMNSRVVGGIMTGEKKDGFSDPIIYTLENIQPKQKFERPICVSWSTDVKGGRWTSFGCVILEASETYTICSCNQMANLAVIMASGELTMDFSLYIISHVGIIISLVCLVLAIATFLLCRSIRNHNTYLHLHLCVCLLLAKTLFLAGIHKTDNKMGCAIIAGFLHYLFLACFFWMLVEAVILFLMVRNLKVVNYFSSRNIKMLHICAFGYGLPMLVVVISASVQPQGYGMHNRCWLNTETGFIWSFLGPVCTVIVINSLLLTWTLWILRQRLSSVNAEVSTLKDTRLLTFKAFAQLFILGCSWVLGIFQIGPVAGVMAYLFTIINSLQGAFIFLIHCLLNGQVREEYKRWITGKTKPSSQSQTSRILLSSMPSASKTG

SEQ ID NO: 16931 - protein, 77 aa, Homo sapiens
MNLRLCVQALLLLWLSLTAVCGGSLMPLPDGNGLEDGNVRHLVQPRGSRNGPGPWQGGRRKFRRQRPRLSHKGPMPF

SEQ ID NO: 16932 - protein, 201 aa, Homo sapiens
MGNHLTEMAPTASSFLPHFQALHVVVIGLDSAGKTSLLYRLKFKEFVQSVPTKGFNTEKIRVPLGGSRGITFQVWDVGGQEKLRPLWRSYTRRTDGLVFVVDAAEAERLEEAKVELHRISRASDNQGVPVLVLANKQDQPGALSAAEVEKRLAVRELAAATLTHVQGCSAVDGLGLQQGLERLYEMILKRKKAARGGKKRR

SEQ ID NO: 16933 - protein, 318 aa, Homo sapiens
MPKRGKKGAVAEDGDELRTEPEAKKSKTAAKKNDKEAAGEGPALYEDPPDQKTSPSGKPATLKICSWNVDGLRAWIKKKGLDWVKEEAPDILCLQETKCSENKLPAELQELPGLSHQYWSAPSDKEGYSGVGLLSRQCPLKVSYGIGDEEHDQEGRVIVAEFDSFVLVTAYVPNAGRGLVRLEYRQRWDEAFRKFLKGLASRKPLVLCGDLNVAHEEIDLRNPKGNKKNAGFTPQERQGFGELLQAVPLADSFRHLYPNTPYAYTFWTYMMNARSKNVGWRLDYFLLSHSLLPALCDSKIRSKALGSDHCPITLYLAL

SEQ ID NO: 16934 - protein, 335 aa, Homo sapiens
MTTVTVTTEIPPRDKMEDNSALYESTSAHIIEETEYVKKIRTTLQKIRTQMFKDEIRHDSTNHKLDAKHCGNLQQGSDSEMDPSCCSLDLLMKKIKGKDLQLLEMNKENEVLKIKLQASREAGAAALRNVAQRLFENYQTQSEEVRKKQEDSKQLLQVNKLEKEQKLKQHVENLNQVAEKLEEKHSQITELENLVQRMEKEKRTLLERKLSLENKLLQLKSSATYGKSCQDLQREISILQEQISHLQFVIHSQHQNLRSVIQEMEGLKNNLKEQDKRIENLREKVNILEAQNKELKTQVALSSETPRTKVSKAVSTSELKTEGVSPYLMLIRLRK

SEQ ID NO: 16935 - protein, 363 aa, Homo sapiens
MASKSWLNFLTFLCGSAIGFLLCSQLFSILLGEKVDTQPNVLHNDPHARHSDDNGQNHLEGQMNFNADSSQHKDENTDIAENLYQKVRILCWVMTGPQNLEKKAKHVKATWAQRCNKVLFMSSEENKDFPAVGLKTKEGRDQLYWKTIKAFQYVHEHYLEDADWFLKADDDTYVILDNLRWLLSKYDPEEPIYFGRRFKPYVKQGYMSGGAGYVLSKEALKRFVDAFKTDKCTHSSSIEDLALGRCMEIMNVEAGDSRDTIGKETFHPFVPEHHLIKGYLPRTFWYWNYNYYPPVEGPGCCSDLAVSFHYVDSTTMYELEYLVYHLRPYGYLYRYQPTLPERILKEISQANKNEDTKVKLGNP

SEQ ID NO: 16936 - protein, 309 aa, Homo sapiens
MASKSWLNFLTFLCGSAIGFLLCSQLFSILLGEKVDTQPNVLHNDPHARHSDDNGQNHLEGQMNFNADSSQHKDENTDIAENLYQKVRILCWVMTGPQNLEKKAKHVKATWAQRCNKVLFMSSEENKDFPAVGLKTKEGRDQLYWKTIKAFQYVHEHYLEDADWFLKADDDTYVILDNLRWLLSKYDPEEPIYFGRRFKPYVKQGYMSGGAGYVLSKEALKRFVDAFKTDKCTHSSSIEDLALGRCMEIMNVEAGDSRDTIGKETFHPFVPEHHLIKGYLPRTFWYWNYNYYPPVEVSLEILLLCQYLD

SEQ ID NO: 16937 - protein, 1154 aa, Homo sapiens
MQAMEGEVLLPALYEEEEEEEEEEEEVEEEEEQVQKGGSVGSLSVNKHRGLSLTETELEELRAQVLQLVAELEETRELAGQHEDDSLELQGLLEDERLASAQQAEVFTKQIQQLQGELRSLREEISLLEHEKESELKEIEQELHLAQAEIQSLRQAAEDSATEHESDIASLQEDLCRMQNELEDMERIRGDYEMEIASLRAEMEMKSSEPSGSLGLSDYSGLQEELQELRERYHFLNEEYRALQESNSSLTGQLADLESERTQRATERWLQSQTLSMTSAESQTSEMDFLEPDPEMQLLRQQLRDAEEQMHGMKNKCQELCCELEELQHHRQVSEEEQRRLQRELKCAQNEVLRFQTSHSVTQNEELKSRLCTLQKKYDTSQDEQNELLKMQLQLQTELRQLKVMKSTLVENQSEKELLCRLQKLHLQHQNVTCEKEKLLERQQQLQEELQCHEAELQHLRDTVASFKESNEKDTETHAQLQEMKQLYQASKDELERQKHMYDQLEQDLLLCQLELKELKASHPIPEDKGKCANKCDTLLSRLTELQEKYKASQKEMGQLQMEQCELLEDQRRMQEEQGQLQEELHRLTLPLPKSGLLLKSQELLTKLEDLCELQLLYQGMQEEQKKLIQNQDCVLKEQLEIHEELRRFKESHFQEVLENPDDSKLAKSSKCNRNKQSKLLMEQMQALQVMYDAGQAKQELLQQEQGRLLEERKRLQADLQLCLEEMQLLQVQSPSIKMSLESYGKSYGSMVPSNENCRKTYDTTVDDNESYYKSYTSTQTSSKSFLKSYDSSTSASEAYGKSYCTTSNSSITYKKSYGSTSSSDTCQKSFVSSCTDEEPAEPEDMERFEEMVVKVLIKLQAVQAMYQISQEEHSQLQEQMEKLLAKQKDLKEELDACEREFKECMECLEKPMAPQNDKNEIKELQTKLRELQLQYQASMDEQGRLLVVQEQLEGQLQCCQEELRQLREKRPSVVKEARGKNANKNMNKNANGVKMKKVTKPCSDTSESDLETRKSLEVVLYYKASQRKLDGLAKEEEKKEEMEEEKKQVKEEAKEQCGDELVAEPADPEEAKSTEDQEENEEDKEEEEKEEDSEEEEDDADSSLESPEENNPLRLSESKKSSPTPNPPIFSLPLVGLVVISALLWCWWAETSS

SEQ ID NO: 16938 - protein, 957 aa, Homo sapiens
MQAMEGEVLLPALYEEEEEEEEEEEEVEEEEEQVQKGGSVGSLSVNKHRGLSLTETELEELRAQVLQLVAELEETRELAGQHEDDSLELQGLLEDERLASAQQAEVFTKQIQQLQGELRSLREEISLLEHEKESELKEIEQELHLAQAEIQSLRQAAEDSATEHESDIASLQEDLCRMQNELEDMERIRGDYEMEIASLRAEMEMKSSEPSGSLGLSDYSGLQEELQELRERYHFLNEEYRALQESNSSLTGQLADLESERTQRATERWLQSQTLSMTSAESQTSEMDFLEPDPEMQLLRQQLRDAEEQMHGMKNKCQELCCELEELQHHRQVSEEEQRRLQRELKCAQNEVLRFQTSHSVTQNEELKSRLCTLQKKYDTSQDEQNELLKMQLQLQTELRQLKVMKSTLVENQSEKELLCRLQKLHLQHQNVTCEKEKLLERQQQLQEELQCHEAELQHLRDTVASFKESNEKDTETHAQLQEMKQLYQASKDELERQKHMYDQLEQDLLLCQLELKELKASHPIPEDKGKCANKCDTLLSRLTELQEKYKASQKEMGQLQMEQCELLEDQRRMQEEQGQLQEELHRLTLPLPKSGLLLKSQELLTKLEDLCELQLLYQGMQEEQKKLIQNQDCVLKEQLEIHEELRRFKESHFQEVLENPDDSKLAKSSKCNRNKQSKLLMEQMQALQVMYDAGQAKQELLQQEQGRLLEERKRLQADLQLCLEEMQLLQVQSPSIKMSLESYGKSYGSMVPSNENCRKTYDTTVDDNESYYKSYTSTQTSSKSFLKSYDSSTSASEAYGKSYCTTSNSSITYKKSYGSTSSSDTCQKSFVSSCTDEEPAEPEDMERFEEMVVKVLIKLQAVQAMYQISQEEHSQLQEQMEKLLAKQKDLKEELDACEREFKECMECLEKPMAPQNDKNENMFGLWKPMVFLAIAAVALYVLPNMRQQESEFCLME

SEQ ID NO: 16939 - protein, 434 aa, Homo sapiens
MEAGAGAGAGAAGWSCPGPGPTVTTLGSYEASEGCERKKGQRWGSLERRGMQAMEGEVLLPALYEEEEEEEEEEEEVEEEEEQVQKGGSVGSLSVNKHRGLSLTETELEELRAQVLQLVAELEETRELAGQHEDDSLELQGLLEDERLASAQQAEVFTKQIQQLQGELRSLREEISLLEHEKESELKEIEQELHLAQAEIQSLRQAAEDSATEHESDIASLQEDLCRMQNELEDMERIRGDYEMEIASLRAEMEMKSSEPSEELQELRERYHFLNEEYRALQESNSSLTGQLADLESERTQRATERWLQSQTLSMTSAESQTSEMDFLEPDPEMQLLRQQLRDAEEQMHGMKNKCQELCCELEELQHHRQVSEEEQRRLQRELKCAQNEVLRFQTSHSVTQSSPTPNPPIFSLPLVGLVVISALLWCWWAETSS

SEQ ID NO: 16940 - protein, 1157 aa, Homo sapiens
MQAMEGEVLLPALYEEEEEEEEEEEEVEEEEEQVQKGGSVGSLSVNKHRGLSLTETELEELRAQVLQLVAELEETRELAGQHEDDSLELQGLLEDERLASAQQAEVFTKQIQQLQGELRSLREEISLLEHEKESELKEIEQELHLAQAEIQSLRQAAEDSATEHESDIASLQEDLCRMQNELEDMERIRGDYEMEIASLRAEMEMKSSEPSGSLGLSDYSGLQEELQELRERYHFLNEEYRALQESNSSLTGQLADLESERTQRATERWLQSQTLSMTSAESQTSEMDFLEPDPEMQLLRQQLRDAEEQMHGMKNKCQELCCELEELQHHRQVSEEEQRRLQRELKCAQNEVLRFQTSHSVTQNEELKSRLCTLQKKYDTSQDEQNELLKMQLQLQTELRQLKVMKSTLVENQSEKELLCRLQKLHLQHQNVTCEKEKLLERQQQLQEELQCHEAELQHLRDTVASFKESNEKDTETHAQLQEMKQLYQASKDELERQKHMYDQLEQDLLLCQLELKELKASHPIPEDKGKCANKCDTLLSRLTELQEKYKASQKEMGQLQMEQCELLEDQRRMQEEQGQLQEELHRLTLPLPKSGLLLKSQELLTKLEDLCELQLLYQGMQEEQKKLIQNQDCVLKEQLEIHEELRRFKESHFQEVLENPDDSKLAKSSKCNRNKQSKLLMEQMQALQVMYDAGQAKQELLQQEQGRLLEERKRLQADLQLCLEEMQLLQVQSPSIKMSLESYGKSYGSMVPSNENCRKTYDTTVDDNESYYKSYTSTQTSSKSFLKSYDSSTSASEAYGKSYCTTSNSSITYKKSYGSTSSSDTCQKSFVSSCTDEEPAEPEDMERFEEMVVKVLIKLQAVQAMYQISQEEHSQLQEQMEKLLAKQKDLKEELDACEREFKECMECLEKPMAPQNDKNEIKELQTKLRELQLQYQASMDEQGRLLVVQEQLEGQLQCCQEELRQLREKRPSVVKEARGKNANKNMNKNANGVKMKKVTKPCSDTSESDLETRKSLEVVLYYKASQRKLDGLAKEEEKKEEMEEEKKQVKEEAKEQCGDELVAEPADPEEAKSTEDQEENEEDKEEEEKEEDSEEEEDDADSSLESPEENNPLRLSESKKNMFGLWKPMVFLAIAAVALYVLPNMRQQESEFCLME

SEQ ID NO: 16941 - protein, 296 aa, Homo sapiens
MGCRHSRLSSCKPPKKKRQEPEPEQPPRPEPHELGPLNGDTAITVQLCASEEAERHQKDITRILQQHEEEKKKWAQQVEKERELELRDRLDEQQRVLEGKNEEALQVLRASYEQEKEALTHSFREASSTQQETIDRLTSQLEAFQAKMKRVEESILSRNYKKHIQDYGSPSQFWEQELESLHFVIEMKNERIHELDRRLILMETVKEKNLILEEKITTLQQENEDLHVRSRNQVVLSRQLSEDLLLTREALEKEVQLRRQLQQEKEELLYRVLGANASPAFPLAPVTPTEVSFLAT

SEQ ID NO: 16942 - protein, 282 aa, Homo sapiens
MDAVEPGGRGWASMLACRLWKAISRALFAEFLATGLYVFFGVGSVMRWPTALPSVLQIAITFNLVTAMAVQVTWKASGAHANPAVTLAFLVGSHISLPRAVAYVAAQLVGATVGAALLYGVMPGDIRETLGINVVRNSVSTGQAVAVELLLTLQLVLCVFASTDSRQTSGSPATMIGISVALGHLIGIHFTGCSMNPARSFGPAIIIGKFTVHWVFWVGPLMGALLASLIYNFVLFPDTKTLAQRLAILTGTVEVGTGAGAGAEPLKKESQPGSGAVEMESV

SEQ ID NO: 16943 - protein, 342 aa, Homo sapiens [sequence omitted]

SEQ ID NO: 16944 - protein, 488 aa, Homo sapiens
MNFTPTHTPVCRKRTVVSKRGVAVSGPTKRRGMADSLESTPLPSPEDRLAKLHPSKELLEYYQKKMAECEAENEDLLKKLELYKEACEGQHKLECDLQQREEEIAELQKALSDMQVCLFQEREHVLRLYSENDRLRIRELEDKKKIQNLLALVGTDAGEVTYFCKEPPHKVTILQKTIQAVGECEQSESSAFKADPKISKRRPSRERKESSEHYQRDIQTLILQVEALQAQLGEQTKLSREQIEGLIEDRRIHLEEIQVQHQRNQNKIKELTKNLHHTQELLYESTKDFLQLRSENQNKEKSWMLEKDNLMSKIKQYRVQCKKKEDKIGKVLPVMHESHHAQSEYIKSLKDKLVQEKKLSNMYQEQCISLEEELARIREEEGMRREIFKDRTNKMGKRLQIMTKRYEALERRRILEVEGFKTDIKVLRQKLKDLEQMLYKATVNARANQDLALLCEVRDSNRRAHKIQGELKNLKSKVFGLENELRLC

SEQ ID NO: 16945 - protein, 456 aa, Homo sapiens
MADSLESTPLPSPEDRLAKLHPSKELLEYYQKKMAECEAENEDLLKKLELYKEACEGQHKLECDLQQREEEIAELQKALSDMQVCLFQEREHVLRLYSENDRLRIRELEDKKKIQNLLALVGTDAGEVTYFCKEPPHKVTILQKTIQAVGECEQSESSAFKADPKISKRRPSRERKESSEHYQRDIQTLILQVEALQAQLGEQTKLSREQIEGLIEDRRIHLEEIQVQHQRNQNKIKELTKNLHHTQELLYESTKDFLQLRSENQNKEKSWMLEKDNLMSKIKQYRVQCKKKEDKIGKVLPVMHESHHAQSEYIKSLKDKLVQEKKLSNMYQEQCISLEEELARIREEEGMRREIFKDRTNKMGKRLQIMTKRYEALERRRILEVEGFKTDIKVLRQKLKDLEQMLYKATVNARANQDLALLCEVRDSNRRAHKIQGELKNLKSKVFGLENELRLC

SEQ ID NO: 16946 - protein, 375 aa, Homo sapiens
MSQPKKRKLESGGGGEGGEGTEEEDGAEREAALERPRRTKRERDQLYYECYSDVSVHEEMIADRVRTDAYRLGILRNWAALRGKTVLDVGAGTGILSIFCAQAGARRVYAVEASAIWQQAREVVRFNGLEDRVHVLPGPVETVELPEQVDAIVSEWMGYGLLHESMLSSVLHARTKWLKEGGLLLPASAELFIAPISDQMLEWRLGFWSQVKQHYGVDMSCLEGFATRCLMGHSEIVVQGLSGEDVLARPQRFAQLELSRAGLEQELEAGVGGRFRCSCYGSAPMHGFAIWFQVTFPGGESEKPLVLSTSPFHPATHWKQALLYLNEPVQVEQDTDVSGEITLLPSRDNPRRLRVLLRYKVGDQEEKTKDFAMED

SEQ ID NO: 16947 - protein, 292 aa, Homo sapiens
MSQPKKRKLESGGGGEGGEGTEEEDDAVEASAIWQQAREVVRFNGLEDRVHVLPGPVETVELPEQVDAIVSEWMGYGLLHESMLSSVLHARTKWLKEGGLLLPASAELFIAPISDQMLEWRLGFWSQVKQHYGVDMSCLEGFATRCLMGHSEIVVQGLSGEDVLARPQRFAQLELSRAGLEQELEAGVGGRFRCSCYGSAPMHGFAIWFQVTFPGGESEKPLVLSTSPFHPATHWKQALLYLNEPVQVEQDTDVSGEITLLPSRDNPRRLRVLLRYKVGDQEEKTKDFAMED

SEQ ID NO: 16948 - protein, 253 aa, Homo sapiens
MMMKIPWGSIPVLMLLLLLGLIDISQAQLSCTGPPAIPGIPGIPGTPGPDGQPGTPGIKGEKGLPGLAGDHGEFGEKGDPGIPGNPGKVGPKGPMGPKGGPGAPGAPGPKGESGDYKATQKIAFSATRTINVPLRRDQTIRFDHVITNMNNNYEPRSGKFTCKVPGLYYFTYHASSRGNLCVNLMRGRERAQKVVTFCDYAYNTFQVTTGGMVLKLEQGENVFLQATDKNSLLGMEGANSIFSGFLLFPDMEA

SEQ ID NO: 16949 - protein, 180 aa, Homo sapiens
MGLTVSALFSRIFGKKQMRILMVGLDAAGKTTILYKLKLGEIVTTIPTIGFNVETVEYKNICFTVWDVGGQDKIRPLWRHYFQNTQGLIFVVDSNDRERVQESADELQKMLQEDELRDAVLLVFANKQDMPNAMPVSELTDKLGLQHLRSRTWYVQATCATQGTGLYDGLDWLSHELSKR

SEQ ID NO: 16950 - protein, 652 aa, Homo sapiens
MLDTIARALQDLGRQVLPTLPSLSQEEVSIIWGNVSEFVRRQLTLHKGVQIPAFGTFTFIRQKLEVGNNKFILIQRPVFIMVEKLVQIHGLKQNKVYTPGEIPIVPLNFVMISLEGPFNRDVVEGCVKETLLFLSRSISMKQNVEFTFKGIGVLMIRDSKVKMRFYKDFLCTMDGSGALAKALANRPGTVDSVLSSREALRKWPSSVLAFPRIELKEMENKLPMETLVEECGENRERKCKLKDQSDKEEGTRDISSPKRLRDRQALFPAKVTNVSLLEKFERSESGGKIMTPESLSYPSCLKHDSEMKPQTSPACQDHNKAGQEMCYVCLQRAQRNSLLYYSEERRREIEDERLIQQYQMLKDQEALFRHQMKSLATREQNQKNAAYNLGVAEAIRNHKNEKPEFYKSFLFDKRPLSPALNALKQEEYSRSLLKQMDNRQENEIKQRQYRELMDRLEQVQLTEELAAQRAKFLKDKMEETQCYKRALDAQIKNKPSRLPPFEPDSSEPIFGKNEGELMVEKQKREQNYMKHQLEAAANHKRKAILHQLVDQRRDLQMLQRTQREHLADRTAELERVNRVNQCLQEDWERSAAMKKQRDLEDKAFERASDKLFLLDQCEKYRRCKQCQRRTSNVGESNLWPLNKFLPGSRLLV

SEQ ID NO: 16951 - protein, 562 aa, Homo sapiens
MLDTIARALQDLGRQVLPTLPSLSQEEVSIIWGNVSEFVRRQLTLHKGVQIPAFGTFTFIRQKLEVGNNKFILIQRPVFIMVEKLVQIHGLKQNKRPGTVDSVLSSREALRKWPSSVLAFPRIELKEMENKLPMETLVEECGENRERKCKLKDQSDKEEGTRDISSPKRLRDRQALFPAKVTNVSLLEKFERSESGGKIMTPESLSYPSCLKHDSEMKPQTSPACQDHNKAGQEMCYVCLQRAQRNSLLYYSEERRREIEDERLIQQYQMLKDQEALFRHQMKSLATREQNQKNAAYNLGVAEAIRNHKNEKPEFYKSFLFDKRPLSPALNALKQEEYSRSLLKQMDNRQENEIKQRQYRELMDRLEQVQLTEELAAQRAKFLKDKMEETQCYKRALDAQIKNKPSRLPPFEPDSSEPIFGKNEGELMVEKQKREQNYMKHQLEAAANHKRKAILHQLVDQRRDLQMLQRTQREHLADRTAELERVNRVNQCLQEDWERSAAMKKQRDLEDKAFERASDKLFLLDQCEKYRRCKQCQRRTSNVGESNLWPLNKFLPGSRLLV

SEQ ID NO: 16952 - protein, 387 aa, Homo sapiens
MENKLPMETLVEECGENRERKCKLKDQSDKEEGTRDISSPKRLRDRQALFPAKVTNVSLLEKFERSESGGKIMTPESLSYPSCLKHDSEMKPQTSPACQDHNKAGQMKSLATREQNQKNAAYNLGVAEAIRNHKNEKPEFYKSFLFDKRPLSPALNALKQEEYSRSLLKQMDNRQENEIKQRQYRELMDRLEQVQLTEELAAQRAKFLKDKMEETQCYKRALDAQIKNKPSRLPPFEPDSSEPIFGKNEGELMVEKQKREQNYMKHQLEAAANHKRKAILHQLVDQRRDLQMLQRTQREHLADRTAELERVNRVNQCLQEDWERSAAMKKQRDLEDKAFERASDKLFLLDQCEKYRRCKQCQRRTSNVGESNLWPLNKFLPGSRLLV

SEQ ID NO: 16953 - protein, 484 aa, Homo sapiens
MYDDSYVPGFEDSEAGSADSYTSRPSLDSDVSLEEDRESARREVESQAQQQLERAKHKPVAFAVRTNVSYCGVLDEECPVQGSGVNFEAKDFLHIKEKYSNDWWIGRLVKEGGDIAFIPSPQRLESIRLKQEQKARRSGNPSSLSDIGNRRSPPPSLAKQKQKQAEHVPPYDVVPSMRPVVLVGPSLKGYEVTDMMQKALFDFLKHRFDGRISITRVTADLSLAKRSVLNNPGKRTIIERSSARSSIAEVQSEIERIFELAKSLQLVVLDADTINHPAQLAKTSLAPIIVFVKVSSPKVLQRLIRSRGKSQMKHLTVQMMAYDKLVQCPPESFDVILDENQLEDACEHLAEYLEVYWRATHHPAPGPGLLGPPSAIPGLQNQQLLGERGEEHSPLERDSLMPSDEASESSRQAWTGSSQRSSRHLEEDYADAYQDLYQPHRQHTSGLPSANGHDPQDRLLAQDSEHNHSDRNWQRNRPWPKDSY

SEQ ID NO: 16954 - protein, 447 aa, Homo sapiens
MYDDSYVPGFEDSEAGSADSYTSRPSLDSDVSLEEDRESARREVESQAQQQLERAKHKPVAFAVRTNVSYCGVLDEECPVQGSGVNFEAKDFLHIKEKYSNDWWIGRLVKEGGDIAFIPSPQRLESIRLKQEQKARRSGNPSSLSDIGNRRSPPPSLAKQKQKQAEHVPPYDVVPSMRPVVLVGPSLKGYEVTDMMQKALFDFLKHRFDGRISITRVTADLSLAKRSVLNNPGKRTIIERSSARSSIAEVQSEIERIFELAKSLQLVVLDADTINHPAQLAKTSLAPIIVFVKVSSPKVLQRLIRSRGKSQMKHLTVQMMAYDKLVQCPPESFDVILDENQLEDACEHLAEYLEVYWRATHHPAPGPGLLGPPSAIPGLQNQQLLGERGEEHSPLERDSLMPSDEASESSRQAWTGSSQRSSRHLEEDYADAYQDLYQPQCQLLSLL

SEQ ID NO: 16955 - protein, 471 aa, Homo sapiens
MEGSADSYTSRPSLDSDVSLEEDRESARREVESQAQQQLERAKHKPVAFAVRTNVSYCGVLDEECPVQGSGVNFEAKDFLHIKEKYSNDWWIGRLVKEGGDIAFIPSPQRLESIRLKQEQKARRSGNPSSLSDIGNRRSPPPSLAKQKQKQAEHVPPYDVVPSMRPVVLVGPSLKGYEVTDMMQKALFDFLKHRFDGRISITRVTADLSLAKRSVLNNPGKRTIIERSSARSSIAEVQSEIERIFELAKSLQLVVLDADTINHPAQLAKTSLAPIIVFVKVSSPKVLQRLIRSRGKSQMKHLTVQMMAYDKLVQCPPESFDVILDENQLEDACEHLAEYLEVYWRATHHPAPGPGLLGPPSAIPGLQNQQLLGERGEEHSPLERDSLMPSDEASESSRQAWTGSSQRSSRHLEEDYADAYQDLYQPHRQHTSGLPSANGHDPQDRLLAQDSEHNHSDRNWQRNRPWPKDSY

SEQ ID NO: 16956 - protein, 483 aa, Homo sapiens
MSFSDSSATFLLNEGSADSYTSRPSLDSDVSLEEDRESARREVESQAQQQLERAKHKPVAFAVRTNVSYCGVLDEECPVQGSGVNFEAKDFLHIKEKYSNDWWIGRLVKEGGDIAFIPSPQRLESIRLKQEQKARRSGNPSSLSDIGNRRSPPPSLAKQKQKQAEHVPPYDVVPSMRPVVLVGPSLKGYEVTDMMQKALFDFLKHRFDGRISITRVTADLSLAKRSVLNNPGKRTIIERSSARSSIAEVQSEIERIFELAKSLQLVVLDADTINHPAQLAKTSLAPIIVFVKVSSPKVLQRLIRSRGKSQMKHLTVQMMAYDKLVQCPPESFDVILDENQLEDACEHLAEYLEVYWRATHHPAPGPGLLGPPSAIPGLQNQQLLGERGEEHSPLERDSLMPSDEASESSRQAWTGSSQRSSRHLEEDYADAYQDLYQPHRQHTSGLPSANGHDPQDRLLAQDSEHNHSDRNWQRNRPWPKDSY

SEQ ID NO: 16957 - protein, 443 aa, Homo sapiens
MYDDSYVPGFEDSEAGSADSYTSRPSLDSDVSLEEDRESARREVESQAQQQLERAKKYSNDWWIGRLVKEGGDIAFIPSPQRLESIRLKQEQKARRSGNPSSLSDIGNRRSPPPSLAKQKQKQAEHVPPYDVVPSMRPVVLVGPSLKGYEVTDMMQKALFDFLKHRFDGRISITRVTADLSLAKRSVLNNPGKRTIIERSSARSSIAEVQSEIERIFELAKSLQLVVLDADTINHPAQLAKTSLAPIIVFVKVSSPKVLQRLIRSRGKSQMKHLTVQMMAYDKLVQCPPESFDVILDENQLEDACEHLAEYLEVYWRATHHPAPGPGLLGPPSAIPGLQNQQLLGERGEEHSPLERDSLMPSDEASESSRQAWTGSSQRSSRHLEEDYADAYQDLYQPHRQHTSGLPSANGHDPQDRLLAQDSEHNHSDRNWQRNRPWPKDSY

SEQ ID NO: 16958 - protein, 1101 aa, Homo sapiens
MDCKVHMETTVSRPVLSPTHINATASETFTVLQQRMRIVEEQTSSLRDDLIMLDFGEKRGYLEAPDCLEDLDSQKVISPIQNEAICAGKTDILWKNCEFLVNRMCRLESLMQSLKMNIFRLQTEKDLNPQKTAFLKDRLNAIQEEHSKDLKLLHLEVMNLRQQLRAVKEEEDKAQDEVQRLTATLKIASQTKKNAAIIEEELKTTKRKMNLKIQELRRQLAQEKYLRESLEKSASAMLLKIQEMGSTVEVERKQVHILQQNCIALRDSIQSAQELLAQEQKKKEELEIATSQLKSDLTSRDDLISKLVEENKNLQISFNKEHEENAYLRSEIMSLHEASEKAQVLNDQLTKKCSELSCMLQTVTMEKARIIADHQAILQVEQKMMTQTFQEQNLLLDAAHASITNELQTVQNEKTQLQAHLDHLILEHNQCIQKAQDAEKRTAVQKELLESTIARLRGELEASMQEKKSLLEEKERFQREVNKTEKEIVQERCNLEKELAKNKVDINTLTHNLQTLEEENKHLADQMASLELQQVTSDYHGLAQQKVEKITESKNKLAYENGKLQIKVKQLEEQVQSFTDTSLQNDHLRKMNKYLQTKYAQANSELSAKRVHLQQADAHLKEVKSILERSKEELSRTVKCRNAALKESQKLKEDLEAVEDRENKKVGNFQRQLAEAKEDNCKVTIMLENVLASHSKMQGALEKVQIELGRRDSEIAGLKKERDLNQQRVQKLEAEVDQWQARMLVMEDQHNSEIESLQKALGVAREDNRKLAMSLEQALQTNNHLQTKLDHIQEQLESKELERQNLETFKDRMTEESKVEAELHAERIEALRKQFQTERETTKKVAQREVAELKKALDEANFRSVEVSRTNRELRQKLAELEKILESNKEKIKNQKTQIKLHLSAKANNAQNIERMKQIEKELKQMELIKDQYQKKNYEQSLSIQRFVCEMTNLQKEMQMLAKSQYDASVRNKQQELHLEAERKIRQELENRCQELEETVRHLKKCKEATENTLKEASVESEQITANLEEAHRWFKHRFDGLQLELTKNRLQRPSGEDRWQEKDQDVKHDVMSNQSVLHRWERKQNLRPMPKKYHSEVQRK

SEQ ID NO: 16959 - protein, 417 aa, Homo sapiens
MPLRKRKSPERTASSKSPEISRSHVNSIKERTSSVGLPSVIPNSTRRVSFAPNLPSMKTSQDIGDSRISLKTLLNAIKTMEGRLEGKIEILASRPLINDESPNFLKQDSVKSILERSKEELSRTVKCRNAALKESQKLKEDLEAVEDRENKKVGNFQRQLAEAKEDNCKVTIMLENVLASHSKMQGALEKVQIELGRRDSEIAGLKKERDLNQQRVQKLEAEVDQWQARMLVMEDQHNSEIESLQKALGVAREDNRKLAMSLEQALQTNNHLQTKLDHIQEQLESKELERQNLETFKDRMTEESKVEAELHAERIEALRKQFQTERETTKKVAQREVAELKKALDEANFRSVEVSRTNRELRQKLAELEKILESNKEKIKNQKTQIKLHLSAKANNAQNIERMKVVWETSSHFLDTL

SEQ ID NO: 16960 - protein, 245 aa, Homo sapiens
MLENVLASHSKMQGALEKVQIELGRRDSEIAGLKKERDLNQQRVQKLEAEVDQWQARMLVMEDQHNSEIESLQKALGVAREDNRKLAMSLEQALQTNNHLQTKLDHIQEQLESKELERQNLETFKDRMTEESKVEAELHAERIEALRKQFQTERETTKKVAQREVAELKKALDEANFRSVEVSRTNRELRQKLAELEKILESNKEKIKNQKTQIKLHLSAKANNAQNIERMKVVWETSSHFLDTL

SEQ ID NO: 16961 - protein, 168 aa, Homo sapiens
MLENVLASHSKMQGALEKVQIELGRRDSEIAGLKKERDLNQQRVQKLEAEVDQWQARMLVMEDQHNSEIESLQKALGVAREDNRKLAMSLEQALQTNNHLQTKLDHIQEQLESKELERQNLETFKDRMTEESKVEAELHAERIEALRKQFQTERETTKKVAQREVAEV

SEQ ID NO: 16962 - protein, 245 aa, Homo sapiens
MDVGPSSLPHLGLKLLLLLLLLPLRGQANTGCYGIPGMPGLPGAPGKDGYDGLPGPKGEPGIPAIPGIRGPKGQKGEPGLPGHPGKNGPMGPPGMPGVPGPMGIPGEPGEEGRYKQKFQSVFTVTRQTHQPPAPNSLIRFNAVLTNPQGDYDTSTGKFTCKVPGLYYFVYHASHTANLCVLLYRSGVKVVTFCGHTSKTNQVNSGGVLLRLQVGEEVWLAVNDYYDMVGIQGSDSVFSGFLLFPD

SEQ ID NO: 16963 - protein, 544 aa, Homo sapiens
MIHVRRHETRRNSKSHVPEQKSRVDWRRTKRSSISQLLDSDEELDSEEFDSDEELDSDESFENDEELDSNKGPDCNKTPGSERELNLSKIQSEGNDSKCLINSGNGSTYEEETNKIKHRNIDLQDQEKHLSQEDNDLNKQTGQIIEDDQEKHLSQEDNDLNKQTGQIIEDDLEEEDIKRGKRKRLSSVMCDSDESDDSDILVRKVGVKRPRRVVEDEGSSVEMEQKTPEKTLAAQKREKLQKLKELSKQRSRQRRSSGRDFEDSEKESCPSSDEVDEEEEEDNYESDEDGDDYIIDDFVVQDEEGDEENKNQQGEKLTTSQLKLVKQNSLYSFSDHYTHFERVVKALLINALDESFLGTLYDGTRQKSYAKDMLTSLHYLDNRFVQPRLESLVSRSRWKEQYKERVENYSNVSIHLKNPENCSCQACGLHRYCKYSVHLSGELYNTRTMQIDNFMSHDKQVFTVGRICASRTRIYHKLKHFKFKLYQECCTIAMTEEVEDEQVKETVERIFRRSKENGWIKEKYGQLEEYLNFADYFQEEKFEL

SEQ ID NO: 16964 - protein, 344 aa, Homo sapiens
MIHVRRHETRRNSKSHVPEQKSRVDWRRTKRSSISQLLDSDEELDSEEFDSDEELDSDESFENDEELDSNKGPDCNKTPGSERELNLSKIQSEGNDSKCLINSGNGSTYEEETNKIKHRNIDLQDQEKHLSQEDNDLNKQTGQIIEDDQEKHLSQEDNDLNKQTGQIIEDDLEEEDIKRGKRKRLSSVMCDSDESDDSDILVRKVGVKRPRRVVEDEGSSVEMEQKTPEKTLAAQKREKLQKLKELSKQRSRQRRSSGRDFEDSEKESCPSSDEVDEEEEEDNYESDEDGDDYIIDDFVVQDEEGDEENKNQQGEKLTTSQLKLVKQNSLCKFNIKKMFHELFS

SEQ ID NO: 16965 - protein, 520 aa, Homo sapiens
MSSSSYAKNGTADGPHSPTSQVARGTTTRRSRLKRSDGSTTSTSFILRQGSADSYTSRPSDSDVSLEEDREAIRQEREQQAAIQLERAKSKPVAFAVKTNVSYCGALDEDVPVPSTAISFDAKDFLHIKEKYNNDWWIGRLVKEGCEIGFIPSPLRLENIRIQQEQKRGRFHGGKSSGNSSSSLGEMVSGTFRATPTSTAKQKQKVTEHIPPYDVVPSMRPVVLVGPSLKGYEVTDMMQKALFDFLKHRFDGRISITRVTADISLAKRSVLNNPSKRAIIERSNTRSSLAEVQSEIERIFELARSLQLVVLDADTINHPAQLIKTSLAPIIVHVKVSSPKVLQRLIKSRGKSQSKHLNVQLVAADKLAQCPPEMFDVILDENQLEDACEHLGEYLEAYWRATHTTSSTPMTPLLGRNLGSTALSPYPTAISGLQSQRMRHSNHSTENSPIERRSLMTSDENYHNERARKSRNRLSSSSQHSRDHYPLVEEDYPDSYQDTYKPHRNRGSPGGYSHDSRHRL

SEQ ID NO: 16966 - protein, 486 aa, Homo sapiens
MYDNLYLHGIEDSEAGSADSYTSRPSDSDVSLEEDREAIRQEREQQAAIQLERAKSKPVAFAVKTNVSYCGALDEDVPVPSTAISFDAKDFLHIKEKYNNDWWIGRLVKEGCEIGFIPSPLRLENIRIQQEQKRGRFHGGKSSGNSSSSLGEMVSGTFRATPTSTAKQKQKVTEHIPPYDVVPSMRPVVLVGPSLKGYEVTDMMQKALFDFLKHRFDGRISITRVTADISLAKRSVLNNPSKRAIIERSNTRSSLAEVQSEIERIFELARSLQLVVLDADTINHPAQLIKTSLAPIIVHVKVSSPKVLQRLIKSRGKSQSKHLNVQLVAADKLAQCPPEMFDVILDENQLEDACEHLGEYLEAYWRATHTTSSTPMTPLLGRNLGSTALSPYPTAISGLQSQRMRHSNHSTENSPIERRSLMTSDENYHNERARKSRNRLSSSSQHSRDHYPLVEEDYPDSYQDTYKPHRNRGSPGGYSHDSRHRL

SEQ ID NO: 16967 - protein, 502 aa, Homo sapiens
MDVVARGTTTRRSRLKRSDGSTTSTSFILRQGSADSYTSRPSDSDVSLEEDREAIRQEREQQAAIQLERAKSKPVAFAVKTNVSYCGALDEDVPVPSTAISFDAKDFLHIKEKYNNDWWIGRLVKEGCEIGFIPSPLRLENIRIQQEQKRGRFHGGKSSGNSSSSLGEMVSGTFRATPTSTAKQKQKVTEHIPPYDVVPSMRPVVLVGPSLKGYEVTDMMQKALFDFLKHRFDGRISITRVTADISLAKRSVLNNPSKRAIIERSNTRSSLAEVQSEIERIFELARSLQLVVLDADTINHPAQLIKTSLAPIIVHVKVSSPKVLQRLIKSRGKSQSKHLNVQLVAADKLAQCPPEMFDVILDENQLEDACEHLGEYLEAYWRATHTTSSTPMTPLLGRNLGSTALSPYPTAISGLQSQRMRHSNHSTENSPIERRSLMTSDENYHNERARKSRNRLSSSSQHSRDHYPLVEEDYPDSYQDTYKPHRNRGSPGGYSHDSRHRL

SEQ ID NO: 16968 - protein, 458 aa, Homo sapiens
MSSSSYAKNGTADGPHSPTSQVARGTTTRRSRLKRSDGSTTSTSFILRQGSADSYTSRPSDSDVSLEEDREAIRQEREQQAAIQLERAKSKPVAFAVKTNVSYCGALDEDVPVPSTAISFDAKDFLHIKEKYNNDWWIGRLVKEGCEIGFIPSPLRLENIRIQQEQKRGRFHGGKSSGNSSSSLGEMVSGTFRATPTSTAKQKQKVTEHIPPYDVVPSMRPVVLVGPSLKGYEVTDMMQKALFDFLKHRFDGRISITRVTADISLAKRSVLNNPSKRAIIERSNTRSSLAEVQSEIERIFELARSLQLVVLDADTINHPAQLIKTSLAPIIVHVKVSSPKVLQRLIKSRGKSQSKHLNVQLVAADKLAQCPPSQRMRHSNHSTENSPIERRSLMTSDENYHNERARKSRNRLSSSSQHSRDHYPLVEEDYPDSYQDTYKPHRNRGSPGGYSHDSRHRL

SEQ ID NO: 16969 - protein, 752 aa, Homo sapiens
MAHLLGSQACMESLRTDLTDLQGAIVDVFSRAGPVRFPSWKFPDRMACDLDMVALLEHYDHVPGDPEFTQLSHAVLLELVIDRLLLLLQSCMSYLENLGSEQMMPPAQAAGPCMSVGLTVRRFWDSLLRLGTLHQQPLPQKGANQRETPTSKPTTKGEPARSPEYLTTKLIKPSSPVLGLPQTCQEPESIPVRASLQFPATTFKNTRSVHSQTIETALVPCDACASVQGSLQKVGKVVISLCQSQNLPSSLGQFQQLVQDSMGLRPLPAATVGRWAAEQRKDLTRLSKHVEALRAQLEEAEGQKDGLRKQAGKLEQALKQEQGARRRQAEEDEQCLSEWEHDKQQLLTETSDLKTKMATLERELKQQRESTQAVEAKAQQLQEEGERRAAAERQVQQLEEQVQQLEAQVQLLVGRLEGAGQQVCWASTELDKEKARVDSMVRHQESLQAKQRALLKQLDSLDQEREELRGSLDEAEAQRARVEEQLQSEREQGQCQLRAQQELLQSLQREKQGLEQATTDLRLTILELERELEELKERERLLVAFPDLHRPTETQIHGGRSSSVESQITCPTDSGNVTDHMERQVQSNDIRIRVLQEENGRLQSMLSKIREVAQQGGLKLIPQDRLWSPSSKGTQGATPPVQAKSTSPGPLGRQHLPSSRTGRTLLGQPCTSPPRQPCTSPPRQPCTSPPRQPCTSPSRQPCSQPSKSLLEGVTHLDTCTQNPIKVLVRLRKRLSPGRGQASSAHQPQERPM

SEQ ID NO: 16970 - protein, 297 aa, Homo sapiens
MGEHEQVKPLETSSSKVKAKTIVMIPDSQKLLRCELESLKSQLQAQTKAFEFLNHSVTMLEKESCLQQIKIQQLEEVLSPTGRQGEKEEHKWGMEQGRQELYGALTQGLQGLEKTLRDSEEMQRARTTRCLQLLAQEIRDSKKFLWEELELVREEVTFIYQKLQAQEDEISENLVNIQKMQKTQVKCRKILTKMKQQGHETAACPETEEIPQGASGCWKDDLQKELSDIWSAVHVLQNSIDSLTLCSGACPKASSLRGHKGHQCLSPPLPSWDSDSDCDQDLSQPPFSKSGRSFPPA

SEQ ID NO: 16971 - protein, 176 aa, Homo sapiens
MNRWYVKPLETSSSKVKAKTIVMIPDSQKLLRCELESLKSQLQAQTKAFEFLNHSVTMLEKESCLQQIKIQQLEEVLSPTGRQGEKEEHKWGMEQGRQELYGALTQGLQGLEKTLRDSEEMQRARTTRCLQLLAQEIRDRSGMAGGQLGVHRREGRPRTGEWRQDGGNGRCLGEGD

SEQ ID NO: 16972 - protein, 296 aa, Homo sapiens
MNRWYVKPLETSSSKVKAKTIVMIPDSQKLLRCELESLKSQLQAQTKAFEFLNHSVTMLEKESCLQQIKIQQLEEVLSPTGRQGEKEEHKWGMEQGRQELYGALTQGLQGLEKTLRDSEEMQRARTTRCLQLLAQEIRDSKKFLWEELELVREEVTFIYQKLQAQEDEISENLVNIQKMQKTQVKCRKILTKMKQQGHETAACPETEEIPQGASGCWKDDLQKELSDIWSAVHVLQNSIDSLTLCSGACPKASSLRGHKGHQCLSPPLPSWDSDSDCDQDLSQPPFSKSGRSFPPA

SEQ ID NO: 16973 - protein, 177 aa, Homo sapiens
MGEHEQVKPLETSSSKVKAKTIVMIPDSQKLLRCELESLKSQLQAQTKAFEFLNHSVTMLEKESCLQQIKIQQLEEVLSPTGRQGEKEEHKWGMEQGRQELYGALTQGLQGLEKTLRDSEEMQRARTTRCLQLLAQEIRDRSGMAGGQLGVHRREGRPRTGEWRQDGGNGRCLGEGD

SEQ ID NO: 16974 - protein, 257 aa, Homo sapiens
MTAAVFFGCAFIAFGPALALYVFTIATEPLRIIFLIAGAFFWLVSLLISSLVWFMARVIIDNKDGPTQKYLLIFGAFVSVYIQEMFRFAYYKLLKKASEGLKSINPGETAPSMRLLAYVSGLGFGIMSGVFSFVNTLSDSLGPGTVGIHGDSPQFFLYSAFMTLVIILLHVFWGIVFFDGCEKKKWGILLIVLLTHLLVSAQTFISSYYGINLASAFIILVLMGTWAFLAAGGSCRSLKLCLLCQDKNFLLYNQRSR

SEQ ID NO: 16975 - protein, 216 aa, Homo sapiens
MTAAVFFGCAFIAFGPALALYVFTIATEPLRIIFLIAGAFFWLVSLLISSLVWFMARVIIDNKDGPTQKYLLIFGAFVSVYIQEMFRFAYYKLLKKASEGLKSINPGETAPSMRLLAYAFMTLVIILLHVFWGIVFFDGCEKKKWGILLIVLLTHLLVSAQTFISSYYGINLASAFIILVLMGTWAFLAAGGSCRSLKLCLLCQDKNFLLYNQRSR

SEQ ID NO: 16976 - protein, 623 aa, Homo sapiens
MEPPQETNRPFSTLDNRSGQVQVLSATPLLQRNPYSSPDIMHIKGSEASSVPYALNQGTTALPKNKNQEGTGHRLLNMLRKTLKESDSEELEITQETPNLVPFGDVVGCLGIHIKNCRHFMPKISLQHYANLFIRISINKAVKCTKMCSLLSKNDEKNTVIKFDEVKYFSVQVPRRYDDKRNNILLELIQYDNREKRAFLLGSVQIHLYEVIQKGCFIEEVQVLHGNIFVCRLEVEFMFSYGNFGYGFSHQLKPLQKITEPSMFMNLAPPPERTDPVTKVITPQTVEYPAFLSPDLNVTVGTPAVQSSNQPSVVRLEKLQQQPRERLEKMKKEYRNLNTWIDKANYLESILMPKLEHKDSEETNIDEASENTKSNHPEEELENIVGVDIPLVNEEAETTANELLDNDSEKGLTIPTLNQSDQDNSTADASKNDESTPSPTEVHSLCTISNQETIKAGRIPPLGERQSESMPDRKMKNVFFPLEVKLKDNYPSILKADSSLSEVAFSPKEYNSPSFRPEYIEFKPKFQDCSDKFEDLHDMTSFTHLKKVKSRSRLLGKSSDDIHNHARHSARPYTAPEVNKQRESYSGKFTSRRMVSSGLVHINDKTSDYEMHKMRPKKIKRGY

SEQ ID NO: 16977 - protein, 395 aa, Homo sapiens
MEPPQETNRPFSTLDNRSGQVQVLSATPLLQRNPYSSPDIMHIKGSEASSVPYALNQGTTALPKNKNQEGTGHRLLNMLRKTLKESDSEELEITQETPNLVPFGDVVGCLGIHIKNCRHFMPKISLQHYANLFIRISINKAVKCTKMCSLLSKNDEKNTVIKFDEVKYFSVQVPRRYDDKRNNILLELIQYDNREKRAFLLGSVQIHLYEVIQKGCFIEEVQVLHGNIFVCRLEVEFMFSYGNFGYGFSHQLKPLQKITEPSMFMNLAPPPERTDPVTKVITPQTVEYPAFLSPDLNVTVGTPAVQSSNQPSVVRLEKLQQQPRERLEKMKKEYRNLNTWIDKANYLESILMPKLEHKDSEETNIDEASENTKSNHPEEELENIVGVGGFFTKRI

SEQ ID NO: 16978 - protein, 550 aa, Homo sapiens
MEPPQETNRPFSTLDNRSGQVQVLSATPLLQRNPYSSPDIMHIKGSEASSVPYALNQGTTALPKNKNQEGTGHRLLNMLRKTLKESDSEELEITQETPNLVPFGDVVGCLGIHIKNCRHFMPKISLQHYANLFIRISINKAVKCTKMCSLLSKNDEKNTVIKFDEVKYFSVQVPRRYDDKRNNILLELIQYDNREKRAFLLGSVQIHLYEVIQKGCFIEEVQVLHGNIFVCRLEVEFMFSYGNFGYGFSHQLKPLQKITEPSMFMNLAPPPERTDPVTKVITPQTVEYPAFLSPDLNVTVGTPAVQSSNQPSVVRLEKLQQQPRERLEKMKKEYRNLNTWIDKANYLESILMPKLEHKDSEETNIDEASENTKSNHPEEELENIVGVDIPLVNEEAETTANELLDNDSEKGLTIPTLNQSDQDNSTADASKNDESTPSPTEVHSLCTISNQETIKAGRIPPLGERQSESMPDRKMKNVFFPLEVKLKDNYPSILKADSSLSEVNLRSICINPKSRNLDSSPTEISWQNNNLNLAERENTGLVSTRLKIKR

SEQ ID NO: 16979 - protein, 1820 aa, Homo sapiens
MEPPQETNRPFSTLDNRSGQVQVLSATPLLQRNPYSSPDIMHIKGSEASSVPYALNQGTTALPKNKNQEGTGHRLLNMLRKTLKESDSEELEITQETPNLVPFGDVVGCLGIHIKNCRHFMPKISLQHYANLFIRISINKAVKCTKMCSLLSKNDEKNTVIKFDEVKYFSVQVPRRYDDKRNNILLELIQYDNREKRAFLLGSVQIHLYEVIQKGCFIEEVQVLHGNIFVCRLEVEFMFSYGNFGYGFSHQLKPLQKITEPSMFMNLAPPPERTDPVTKVITPQTVEYPAFLSPDLNVTVGTPAVQSSNQPSVVRLEKLQQQPRERLEKMKKEYRNLNTWIDKANYLESILMPKLEHKDSEETNIDEASENTKSNHPEEELENIVGVDIPLVNEEAETTANELLDNDSEKGLTIPTLNQSDQDNSTADASKNDESTPSPTEVHSLCTISNQETIKAGRIPPLGERQSESMPDRKMKNVFFPLEVKLKDNYPSILKADSSLSEVAFSPKEYNSPSFRPEYIEFKPKFQFQKFNKNGFDPFLRNINKMSVRKRKDQDIYKYRNILGAEVIEHEDQDPPYPAQSKTAGPANTTWAHDPNIFTTKMLETENKLAPDPTINTIKGLDTKNSLKENLPNVSLPSIKGESSRAGNVQANTCHLSKSLNFTPHIEYLKQSMILKSILSENLQDLSDKLFSKPEVSMNSEAREKSSSPLLSIHDKSSSSMEDNVLEKKQDLNNWLSEKDILNSKTTLSQIIKNIPADSFSEGSQIIENIPADSLLEGGQVIKNIPEYSLSEGGQIIKNIPADSFLESGPGQSPEVEEHVSKKHFEADERDFPIKKNSSTKKKHLISEVPNSKSGSSGTVHDYIMRQIFTAPIFSELEIEVKEPSETPMNLENQLPTPWKRSLSSHILFHEENADEIELPQPRSATSQIIQAFPIDTLLESGIIKVIELDKEHHKSSLLGTGITSPKGNLKDSQEYYSEIRSETEPLSEQSIPIIPKDTTSVSRAEFIQEDQNMFPQDSSYYSIANKELYLPRNGQRLCKDKNDLSSTLESLTNSLMDKLSESDEIMLKSFLKNIFNVFFKYNHSERRGQPEKELERLIQPSFTSDTEHLEELQEDFDKADKLDRKPILSPKLRVFLEELSESEVKHLKSELSKQIQHYLVERLSESGHITKEDLPKIYQNLYLMNEKAEQKGPNSFQGKYSETVKEIMSFVNNFNHHFIDKHLEIKLRSFLKEILQNYFLKNISESSLFNETASETIYPNISSLRTKSVSISFHELEQDISKGSFGRRFEINMKYPLSKSLQNYLIALSENELLHLKADLSKHLQSLFIEKLSKSGLMTKKQLEGINQHINLLNSSSIPLKYIKTHLPFRDDCHFVEKHSEKQNKYSRIVQQTTLQTVSEDKLREAELIREKEKKYFPLQNLKGNSSLIKEQKSYYTKEEAKTPSLIKVQPSSNENIQASPLSKSSEILTDILLKKLRKEHVFTQLPQAENSVHKTEIQDPYSWGGKSKITQSKAWCEKTLKMKSLDRKEHVNIYKWTVQEKPEAVLTSYPRIPNARMPREDEYLNRITFPSWQSSTLTHFNTETGEKSKLEDQYCQTLKGNNNNNKKHLVTFAQYKKEIQTLYIKPDEICSEKCAKFPEIQSFQYKVVEDEKNLKPHLFPELFKIEDLKPKVRKERDRVAQPKKSFNKIVRILPTTLPTTRIHLKKSVPRTLLHWTARRTIHDCSDKFEDLHDMTSFTHLKKVKSRSRLLGKSSDDIHNHARHSARPYTAPEVNKQRESYSGKFTSRRMVSSGLVHINDKTSDYEMHKMRPKKIKRGY

SEQ ID NO: 16980 - protein, 858 aa, Homo sapiens
MMPGPRPRKGPQARGQGVAAAKQMGLFMEFGPEDMLLGMDEAEDDEDLEAELLALTGEAQTTGKKPAPKGQAPLPMAHIEKLAADCMRDVEEEEEEEGLEEDAELLTELQEVLGVDEETEPLDGDEVADPGGSEEENGLEDTEPPVQTAVLTASAPAAQAGASQGLHALLEERIHNYREAAASAKEAGEAAKARRCERGLKTLESQLASVRRGRKINEDEIPPPVALGKRPLAPQEPANRSPETDPPAPPALESDNPSQPETSLPGISAQPVSDLDPDPRALLSSRQREYKVAALSAKRAGELDRARELMRIGKRFGAVLEALEKGQPVDLSAMPPAPEDLKPQQASQAPTAPSVIPPAVERVQPVMAPDVPATPVAPTESQTVLDALQQRLNKYREAGIQARSGGDERKARMHERIAKQYQDAIRAHRAGRKVNFAELPVPPGFPPIPGLESTMGVEEDAVAATLAAAEKLASAEDSAPADKDEDEPPGHLQGEPPAQAPVAKKPARPTVPSSQRLPEPRASSSKESPSPSVREQLALLEARKLQYQRAALQAKRSQDLEQAKAYLRVAKWLEAQIIQARSGRPVDLSKVPSPLTDEEGDFILIHHEDLRLSQKAEEVYAQLQKMLLEQQEKCLLFSKQFMHQGNVAETTRFEKLAQDRKKQLEILQLAQAQGLDPPTHHFELKTFQTVRIFSELNSTEMHLIIVRGMNLPAPPGVTPDDLDAFVRFEFHYPNSDQAQKSKTAVVKNTNSPEFDQLFKLNINRNHRGFKRVIQSKGIKFEIFHKGSFFRSDKLVGTAHLKLERLENECEIREIVEVLDGRKPTGGKLEVKVRLREPLSGQDVQMVTENWLVLEPRGL

SEQ ID NO: 16981 - protein, 852 aa, Homo sapiens
MMPGPRPRKGPQARGQGVAAAKQMGLFMEFGPEDMLLGMDEAEDDEDLEAELLALTGEAQTTGKKPAPKGQAPLPMAHIEKLAADCMRDVEEEEEEEGLEEDAELLTELQEVLGVDEETEPLDGDEVADPGGSEEENGLEDTEPPVQTAVLTASAPAAQAGASQGLHALLEERIHNYREAAASAKEAGEAAKARRCERGLKTLESQLASVRRGRKINEDEIPPPVALGKRPLAPQEPANRSPETDPPAPPALESDNPSQPETSLPGISAQPVSDLDPDPRALLSSRQREYKVAALSAKRAGELDRARELMRIGKRFGAVLEALEKGQPVDLSAMPPAPEDLKPQQASQAPTAPSVIPPAVERVQPVMAPDVPATPVAPTESQTVLDALQQRLNKYREAGIQARSGGDERKARMHERIAKQYQDAIRAHRAGRKVNFAELPVPPGFPPIPGLESTMGVEEDAVAATLAAAEKLASAEDSAPADKDEDEGEPPAQAPVAKKPARPTVPSSQRLPEPRASSSKESPSPSVREQLALLEARKLQYQRAALQAKRSQDLEQAKAYLRVAKWLEAQIIQARSGRPVDLSKVPSPLTDEEGDFILIHHEDLRLSQKAEEVYAQLQKMLLEQQEKCLLFSKQFMHQGNVAETTRFEKLAQDRKKQLEILQLAQAQGLDPPTHHFELKTFQTVRIFSELNSTEMHLIIVRGMNLPAPPGVTPDDLDAFVRFEFHYPNSDQAQKSKTAVVKNTNSPEFDQLFKLNINRNHRGFKRVIQSKGIKFEIFHKGSFFRSDKLVGTAHLKLERLENECEIREIVEVLDGRKPTGGKLEVKVRLREPLSGQDVQMVTENWLVLEPRGL

SEQ ID NO: 16982 - protein, 532 aa, Homo sapiens
MRIGKRFGAVLEALEKGQPVDLSAMPPAPEDLKPQQASQAPTAPSVIPPAVERVQPVMAPDVPATPVAPTESQTVLDALQQRLNKYREAGIQARSGGDERKARMHERIAKQYQDAIRAHRAGRKVNFAELPVPPGFPPIPGLESTMGVEEDAVAATLAAAEKLASAEDSAPADKDEDEGEPPAQAPVAKKPARPTVPSSQRLPEPRASSSKESPSPSVREQLALLEARKLQYQRAALQAKRSQDLEQAKAYLRVAKWLEAQIIQARSGRPVDLSKVPSPLTDEEGDFILIHHEDLRLSQKAEEVYAQLQKMLLEQQEKCLLFSKQFMHQGNVAETTRFEKLAQDRKKQLEILQLAQAQGLDPPTHHFELKTFQTVRIFSELNSTEMHLIIVRGMNLPAPPGVTPDDLDAFVRFEFHYPNSDQAQKSKTAVVKNTNSPEFDQLFKLNINRNHRGFKRVIQSKGIKFEIFHKGSFFRSDKLVGTAHLKLERLENECEIREIVEVLDGRKPTGGKLEVKPMASTRRGVRPRLCRR

SEQ ID NO: 16983 - protein, 214 aa, Homo sapiens
MLLEQQEKCLLFSKQFMHQGNVAETTRFEKLAQDRKKQLEILQLAQAQGLDPPTHHFELKTFQTVRIFSELNSTEMHLIIVRGMNLPAPPGVTPDDLDAFVRFEFHYPNSDQAQKSKTAVVKNTNSPEFDQLFKLNINRNHRGFKRVIQSKGIKFEIFHKGSFFRSDKLVGTAHLKLERLENECEIREIVEMERFRRSEKSHRGTQEKAASLFP

SEQ ID NO: 16984 - protein, 123 aa, Homo sapiens
MMPGPRPRKGPQARGQGVAAAKQMGLFMEFGPEDMLLGMDEAEDDEDLEAELLALTGEAQTTGKKPAPKGQAPLPMAHIEKLAADCMRDVEEEEEEEGLEEDAGRDCAGDDFPSFAGFRSLCT

SEQ ID NO: 16985 - protein, 373 aa, Homo sapiens
MSLRRHIGNPEYLMKRIPQNPRYQHIKSRLDTGNSMTKYTEKLEEIKKNYRYKKDELFKRLKVTTFAQLIIQVASLSDQTLEVTAEEIQRLEDNDSAASDPDAETTARTNGKGNPGEQSPSPEQFINNAGAGDSSRSTLQSVISGVGELDLDKGPVKKAEPHTKDKPYPDCPFLLLDVRDRDSYQQCHIVGAYSYPIATLSRTMNPYSNDILEYKNAHGKIIILYDDDERLASQAATTMCERGFENLFMLSGGLKVLAQKFPEGLITGSLPASCQQALPPGSARKRSSPKGPPLPAENKWRFTPEDLKKIEYYLEEEQGPADHPSRLNQANSSGRESKVPGARSAQNLPGGGPASHSNPRSLSSGHLQGKPWK

SEQ ID NO: 16986 - protein, 301 aa, Homo sapiens
MSLRRHIGNPEYLMKRIPQNPRYQHIKSRLDTGNSMTKYTEKLEEIKKNYRYKKDELFKRLKVTTFAQLIIQVASLSDQTLEVTAEEIQRLEDNDSAASDPDAETTARTNGKGNPGEQSPSPEQFINNAGAGDSSRSTLQSVISGVGELDLDKGPVKKAEPHTKDKPYPDCPFLLLDVRDRDSYQQCHIVGAYSYPIATLSRTMNPYSNDILEYKNAHGKIIILYDDDERLASQAATTMCERGFENLFMLSGGRLNQANSSGRESKVPGARSAQNLPGGGPASHSNPRSLSSGHLQGKPWK

SEQ ID NO: 16987 - protein, 54 aa, Homo sapiens
MSLRRHIGNPEYLMKRIPQNPRYQHIKSRLDTGACVYLTSSPALPDCAMNGLCF

SEQ ID NO: 16988 - protein, 285 aa, Homo sapiens
MSLRRHIGNPEYLMKRIPQNPRYQHIKSRLDTDYRYKKDELFKRLKVTTFAQLIIQVASLSDQTLEVTAEEIQRLEDNDSAASDPDAETTARTNGKGNPGEQSPSPEQFINNAGAGDSSRSTLQSVISGVGELDLDKGPVKKAEPHTKDKPYPDCPFLLLDVRDRDSYQQCHIVGAYSYPIATLSRTMNPYSNDILEYKNAHGKIIILYDDDERLASQAATTMCERGFENLFMLSGGRLNQANSSGRESKVPGARSAQNLPGGGPASHSNPRSLSSGHLQGKPWK

SEQ ID NO: 16989 - protein, 428 aa, Homo sapiens
MFSLMASCCGWFKRWREPVRKVTLLMVGLDNAGKTATAKGIQGEYPEDVAPTVGFSKINLRQGKFEVTIFDLGGGIRIRGIWKNYYAESYGVIFVVDSSDEERMEETKEAMSEMLRHPRISGKPILVLANKQDKEGALGEADVIECLSLEKLVNEHKCLCQIEPCSAISGYGKKIDKSIKKGLYWLLHVIARDFDALNERIQKETTEQRALEEQEKQERAERVRKLREERKQNEQEQAELDGTSGLAELDPEPTNPFQPIASVIIENEGKLEREKKNQKMEKDSDGCHLKHKMEHEQIETQGQVNHNGQKNNEFGLVENYKEALTQQLKNEDETDRPSLESANGKKKTKKLRMKRNHRVEPLNIDDCAPESPTPPPPPPPVGWGTPKVTRLPKLEPLGETHHNDFYRKPLPPLAVPQRPNSDAHDVIS

SEQ ID NO: 16990 - protein, 321 aa, Homo sapiens
MFSLMASCCGWFKRWREPVRLANKQDKEGALGEADVIECLSLEKLVNEHKCLCQIEPCSAISGYGKKIDKSIKKGLYWLLHVIARDFDALNERIQKETTEQRALEEQEKQERAERVRKLREERKQNEQEQAELDGTSGLAELDPEPTNPFQPIASVIIENEGKLEREKKNQKMEKDSDGCHLKHKMEHEQIETQGQVNHNGQKNNEFGLVENYKEALTQQLKNEDETDRPSLESANGKKKTKKLRMKRNHRVEPLNIDDCAPESPTPPPPPPPVGWGTPKVTRLPKLEPLGETHHNDFYRKPLPPLAVPQRPNSDAHDVIS

SEQ ID NO: 16991 - protein, 325 aa, Homo sapiens
MEETKEAMSEMLRHPRISGKPILVLANKQDKEGALGEADVIECLSLEKLVNEHKCLCQIEPCSAISGYGKKIDKSIKKGLYWLLHVIARDFDALNERIQKETTEQRALEEQEKQERAERVRKLREERKQNEQEQAELDGTSGLAELDPEPTNPFQPIASVIIENEGKLEREKKNQKMEKDSDGCHLKHKMEHEQIETQGQVNHNGQKNNEFGLVENYKEALTQQLKNEDETDRPSLESANGKKKTKKLRMKRNHRVEPLNIDDCAPESPTPPPPPPPVGWGTPKVTRLPKLEPLGETHHNDFYRKPLPPLAVPQRPNSDAHDVIS

SEQ ID NO: 16992 - protein, 421 aa, Homo sapiens
MPRCTYQLEQNPGFLPDGPGVHARAHCQDLSGPYGHEFATSESLGGRVGKTRAPQSGARSRMERAGPAGEEGGAREGRLLPRAPGAWVLRACAERAALEVGAASADTGVRGCGARGPAPLLASAGGGRARDGTWGVRTKGSGAALPSRPASRAAPRPEASSPPLPLEKARGGLSGPQGGRARGAMAHVGSRKRSRSRSRSRGRGSEKRKKKSRKDTSRNCSASTSQGRKASTAPGAEASPSPCITERSKQKARRRTRSSSSSSSSSSSSSSSSSSSSSSSSSDGRKKRGKYKDKRRKKKKKRKKLKKKGKEKAEAQQVEALPGPSLDQWHRSAGEEEDGPVLTDEQKSRIQAMKPMTKEEWDARQSIIRKVVDPETGRTRLIKGDGEVLEEIVTKERHREINKQATRGDCLAFQMRAGLLP

SEQ ID NO: 16993 - protein, 413 aa, Homo sapiens
MPRCTYQLEQNPGFLPDGPGVHARAHCQDLSGPYGHEFATSESLGGRVGKTRAPQSGARSRMERAGPAGEEGGAREGRLLPRAPGAWVLRACAERAALEVGAASADTGVRGCGARGPAPLLASAGGGRARDGTWGVRTKGSGAALPSRPASRAAPRPEASSPPLPLEKARGGLSGPQGGRARGAMAHVGSRKRSRSRSRSRGRGSEKRKKKSRKDTSRNCSASTSQGRKASTAPGAEERSKQKARRRTRSSSSSSSSSSSSSSSSSSSSSSSSSDGRKKRGKYKDKRRKKKKKRKKLKKKGKEKAEAQQVEALPGPSLDQWHRSAGEEEDGPVLTDEQKSRIQAMKPMTKEEWDARQSIIRKVVDPETGRTRLIKGDGEVLEEIVTKERHREINKQATRGDCLAFQMRAGLLP

SEQ ID NO: 16994 - protein, 402 aa, Homo sapiens
MPRCTYQLEQNPGFLPDGPGVHARAHCQDLSGPYGHEFATSESLGGRVGKTRAPQSGARSRMERAGPAGEEGGAREGRLLPRAPGAWVLRACAERAALEVGAASADTGVRGCGARGPAPLLASAGGGRARDGTWGVRTKGSGAALPSRPASRAAPRPEASSPPLPLEKARGGLSGPQGGRARGAMAHVGSRKRSRSRSRSRGRGSEKRKKKSRKDTSRNCSASTSQERSKQKARRRTRSSSSSSSSSSSSSSSSSSSSSSSSSDGRKKRGKYKDKRRKKKKKRKKLKKKGKEKAEAQQVEALPGPSLDQWHRSAGEEEDGPVLTDEQKSRIQAMKPMTKEEWDARQSIIRKVVDPETGRTRLIKGDGEVLEEIVTKERHREINKQATRGDCLAFQMRAGLLP

SEQ ID NO: 16995 - protein, 399 aa, Homo sapiens
MPRCTYQLEQNPGFLPDGPGVHARAHCQDLSGPYGHEFATSESLGGRVGKTRAPQSGARSRMERAGPAGEEGGAREGRLLPRAPGAWVLRACAERAALEVGAASADTGVRGCGARGPAPLLASAGGGRARDGTWGVRTKGSGAALPSRPASRAAPRPEASSPPLPLEKARGGLSGPQGGRARGAMAHVGSRKRSRSRSRSRGRGSEKRKKKSRKDTSRNCSASTSQERSKQKARRRTRSSSSSSSSSSSSSSSSSSSSSSSSSDGRKKRGKYKDKRRKKKKKRKKLKKKGKEKAEAQQVEALPGPSLDQWHRSAGEEEDGPVLTDEQKSRIQAMKPMTKEEWDARQSIIRKVVDPETGRTRLIKGDGEVLEEIVTKERHREINKVGVAPLPAIRPQLCL

SEQ ID NO: 16996 - protein, 365 aa, Homo sapiens
MPRCTYQLEQNPGFLPDGPGVHARAHCQDLSGPYGHEFATSESLGGRVGKTRAPQSGARSRMERAGPAGEEGGAREGRLLPRAPGAWVLRACAERAALEVGAASADTGVRGCGARGPAPLLASAGGGRARDGTWGVRTKGSGAALPSRPASRAAPRPEASSPPLPLEKARGGLSGPQGGRARGAMAHVGSRKRSRSRSRSRGRGSEKRKKKSRKDTSRNCSASTSQGRKASTAPGAEERSKQKARRRTRSSSSSSSSSSSSSSSSSSSSSSSSSDGRKKRGKYKDKRRKKKKKRKKLKKKGKEKAEAQQSIIRKVVDPETGRTRLIKGDGEVLEEIVTKERHREINKQATRGDCLAFQMRAGLLP

SEQ ID NO: 16997 - protein, 276 aa, Homo sapiens
MPRCTYQLEQNPGFLPDGPGVHARAHCQDLSGPYGHEFATSESLGGRVGKTRAPQSGARSRMERAGPAGEEGGAREGRLLPRAPGAWVLRACAERAALEVGAASADTGVRGCGARGPAPLLASAGGGRARDGTWGVRTKGSGAALPSRPASRAAPRPEASSPPLPLEKARGGLSGPQGGRARGAMAHVGSRKRSRSRSRSRGRGSEKRKKKSRKDTSRNCSASTSQGRKASTAPGAEVLLAPLLPPRPPPLPPVMAGRSGGSTRTRGGRRRRRGRS

SEQ ID NO: 16998 - protein, 226 aa, Homo sapiens
MAHVGSRKRSRSRSRSRGRGSEKRKKKSRKDTSRNCSASTSQASPSPCITERSKQKARRRTRSSSSSSSSSSSSSSSSSSSSSSSSSDGRKKRGKYKDKRRKKKKKRKKLKKKGKEKAEAQQVEALPGPSLDQWHRSAGEEEDGPVLTDEQKSRIQAMKPMTKEEWDARQSIIRKVVDPETGRTRLIKGDGEVLEEIVTKERHREINKQATRGDCLAFQMRAGLLP

SEQ ID NO: 16999 - protein, 575 aa, Homo sapiens
MQSPWKILTVAPLFLLLSLQSSASPANDDQSRPSLSNGHTCVGCVLVVSVIEQLAQVHNSTVQASMERLCSYLPEKLFLKTTCYLVIDKFGSDIIKLLSADMNADVVCHTLEFCKQNTGQPLCHLYPLPKETWKFTLQKARQIVKKSPILKYSRSGSDICSLPVLAKICQKIKLAMEQSVPFKDVDSDKYSVFPTLRGYHWRGRDCNDSDESVYPGRRPNNWDVHQDSNCNGIWGVDPKDGVPYEKKFCEGSQPRGIILLGDSAGAHFHISPEWITASQMSLNSFINLPTALTNELDWPQLSGATGFLDSTVGIKEKSIYLRLWKRNHCNHRDYQNISRNGASSRNLKKFIESLSRNKVLDYPAIVIYAMIGNDVCSGKSDPVPAMTTPEKLYSNVMQTLKHLNSHLPNGSHVILYGLPDGTFLWDNLHNRYHPLGQLNKDMTYAQLYSFLNCLQVSPCHGWMSSNKTLRTLTSERAEQLSNTLKKIAASEKFTNFNLFYMDFAFHEIIQEWQKRGGQPWQLIEPVDGFHPNEVALLLLADHFWKKVQLQWPQILGKENPFNPQIKQVFGDQGGH

SEQ ID NO: 17000 - protein, 543 aa, Homo sapiens
MQSPWKILTVAPLFLLLSLQSSASPANDDQSRPSLSNGHTCVEKLFLKTTCYLVIDKFGSDIIKLLSADMNADVVCHTLEFCKQNTGQPLCHLYPLPKETWKFTLQKARQIVKKSPILKYSRSGSDICSLPVLAKICQKIKLAMEQSVPFKDVDSDKYSVFPTLRGYHWRGRDCNDSDESVYPGRRPNNWDVHQDSNCNGIWGVDPKDGVPYEKKFCEGSQPRGIILLGDSAGAHFHISPEWITASQMSLNSFINLPTALTNELDWPQLSGATGFLDSTVGIKEKSIYLRLWKRNHCNHRDYQNISRNGASSRNLKKFIESLSRNKVLDYPAIVIYAMIGNDVCSGKSDPVPAMTTPEKLYSNVMQTLKHLNSHLPNGSHVILYGLPDGTFLWDNLHNRYHPLGQLNKDMTYAQLYSFLNCLQVSPCHGWMSSNKTLRTLTSERAEQLSNTLKKIAASEKFTNFNLFYMDFAFHEIIQEWQKRGGQPWQLIEPVDGFHPNEVALLLLADHFWKKVQLQWPQILGKENPFNPQIKQVFGDQGGH

SEQ ID NO: 17001 - protein, 757 aa, Homo sapiens
MALGEEKAEAEASEDTKAQSYGRGSCRERELDIPGPMSGEQPPRLEAEGGLISPVWGAEGIPAPTCWIGTDPGGPSRAHQPQASDANREPVAERSEPALSGLPPATMGSGDLLLSGESQVEKTKLSSSEEFPQTLSLPRTTTICSGHDADTEDDPSLADLPQALDLSQQPHSSGLSCLSQWKSVLSPGSAAQPSSCSISASSTGSSLQGHQERAEPRGGSLAKVSSSLEPVVPQEPSSVVGLGPRPQWSPQPVFSGGDASGLGRRRLSFQAEYWACVLPDSLPPSPDRHSPLWNPNKEYEDLLDYTYPLRPGPQLPKHLDSRVPADPVLQDSGVDLDSFSVSPASTLKSPTNVSPNCPPAEATALPFSGPREPSLKQWPSRVPQKQGGMGLASWSQLASTPRAPGSRDARWERREPALRGAKDRLTIGKHLDMGSPQLRTRDRGWPSPRPEREKRTSQSARRPTCTESRWKSEEEVESDDEYLALPARLTQVSSLVSYLGSISTLVTLPTGDIKGQSPLEVSDSDGPASFPSSSSQSQLPPGAALQGSGDPEGQNPCFLRSFVRAHDSAGEGSLGSSQALGVSSGLLKTRPSLPARLDRWPFSDPDVEGQLPRKGGEQGKESLVQCVKTFCCQLEELICWLYNVADVTDHGTAARSNLTSLKSSLQLYRQFKKDIDEHQSLTESVLQKGEILLQCLLENTPVLEDVLGRIAKQSGELESHADRLYDSILASLDMLAGCTLIPDKKPMAAMEHPCEGV

SEQ ID NO: 17002 - protein, 620 aa, Homo sapiens
MALGEEKAEAEASEDTKAQSYGRGSCRERELDIPGPMSGEQPPRLEAEGGLISPVWGAEGIPAPTCWIGTDPGGPSRAHQPQASDANREPVAERSEPALSGLPPATMGSGDLLLSGESQVEKTKLSSSEEFPQTLSLPRTTTICSGHDADTEDDPSLADLPQALDLSQQPHSSGLSCLSQWKSVLSPGSAAQPSSCSISASSTGSSLQGHQERAEPRGGSLAKVSSSLEPVVPQEPSSVVGLGPRPQWSPQPVFSGGDASGLGRRRLSFQAEYWACVLPDSLPPSPDRHSPLWNPNKEYEDLLDYTYPLRPGPQLPKHLDSRVPADPVLQDSGVDLDSFSVSPASTLKSPTNVSPNCPPAEATALPFSGPREPSLKQWPSRVPQKQGGMGLASWSQLASTPRAPGSRDARWERREPALRGAKDRLTIGKHLDMGSPQLRTRDRGWPSPRPEREKRTSQSARRPTCTESRWKSEEEVESDDEYLALPARLTQTFCCQLEELICWLYNVADVTDHGTAARSNLTSLKSSLQLYRQFKKDIDEHQSLTESVLQKGEILLQCLLENTPVLEDVLGRIAKQSGELESHADRLYDSILASLDMLAGCTLIPDKKPMAAMEHPCEGV

SEQ ID NO: 17003 - protein, 442 aa, Homo sapiens
MLVHTYSAMERPDGLGAAAGGARLSSLPQAAYGPAPPLCHTPAATAAAEFQPPYFPPPYPQPPLPYGQAPDAAAAFPHLAGDPYGGLAPLAQPQPPQAAWAAPRAAARAHEEPPGLLAPPARALGLDPRRDYATAVPRLLHGLADGAHGLADAPLGLPGLAAAPGLEDLQAMDEPGMSLLDQSVIKKVPIPSKASSLSALSLAKDSLVGGITNPGEVFCSVPGRLSLLSSTSKYKVTVGEVQRRLSPPECLNASLLGGVLRRAKSKNGGRCLRERLEKIGLNLPAGRRKAANVTLLTSLVEGEAVHLARDFGYVCETEFPAKAAAEYLCRQHADPGELHSRKSMLLAAKQICKEFADLMAQDRSPLGNSRPALILEPGVQSCLTHFSLITHGFGGPAICAALTAFQNYLLESLKGLDKMFLSSVGSGHGETKASEKDAKHRK

SEQ ID NO: 17004 - protein, 188 aa, Homo sapiens
MFSCCFPTSRGCCFRNGGSESLFRRCRRRLIPHPRRLSPVVIRRIQVPQDSLGQALAGQATPEIPLGLQLHTVLVQEIQELIEAQTLAPGPCAEVRALPAPAAEPEPAWEEAPPERALELEGAPAKDQTNEELPEITEVPESIKRRLGRRVPAATPAPRGNLLLQAWMRVHSWASRLFAPNVLPGTGP

SEQ ID NO: 17005 - protein, 379 aa, Homo sapiens
MEKYEKLAKTGEGSYGVVFKCRNKTSGQVVAVKKFVESEDDPVVKKIALREIRMLKQLKHPNLVNLIEVFRRKRKMHLVFEYCDHTLLNELERNPNGVADGVIKSVLWQTLQALNFCHIHNCIHRDIKPENILITKQGIIKICDFGFAQILIPGDAYTDYVATRWYRAPELLVGDTQYGSSVDIWAIGCVFAELLTGQPLWPGKSDVDQLYLIIRTLGKLIPRHQSIFKSNGFFHGISIPEPEDMETLEEKFSDVHPVALNFMKGCLKMNPDDRLTCSQLLESSYFDSFQEAQIKRKARNEGRNRRRQQQAPKSAFPRLFLKTKICQVQRNETQTSGNQILPNGPILQNSMVTVMTNINSAVYQVTVLHLLSENFEVKS

SEQ ID NO: 17006 - protein, 315 aa, Homo sapiens
MEKYEKLAKTGEGSYGVVFKCRNKTSGQVVAVKKFVESEDDPVVKKIALREIRMLKQLKHPNLVNLIEVFRRKRKMHLVFEYCDHTLLNELERNPNGVADGVIKSVLWQTLQALNFCHIHNCIHRDIKPENILITKQGIIKICDFGFAQILIPGDAYTDYVATRWYRAPELLVGDTQYGSSVDIWAIGCVFAELLTGQPLWPGKSDVDQLYLIIRTLGKLIPRHQSIFKSNGFFHGISIPEPEDMETLEEKFSDVHPVALNFMKGCLKMNPDDRLTCSQLLESSYFDSFQEAQIKRKARNEGRNRRRQQVLPLKS

SEQ ID NO: 17007 - protein, 520 aa, Homo sapiens
MSNKCDVVVVGGGISGMAAAKLLHDSGLNVVVLEARDRVGGRTYTLRNQKVKYVDLGGSYVGPTQNRILRLAKELGLETYKVNEVERLIHHVKGKSYPFRGPFPPVWNPITYLDHNNFWRTMDDMGREIPSDAPWKAPLAEEWDNMTMKELLDKLCWTESAKQLATLFVNLCVTAETHEVSALWFLWYVKQCGGTTRIISTTNGGQERKFVGGSGQVSERIMDLLGDRVKLERPVIYIDQTRENVLVETLNHEMYEAKYVISAIPPTLGMKIHFNPPLPMMRNQMITRVPLGSVIKCIVYYKEPFWRKKDYCGTMIIDGEEAPVAYTLDDTKPEGNYAAIMGFILAHKARKLARLTKEERLKKLCELYAKVLGSLEALEPVHYEEKNWCEEQYSGGCYTTYFPPGILTQYGRVLRQPVDRIYFAGTETATHWSGYMEGAVEAGERAAREILHAMGKIPEDEIWQSEPESVDVPAQPITTTFLERHLPSVPGLLRLIGLTTIFSATALGFLAHKRGLLVRV

SEQ ID NO: 17008 - protein, 411 aa, Homo sapiens
MAAAKLLHDSGLNVVVLEARDRVGGRTYTLRNQKVKYVDLGGSYVGPTQNRILRLAKELGLETYKVNEVERLIHHVKGKSYPFRGPFPPVWNPITYLDHNNFWRTMDDMGREIPSDAPWKAPLAEEWDNMTMKELLDKLCWTESAKQLATLFVNLCVTAETHEVSALWFLWYVKQCGGTTRIISTTNGGQERKFVGGSGQVSERIMDLLGDRVKLERPVIYIDQTRENVLVETLNHEMYEAKYVISAIPPTLGMKIHFNPPLPMMRNQMITRVPLGSVIKCIVYYKEPFWRKKDYCGTMIIDGEEAPVAYTLDDTKPEGNYAAIMGFILAHKARKLARLTKEERLKKLCELYAKVLGSLEALEGSTPASGQDLLCRHRDCHTLERLHGGGCRGRGESSPRDPACHGEDSRG

SEQ ID NO: 17009 - protein, 351 aa, Homo sapiens
MSFPCKFVASFLLIFNVSSKGAVSKEITNALETWGALGQDINLDIPSFQMSDDIDDIKWEKTSDKKKIAQFRKEKETFKEKDTYKLFKNGTLKIKHLKTDDQDIYKVSIYDTKGKNVLEKIFDLKIQERVSKPKISWTCINTTLTCEVMNGTDPELNLYQDGKHLKLSQRVITHKWTTSLSAKFKCTAGNKVSKESSVEPVSCPEKGLDIYLIIGICGGGSLLMVFVALLVFYITKRKKQRSRRNDEELETRAHRVATEERGRKPHQIPASTPQNPATSQHPPPPPGHRSQAPSHRPPPPGHRVQHQPQKRPPAPSGTQVHQQKGPPLPRPRVQPKPPHGAAENSLSPSSN

SEQ ID NO: 17010 - protein, 180 aa, Homo sapiens
MADSELQLVEQRIRSFPDFPTPGVVFRDISPVLKDPASFRAAIGLLARHLKATHGGRIDYIAGLDSRGFLFGPSLAQELGLGCVLIRKRGKLPGPTLWASYSLEYGKAELEIQKDALEPGQRVVVVDDLLATGGTMNAACELLGRLQAEVLECVSLVELTSLKGREKLAPVPFFSLLQYE

SEQ ID NO: 17011 - protein, 134 aa, Homo sapiens
MADSELQLVEQRIRSFPDFPTPGVVFRDISPVLKDPASFRAAIGLLARHLKATHGGRIDYIAGLDSRGFLFGPSLAQELGLGCVLIRKRGKLPGPTLWASYSLEYGKAELEIQKDALEPGQRVVVVDDLLATGV

SEQ ID NO: 17012 - protein, 1082 aa, Homo sapiens
MSAAPAYSEDKGGSAGPGEPEYGHDPASGGIFSSDYKRHDDLKEMLDTNKDSLKLEAMKRIVAMIARGKNASDLFPAVVKNVACKNIEVKKLVYVYLVRYAEEQQDLALLSISTFQRGLKDPNQLIRASALRVLSSIRVPIIVPIMMLAIKEAASDMSPYVRKTAAHAIPKLYSLDSDQKDQLIEVIEKLLADKTTLVAGSVVMAFEEVCPERIDLIHKNYRKLCNLLIDVEEWGQVVIISMLTRYARTQFLSPTQNESLLEENAEKAFYGSEEDEAKGAGSEETAAAAAPSRKPYVMDPDHRLLLRNTKPLLQSRSAAVVMAVAQLYFHLAPKAEVGVIAKALVRLLRSHSEVQYVVLQNVATMSIKRRGMFEPYLKSFYIRSTDPTQIKILKLEVLTNLANETNIPTVLREFQTYIRSMDKDFVAATIQAIGRCATNIGRVRDTCLNGLVQLLSNRDELVVAESVVVIKKLLQMQPAQHGEIIKHLAKLTDNIQVPMARASILWLIGEYCEHVPRIAPDVLRKMAKSFTAEEDIVKLQVINLAAKLYLTNSKQTKLLTQYVLSLAKYDQNYDIRDRARFTRQLIVPSEQGGALSRHAKKLFLAPKPAPVLESSFKDRDHFQLGSLSHLLNAKATGYQELPDWPEEAPDPSVRNVEVPEWTKCSNREKRKEKEKPFYSDSEGESGPTESADSDPESESESDSKSSSESGSGESSSESDNEDQDEDEEKGRGSESEQSEEDGKRKTKKKVPERKGEASSSDEGSDSSSSSSESEMTSESEEEQLEPASWSRKTPPSSKSAPATKEISLLDLEDFTPPSVQPVSPPAIVSTSLAADLEGLTLTDSTLVPSLLSPVSGVGRQELLHRVAGEGLAVDYTFSRQPFSGDPHMVSVHIHFSNSSDTPIKGLHVGTPKLPAGISIQEFPEIESLAPGESATAVMGINFCDSTQAANFQLCTQTRQFYVSIQPPVGELMAPVFMSENEFKKEQGKLMGMNEITEKLMLPDTCRSDHIVVQKVTATANLGRVPCGTSDEYRFAGRTLTGGSLVLLTLDARPAGAAQLTVNSEKMVIGTMLVKDVIQALTQ

SEQ ID NO: 17013 - protein, 145 aa, Homo sapiens
MGINFCDSTQAANFQLCTQTRQFYVSIQPPVGELMAPVFMSENEFKKEQGKLMGMNEITEKLMLPDTCRSDHIVVQKVTATANLGRVPCGTSDEYRFAGRTLTGGSLVLLTLDARPAGAAQLTVNSEKMVIGTMLVKDVIQALTQ

SEQ ID NO: 17014 - protein, 1050 aa, Homo sapiens
MSAAPAYSEDKGGSAGPGEPEYGHDPASGGIFSSDYKRHDDLKEMLDTNKDSLKLEAMKRIVAMIARGKNASDLFPAVVKNVACKNIEDPNQLIRASALRVLSSIRVPIIVPIMMLAIKEAASDMSPYVRKTAAHAIPKLYSLDSDQKDQLIEVIEKLLADKTTLVAGSVVMAFEEVCPERIDLIHKNYRKLCNLLIDVEEWGQVVIISMLTRYARTQFLSPTQNESLLEENAEKAFYGSEEDEAKGAGSEETAAAAAPSRKPYVMDPDHRLLLRNTKPLLQSRSAAVVMAVAQLYFHLAPKAEVGVIAKALVRLLRSHSEVQYVVLQNVATMSIKRRGMFEPYLKSFYIRSTDPTQIKILKLEVLTNLANETNIPTVLREFQTYIRSMDKDFVAATIQAIGRCATNIGRVRDTCLNGLVQLLSNRDELVVAESVVVIKKLLQMQPAQHGEIIKHLAKLTDNIQVPMARASILWLIGEYCEHVPRIAPDVLRKMAKSFTAEEDIVKLQVINLAAKLYLTNSKQTKLLTQYVLSLAKYDQNYDIRDRARFTRQLIVPSEQGGALSRHAKKLFLAPKPAPVLESSFKDRDHFQLGSLSHLLNAKATGYQELPDWPEEAPDPSVRNVEVPEWTKCSNREKRKEKEKPFYSDSEGESGPTESADSDPESESESDSKSSSESGSGESSSESDNEDQDEDEEKGRGSESEQSEEDGKRKTKKKVPERKGEASSSDEGSDSSSSSSESEMTSESEEEQLEPASWSRKTPPSSKSAPATKEISLLDLEDFTPPSVQPVSPPAIVSTSLAADLEGLTLTDSTLVPSLLSPVSGVGRQELLHRVAGEGLAVDYTFSRQPFSGDPHMVSVHIHFSNSSDTPIKGLHVGTPKLPAGISIQEFPEIESLAPGESATAVMGINFCDSTQAANFQLCTQTRQFYVSIQPPVGELMAPVFMSENEFKKEQGKLMGMNEITEKLMLPDTCRSDHIVVQKVTATANLGRVPCGTSDEYRFAGRTLTGGSLVLLTLDARPAGAAQLTVNSEKMVIGTMLVKDVIQALTQ

SEQ ID NO: 17015 - protein, 1101 aa, Homo sapiens
MSAAPAYSEDKGGSAGPGEPEYGHDPASGGIFSSDYKRHDDLKEMLDTNKDSLKLEAMKRIVAMIARGKNASDLFPAVVKNVACKNIEVKKLVYVYLVRYAEEQQDLALLSISTFQRGLKDPNQLIRASALRVLSSIRVPIIVPIMMLAIKEAASDMSPYVRKTAAHAIPKLYSLDSDQKDQLIEVIEKLLADKTTLVAGSVVMAFEEVCPERIDLIHKNYRKLCNLLIDVEEWGQVVIISMLTRYARTQFLSPTQNESLLEENAEKAFYGSEEDEAKGAGSEETAAAAAPSRKPYVMDPDHRLLLRNTKPLLQSRSAAVVMAVAQLYFHLAPKAEVGVIAKALVRLLRSHSEVQYVVLQNVATMSIKRRGMFEPYLKSFYIRSTDPTQIKILKLEVLTNLANETNIPTVLREFQTYIRSMDKDFVAATIQAIGRCATNIGRVRDTCLNGLVQLLSNRDELVVAESVVVIKKLLQMQPAQHGEIIKHLAKLTDNIQVPMARASILWLIGEYCEHVPRIAPDVLRKMAKSFTAEEDIVKLQVINLAAKLYLTNSKQTKLLTQYVLSLAKYDQNYDIRDRARFTRQLIVPSEQGGALSRHAKKLFLAPKPAPVLESSFKDRDHFQLGSLSHLLNAKATGYQELPDWPEEAPDPSVRNVEEEDLSLIETHVGLLGEYTEVPEWTKCSNREKRKEKEKPFYSDSEGESGPTESADSDPESESESDSKSSSESGSGESSSESDNEDQDEDEEKGRGSESEQSEEDGKRKTKKKVPERKGEASSSDEGSDSSSSSSESEMTSESEEEQLEPASWSRKTPPSSKSAPATKEISLLDLEDFTPPSVQPVSPPAIVSTSLAADLEGLTLTDSTLVPSLLSPVSGVGRQELLHRVAGEGLAVDYTFSRQPFSGDPHMVSVHIHFSNSSDTPIKGLHVGTPKLPAGISIQEFPEIESLAPGESATAVMGINFCDSTQAANFQLCTQTRQFYVSIQPPVGELMAPVFMSENEFKKEQGKLMGMNEITEKLMLPDTCRSDHIVVQKVTATANLGRVPCGTSDEYRFAGRTLTGGSLVLLTLDARPAGAAQLTVNSEKMVIGTMLVKDVIQALTQ

SEQ ID NO: 17016 - protein, 418 aa, Homo sapiens
MIHSLFLINCSGDIFLEKHWKSVVSQSVCDYFFEAQEKAADVENVPPVISTPHHYLISIYRDKLFFVSVIQTEVPPLFVIEFLHRVADTFQDYFGECSEAAIKDNVVIVYELLEEMLDNGFPLATESNILKELIKPPTILRSVVNSITGSSNVGDTLPTGQLSNIPWRRAGVKYTNNEAYFDVVEEIDAIIDKSGSTVFAEIQGVIDACIKLSGMPDLSLSFMNPRLLDDVSFHPCIRFKRWESERVLSFIPPDGNFRLISYRVSSQNLVAIPVYVKHSISFKENSSCGRFDITIGPKQNMGKTIEGITVTVHMPKVVLNMNLTPTQGSYTFDPVTKVLTWDVGKITPQKLPSLKGLVNLQSGAPKPEENPSLNIQFKIQQLAISGLKVNRLDMYGEKYKPFKGVKYVTKAGKFQVRT

SEQ ID NO: 17017 - protein, 193 aa, Homo sapiens
MIKAILIFNNHGKPRLSKFYQPYSEDTQQQIIRETFHLVSKRDENVCNFLEGGLLIGGSDNKLIYRHYATLYFVFCVDSSESELGILDLIQVFVETLDKCFENVCELDLIFHVDKVHNILAEMVMGGMVLETNMNEIVTQIDAQNKLEKSEAGLAGAPARAVSAVKNMNLPEIPRNINIGDISIKVPNLPSFK

SEQ ID NO: 17018 - protein, 200 aa, Homo sapiens
MVHAFLIHTLRAPNTEDTGLCRVLYSCVFGAEKSPDDPRPHGAERDRLLRKEQILAVARQVESMCRLQQQASGRPPMDLQPQSSDEQVPLHEAPRGAFRLAAENPFQEPRTVVWLGVLSLGFALVLDAHENLLLAEGTLRLLTRLLLDHLRLLAPSTSLLLRADRIEGILTRFLPHGQLLFLNDQFVQGLEKEFSAAWPR

SEQ ID NO: 17019 - protein, 142 aa, Homo sapiens
MPRGSRSAASRPASRPAAPSAHPPAHPPPSAAAPAPAPSGQPGLMAQMATTAAGVAVGSAVGHVMGSALTGAFSGGSSEPSQPAVQQAPTPAAPQPLQMGPCAYEIRQFLDCSTTQSDLSLCEGFSEALKQCKYYHGLSSLP

SEQ ID NO: 17020 - protein, 626 aa, Homo sapiens
MIPANASARKGPEGKYPLHYLVWHNRHRELEKEVRAGQVDIEQLDPRGRTPLHLATTLGHLECARVLLAHGADVGRENRSGWTVLQEAVSTRDLELVQLVLRYRDYQRVVKRLAGIPVLLEKLRKAQDFYVEMKWEFTSWVPLVSKICPSDTYKVWKSGQNLRVDTTLLGFDHMTWQRGNRSFVFRGQDTSAVVMEIDHDRRVVYTETLALAGQDRELLLAAAQPTEEQVLSRLTAPVVTTQLDTKNISFERNKTGILGWRSEKTEMVNGYEAKVYGASNVELITRTRTEHLSEQHKGKVKGCKTPLQSFLGIAEQHGGPQNGTLITQTLSQANPTAITAEEYFNPNFELGNRDMGRPMELTTKTQKFKAKLWLCEEHPLSLCEQVAPIIDLMAVSNALFAKLRDFITLRLPPGFPVKIEIPIFHILNARITFGNLNGCDEPVPSVRGSPSSETPSPGSDSSSVSSSSSTTSCRGCEISPALFEAPRGYSMMGGQREAATRDDDDDLLQFAIQQSLLEAGSEYDQVTIWEALTNSKPGTHPMSYEGRRQDRSAPPTPQRQPAPPASVPSPRPSSGPGSGGHVFRSYDEQLRLAMELSAQEQEERRRRARQEEEELERILRLSLTEQ

SEQ ID NO: 17021 - protein, 494 aa, Homo sapiens
MKWEFTSWVPLVSKICPSDTYKVWKSGQNLRVDTTLLGFDHMTWQRGNRSFVFRGQDTSAVVMEIDHDRRVVYTETLALAGQDRELLLAAAQPTEEQVLSRLTAPVVTTQLDTKNISFERNKTGILGWRSEKTEMVNGYEAKVYGASNVELITRTRTEHLSEQHKGKVKGCKTPLQSFLGIAEQHGGPQNGTLITQTLSQANPTAITAEEYFNPNFELGNRDMGRPMELTTKTQKFKAKLWLCEEHPLSLCEQVAPIIDLMAVSNALFAKLRDFITLRLPPGFPVKIEIPIFHILNARITFGNLNGCDEPVPSVRGSPSSETPSPGSDSSSVSSSSSTTSCRGCEISPALFEAPRGYSMMGGQREAATRDDDDDLLQFAIQQSLLEAGSEYDQVTIWEALTNSKPGTHPMSYEGRRQDRSAPPTPQRQPAPPASVPSPRPSSGPGSGGHVFRSYDEQLRLAMELSAQEQEERRRRARQEEEELERILRLSLTEQ

SEQ ID NO: 17022 - protein, 518 aa, Homo sapiens
MVQLVLQYRDYQRATQRLAGIPELLNKLRQAPDFYVEMKWEFTSWVPLVSKMCPSDVYRVWKRGESLRVDTSLLGFEHMTWQRGRRSFIFKGQEAGALVMEVDHDRQVVHVETLGLTLQEPETLLAAMRPSEEHVASRLTSPIVSTHLDTRNVAFERNKCGIWGWRSEKMETVSGYEAKVYSATNVELVTRTRTEHLSDQDKSRSKAGKTPFQSFLGMAQQHSSHTGAPVQQAASPTNPTAISPEEYFDPNFSLESRNIGRPIEMSSKVQRFKATLWLSEEHPLSLGDQVTPIIDLMAISNAHFAKLRDFITLRLPPGFPVKIEIPLFHVLNARITFSNLCGCDEPLSSVWVPAPSSAVAASGNPFPCEVDPTVFEVPNGYSVLGMERNEPLRDEDDDLLQFAIQQSLLEAGTEAEQVTVWEALTNTRPGARPPPQATVYEEQLQLERALQESLQLSTEPRGPGSPPRTPPAPGPPSFEEQLRLALELSSREQEERERRGQQEEEDLQRILQLSLTEH

SEQ ID NO: 17023 - protein, 255 aa, Homo sapiens
MSCGRLGRFKATLWLSEEHPLSLGDQVTPIIDLMAISNAHFAKLRDFITLRLPPGFPVKIEIPLFHVLNARITFSNLCGCDEPLSSVWVPAPSSAVAASGNPFPCEVDPTVFEVPNGYSVLGMERNEPLRDEDDDLLQFAIQQSLLEAGTEAEQVTVWEALTNTRPGARPPPQATVYEEQLQLERALQESLQLSTEPRGPGSPPRTPPAPGPPSFEEQLRLALELSSREQEERERRGQQEEEDLQRILQLSLTEH

SEQ ID NO: 17024 - protein, 605 aa, Homo sapiens
MAGPGPTFPLHRLVWANRHRELEAALHSHQHDIEQEDPRGRTPLELAVSLGNLESVRVLLRHNANVGKENRQGWAVLQEAVSTGDPEMVQLVLQYRDYQRATQRLAGIPELLNKLRQAPDFYVEMKWEFTSWVPLVSKMCPSDVYRVWKRGESLRVDTSLLGFEHMTWQRGRRSFIFKGQEAGALVMEVDHDRQVVHVETLGLTLQEPETLLAAMRPSEEHVASRLTSPIVSTHLDTRNVAFERNKCGIWGWRSEKMETVSGYEAKVYSATNVELVTRTRTEHLSDQDKSRSKAGKTPFQSFLGMAQQHSSHTGAPVQQAASPTNPTAISPEEYFDPNFSLESRNIGRPIEMSSKVQRFKATLWLSEEHPLSLGDQVTPIIDLMAISNAHFAKLRDFITLRLPPGFPVKIEIPLFHVLNARITFSNLCGCDEPLSSVWVPAPSSAVAASGNPFPCEVDPTVFEVPNGYSVLGMERNEPLRDEDDDLLQFAIQQSLLEAGTEAEQVTVWEALTNTRPGARPPPQATVYEEQLQLERALQESLQLSTEPRGPGSPPRTPPAPGPPSFEEQLRLALELSSREQEERERRGQQEEEDLQRILQLSLTEH

SEQ ID NO: 17025 - protein, 239 aa, Homo sapiens
MEKEKGNDDGIPDQENSLDFSEHFNQLELLETHGHLIPTGTQSLWVGNSDEDEEQDDKNEEWYRLQEKKMEKDPSRLLLWAAEKNRLTTVRRLLSEKATHVNTRDEDEYTPLHRAAYSGHLDIVQELIAQGADVHAVTVDGWTPLHSACKWNNTRVASFLLQHDADINAQTKGLLTPLHLAAGNRDSKDTLELLLMNRYVKPGLKNNLEETAFDIARRTSIYHYLFEIVEGCTNSSPQS

SEQ ID NO: 17026 - protein, 264 aa, Homo sapiens
MRKLFSFGRRLGQALLDSMDQEYAGRGYHIRDWELRKIHRAAIKGDAAEVEHCLTRRFRDLDARDRKDRTVLHLTCAHGRVEVVTLLLSRRCQINIYDRLNRTPLMKAVHCQEEACAIILLEHGANPNIKDIYSNTALHYAVYNKGTSLAEKLLSHHANIEALNEEGNTPLLFAINSRRQQIVEFLLKNQANLHAIDNFRRTALMLAVQHNSSSIVSLLLQQNINIFSQDLFGQTAEDYAVCYNFRSIQQQILEHKNKILKSHL

SEQ ID NO: 17027 - protein, 1710 aa, Homo sapiens
MKKIFSKKGESPLGSFARRQRSSAGGGGEPGEGAYSQPGYHVRDRDLGKIHKAASAGNVAKVQQILLLRKNGLNDRDKMNRTALHLACANGHPEVVTLLVDRKCQLNVCDNENRTALMKAVQCQEEKCATILLEHGADPNLADVHGNTALHYAVYNEDISVATKLLLYDANIEAKNKDDLTPLLLAVSGKKQQMVEFLIKKKANVNAVDKLESSHQLISEYKEERIPKHSSQNSNSVDESSEDSLSRLSGKPGVDDSWPTSDDEDLNFDTKNVPKPSLAKLMTASQQSRKNLEATYGTVRTGNRTLFEDRDSDSQDEVVVESLPTTSIKVQCFSHPTYQSPDLLPKPSHKSLANPGLMKEEPTKPGIAKKENGIDIIESAPLEQTNNDNLTYVDEVHKNNRSDMMSALGLGQEEDIESPWDSESISENFPQKYVDPLAGAADGKEKNIGNEQAEDVFYIPSCMSGSRNFKMAKLEDTRNVGMPVAHMESPERYLHLKPTIEMKDSVPNKAGGMKDVQTSKAAEHDLEVASEEEQEREGSENNQPQVEEERKKHRNNEMEVSANIHDGATDDAEDDDDDDGLIQKRKSGETDHQQFPRKENKEYASSGPALQMKEVKSTEKEKRTSKESVNSPVFGKASLLTGGLLQVDDDSSLSEIDEDEGRPTKKTSNEKNKVKNQIQSMDDVDDLTQSSETASEDCELPHSSYKNFMLLIEQLGMECKDSVSLLKIQDAALSCERLLELKKNHCELLTVKIKKMEDKVNVLQRELSETKEIKSQLEHQKVEWERELCSLRFSLNQEEEKRRNADTLYEKIREQLRRKEEQYRKEVEVKQQLELSLQTLEMELRTVKSNLNQVVQERNDAQRQLSREQNARMLQDGILTNHLSKQKEIEMAQKKMNSENSHSHEEEKDLSHKNSMLQEEIAMLRLEIDTIKNQNQEKEKKCFEDLKIVKEKNEDLQKTIKQNEETLTQTISQYNGRLSVLTAENAMLNSKLENEKQSKERLEAEVESYHSRLAAAIHDRDQSETSKRELELAFQRARDECSRLQDKMNFDVSNLKDNNEILSQQLFKTESKLNSLEIEFHHTRDALREKTLGLERVQKDLSQTQCQMKEMEQKYQNEQVKVNKYIGKQESVEERLSQLQSENMLLRQQLDDAHNKADNKEKTVINIQDQFHAIVQKLQAESEKQSLLLEERNKELISECNHLKERQYQYENEKAEREVVVRQLQQELADTLKKQSMSEASLEVTSRYRINLEDETQDLKKKLGQIRNQLQEAQDRHTEAVRCAEKMQDHKQKLEKDNAKLKVTVKKQMDKIEELQKNLLNANLSEDEKEQLKKLMELKQSLECNLDQEMKKNVELEREITGFKNLLKMTRKKLNEYENGEFSFHGDLKTSQFEMDIQINKLKHKIDDLTAELETAGSKCLHLDTKNQILQEELLSMKTVQKKCEKLQKNKKKLEQEVINLRSHIERNMVELGQVKQYKQEIEERARQEIAEKLKEVNLFLQAQAASQENLEQFRENNFASMKSQMELRIKDLESELSKIKTSQEDFNKTELEKYKQLYLEELKVRKSLSSKLTKTNERLAEVNTKLLVEKQQSRSLFTTLTTRPVMEPPCVGNLNNSLDLNRKLIPRENLVISTSNPRASNNSMENYLSKMQQELEKNITRELKEAAAELESGSIASPLGSTDESNLNQDLVWKASREYVQVLKKNYMI

SEQ ID NO: 17028 - protein, 1267 aa, Homo sapiens
MNHMFHIKRHSISAGTDAYKKTKPIQNLFQKPLYDHCSANNYKSMEPELENVRSSPPRGDRTSKVSLKEELQQDMQRFKNEIGMLKVEFQALEKEKVQLQKEVEEERKKHRNNEMEVSANIHDGATDDAEDDDDDDGLIQKRKSGETDHQQFPRKENKEYASSGPALQMKEVKSTEKEKRTSKESVNSPVFGKASLLTGGLLQVDDDSSLSEIDEDEGRPTKKTSNEKNKVKNQIQSMDDVDDLTQSSETASEDCELPHSSYKNFMLLIEQLGMECKDSVSLLKIQDAALSCERLLELKKNHCELLTVKIKKMEDKVNVLQRELSETKEIKSQLEHQKVEWERELCSLRFSLNQEEEKRRNADTLYEKIREQLRRKEEQYRKEVEVKQQLELSLQTLEMELRTVKSNLNQVVQERNDAQRQLSREQNARMLQDGILTNHLSKQKEIEMAQKKMNSENSHSHEEEKDLSHKNSMLQEEIAMLRLEIDTIKNQNQEKEKKCFEDLKIVKEKNEDLQKTIKQNEETLTQTISQYNGRLSVLTAENAMLNSKLENEKQSKERLEAEVESYHSRLAAAIHDRDQSETSKRELELAFQRARDECSRLQDKMNFDVSNLKDNNEILSQQLFKTESKLNSLEIEFHHTRDALREKTLGLERVQKDLSQTQCQMKEMEQKYQNEQVKVNKYIGKQESVEERLSQLQSENMLLRQQLDDAHNKADNKEKTVINIQDQFHAIVQKLQAESEKQSLLLEERNKELISECNHLKERQYQYENEKAEREVVVRQLQQELADTLKKQSMSEASLEVTSRYRINLEDETQDLKKKLGQIRNQLQEAQDRHTEAVRCAEKMQDHKQKLEKDNAKLKVTVKKQMDKIEELQKNLLNANLSEDEKEQLKKLMELKQSLECNLDQEMKKNVELEREITGFKNLLKMTRKKLNEYENGEFSFHGDLKTSQFEMDIQINKLKHKIDDLTAELETAGSKCLHLDTKNQILQEELLSMKTVQKKCEKLQKNKKKLEQEVINLRSHIERNMVELGQVKQYKQEIEERARQEIAEKLKEVNLFLQAQAASQENLEQFRENNFASMKSQMELRIKDLESELSKIKTSQEDFNKTELEKYKQLYLEELKVRKSLSSKLTKTNERLAEVNTKLLVEKQQSRSLFTTLTTRPVMEPPCVGNLNNSLDLNRKLIPRENLVISTSNPRASNNSMENYLSKMQQELEKNITRELKEAAAELESGSIASPLGSTDESNLNQDLVWKASREYVQVLKKNYMI

SEQ ID NO: 17029 - protein, 1248 aa, Homo sapiens
MGKDQELLEAARTGNVALVEKLLSGRKGGILGGGSGPLPLSNLLSIWRGPNVNCTDSSGYTALHHAALNGHKDIVLKLLQYEASTNVADNKGYFPIHLAAWKGDVEIVKILIHHGPSHSRVNEQNNENETALHCAAQYGHSEVVAVLLEELTDPTIRNSKLETPLDLAALYGRLRVVKMIISAHPNLMSCNTRKHTPLHLAARNGHKAVVQVLLEAGMDVSCQTEKGSALHEAALFGKVDVVRVLLETGIDANIKDSLGRTVLDILKEHPSQKSLQIATLLQEYLEGVGRSTVLEEPVQEDATQETHISSPVESPSQKTKSETVTGELSKLLDEIKLCQEKDYSFEDLCHTISDHYLDNLSKISEEELGKNGSQSVRTSSTINLSPGEVEEEDDDENTCGPSGLWEALTPCNGCRNLGFPMLAQESYPKKRNYTMEIVPSASLDTFPSENENFLCDLMDTAVTKKPCSLEIARAPSPRTDNASEVAVTTPGTSNHRNSSTGPTPDCSPPSPDTALKNIVKVIRPQPKQRTSIVSSLDFHRMNHNQEYFEINTSTGCTSFTASPPASPPTSSVGTTEVKNEGTNHTDDLSRQDDNDPPKEYDPGQFAGLLHGSSPACESPENPFHLYGKREQCEKGQDEVSLANSPLPFKQSPIENNSEPLVKKIKPKVVSRTIFHKKSNQLENHTIVGTRSTRSGSRNGDQWVMNAGGFVERACTLGRIRSLPKALIDMHLSKSVSKSDSDLIAYPSNEKTSRVNWSESSTAEHSSKGNSERTPSFTSEWEEIDKIMSSIDVGINNELKEMNGETTRPRCPVQTVGQWLESIGLPQYENHLMANGFDNVQFMGSNVMEDQDLLEIGILNSGHRQRILQAIQLLPKMRPIGHDGYHPTSVAEWLDSIELGDYTKAFLINGYTSMDLLKKIWEVELINVLKINLIGHRKRILASLGDRLHDDPPQKPPRSITLREPSGNHTPPQLSPSLSQSTYTTGGSLDVPHIIMQGDARRRRNENYFDDIPRSKLERQMAQTGDWGEPSITLRPPNEATASTPVQYWQHHPEKLIFQSCDYKAFYLGSMLIKELRGTESTQDACAKMRANCQKSTEQMKKVPTIILSVSYKGVKFIDATNKNIIAEHEIRNISCAAQDPEDLSTFAYITKDLKSNHHYCHVFTAFDVNLAYEIILTLGQAFEVAYQLALQARKGGHSSTLPESFENKPSKPIPKPRVSIRKSVDLLHASHTGQEPSERHTEEALRKF

SEQ ID NO: 17030 - protein, 426 aa, Homo sapiens
MMWQCHLSAQDYRYYPVDGYSLLKRFPLHPLTGPRCPVQTVGQWLESIGLPQYENHLMANGFDNVQFMGSNVMEDQDLLEIGILNSGHRQRILQAIQLLPKMRPIGHDGYHPTSVAEWLDSIELGDYTKAFLINGYTSMDLLKKIWEVELINVLKINLIGHRKRILASLGDRLHDDPPQKPPRSITLRTGDWGEPSITLRPPNEATASTPVQYWQHHPEKLIFQSCDYKAFYLGSMLIKELRGTESTQDACAKMRANCQKSTEQMKKVPTIILSVSYKGVKFIDATNKNIIAEHEIRNISCAAQDPEDLSTFAYITKDLKSNHHYCHVFTAFDVNLAYEIILTLGQAFEVAYQLALQARKGGHSSTLPESFENKPSKPIPKPRVSIRKSVQIDPSEQKTLANLPWIVEPGQEAKRGINTKYETTIF

SEQ ID NO: 17031 - protein, 510 aa, Homo sapiens
MMWQCHLSAQDYRYYPVDGYSLLKRFPLHPLTGPRCPVQTVGQWLESIGLPQYENHLMANGFDNVQFMGSNVMEDQDLLEIGILNSGHRQRILQAIQLLPKMRPIGHDGYHPTSVAEWLDSIELGDYTKAFLINGYTSMDLLKKIWEVELINVLKINLIGHRKRILASLGDRLHDDPPQKPPRSITLREPSGNHTPPQLSPSLSQSTYTTGGSLDVPHIIMQGDARRRRNENYFDDIPRSKLERQMAQSSVCEIWTNQNAGFPFSAIHQVHNTGDWGEPSITLRPPNEATASTPVQYWQHHPEKLIFQSCDYKAFYLGSMLIKELRGTESTQDACAKMRANCQKSTEQMKKVPTIILSVSYKGVKFIDATNKNIIAEHEIRNISCAAQDPEDLSTFAYITKDLKSNHHYCHVFTAFDVNLAYEIILTLGQAFEVAYQLALQARKGGHSSTLPESFENKPSKPIPKPRVSIRKSVQIDPSEQKTLANLPWIVEPGQEAKRGINTKYETTIF

SEQ ID NO: 17032 - protein, 460 aa, Homo sapiens
MMWQCHLSAQDYRYYPVDGYSLLKRFPLHPLTGPRCPVQTVGQWLESIGLPQYENHLMANGFDNVQFMGSNVMEDQDLLEIGILNSGHRQRILQAIQLLPKMRPIGHDGYHPTSVAEWLDSIELGDYTKAFLINGYTSMDLLKKIWEVELINVLKINLIGHRKRILASLGDRLHDDPPQKPPRSITLREPSGNHTPPQLSPSLSQSTYTTGGSLDVPHIIMQGDARRRRNENYFDDIPRSKLERQMAQTGDWGEPSITLRPPNEATASTPVQYWQHHPEKLIFQSCDYKAFYLGSMLIKELRGTESTQDACAKMRANCQKSTEQMKKVPTIILSVSYKGVKFIDATNKNIIAEHEIRNISCAAQDPEDLSTFAYITKDLKSNHHYCHVFTAFDVNLAYEIILTLGQAFEVAYQLALQARKGGHSSTLPESFENKPSKPIPKPRVSIRKSVPFCFKADRPI

SEQ ID NO: 17033 - protein, 450 aa, Homo sapiens
MMWQCHLSAQDYRYYPVDGYSLLKRFPLHPLTGPRCPVQTVGQWLESIGLPQYENHLMANGFDNVQFMGSNVMEDQDLLEIGILNSGHRQRILQAIQLLPKMRPIGHDGYHPTSVAEWLDSIELGDYTKAFLINGYTSMDLLKKIWEVELINVLKINLIGHRKRILASLGDRLHDDPPQKPPRSITLRSSVCEIWTNQNAGFPFSAIHQVHNTGDWGEPSITLRPPNEATASTPVQYWQHHPEKLIFQSCDYKAFYLGSMLIKELRGTESTQDACAKMRANCQKSTEQMKKVPTIILSVSYKGVKFIDATNKNIIAEHEIRNISCAAQDPEDLSTFAYITKDLKSNHHYCHVFTAFDVNLAYEIILTLGQAFEVAYQLALQARKGGHSSTLPESFENKPSKPIPKPRVSIRKSVQIDPSEQKTLANLPWIVEPGQEAKRGINTKYETTIF

SEQ ID NO: 17034 - protein, 764 aa, Homo sapiens
MLAQESYPKKRNYTMEIVPSASLDTFPSENENFLCDLMDTAVTKKPCSLEIARAPSPRTDNASEVAVTTPGTSNHRNSSTGPTPDCSPPSPDTALKNIVKVIRPQPKQRTSIVSSLDFHRMNHNQEYFEINTSTGCTSFTASPPASPPTSSVGTTEVKNEGTNHTDDLSRQDDNDPPKEYDPGQFAGLLHGSSPACESPENPFHLYGKREQCEKGQDEVSLANSPLPFKQSPIENNSEPLVKKIKPKVVSRTIFHKKSNQLENHTIVGTRSTRSGSRNGDQWVMNAGGFVERACTLGRIRSLPKALIDMHLSKSVSKSDSDLIAYPSNEKTSRVNWSESSTAEHSSKGNSERTPSFTSEWEEIDKIMSSIDVGINNELKEMNGPRCPVQTVGQWLESIGLPQYENHLMANGFDNVQFMGSNVMEDQDLLEIGILNSGHRQRILQAIQLLPKMRPIGHDGYHPTSVAEWLDSIELGDYTKAFLINGYTSMDLLKKIWEVELINVLKINLIGHRKRILASLGDRLHDDPPQKPPRSITLRTGDWGEPSITLRPPNEATASTPVQYWQHHPEKLIFQSCDYKAFYLGSMLIKELRGTESTQDACAKMRANCQKSTEQMKKVPTIILSVSYKGVKFIDATNKNIIAEHEIRNISCAAQDPEDLSTFAYITKDLKSNHHYCHVFTAFDVNLAYEIILTLGQAFEVAYQLALQARKGGHSSTLPESFENKPSKPIPKPRVSIRKSVDLLHASHTGQEPSERHTEEALRKF

SEQ ID NO: 17035 - protein, 414 aa, Homo sapiens
MMWQCHLSAQDYRYYPVDGYSLLKRFPLHPLTGPRCPVQTVGQWLESIGLPQYENHLMANGFDNVQFMGSNVMEDQDLLEIGILNSGHRQRILQAIQLLPKMRPIGHDGYHPTSVAEWLDSIELGDYTKAFLINGYTSMDLLKKIWEVELINVLKINLIGHRKRILASLGDRLHDDPPQKPPRSITLRTGDWGEPSITLRPPNEATASTPVQYWQHHPEKLIFQSCDYKAFYLGSMLIKELRGTESTQDACAKMRANCQKSTEQMKKVPTIILSVSYKGVKFIDATNKNIIAEHEIRNISCAAQDPEDLSTFAYITKDLKSNHHYCHVFTAFDVNLAYEIILTLGQAFEVAYQLALQARKGGHSSTLPESFENKPSKPIPKPRVSIRKSVDLLHASHTGQEPSERHTEEALRKF

SEQ ID NO: 17036 - protein, 357 aa, Homo sapiens
MANGFDNVQFMGSNVMEDQDLLEIGILNSGHRQRILQAIQLLPKMRPIGHDGYHPTSVAEWLDSIELGDYTKAFLINGYTSMDLLKKIWEVELINQSSVCEIWTNQNAGFPFSAIHQVHNTGDWGEPSITLRPPNEATASTPVQYWQHHPEKLIFQSCDYKAFYLGSMLIKELRGTESTQDACAKMRANCQKSTEQMKKVPTIILSVSYKGVKFIDATNKNIIAEHEIRNISCAAQDPEDLSTFAYITKDLKSNHHYCHVFTAFDVNLAYEIILTLGQAFEVAYQLALQARKGGHSSTLPESFENKPSKPIPKPRVSIRKSVIDPSEQKTLANLPWIVEPGQEAKRGINTKYETTIF

SEQ ID NO: 17037 - protein, 254 aa, Homo sapiens
MQGDARRRRNENYFDDIPRSKLERQMAQTGDWGEPSITLRPPNEATASTPVQYWQHHPEKLIFQSCDYKAFYLGSMLIKELRGTESTQDACAKMRANCQKSTEQMKKVPTIILSVSYKGVKFIDATNKNIIAEHEIRNISCAAQDPEDLSTFAYITKDLKSNHHYCHVFTAFDVNLAYEIILTLGQAFEVAYQLALQARKGGHSSTLPESFENKPSKPIPKPRVSIRKSVDLLHASHTGQEPSERHTEEALRKF

SEQ ID NO: 17038 - protein, 394 aa, Homo sapiens
MGPRCPVQTVGQWLESIGLPQYENHLMANGFDNVQFMGSNVMEDQDLLEIGILNSGHRQRILQAIQLLPKMRPIGHDGYHPTSVAEWLDSIELGDYTKAFLINGYTSMDLLKKIWEVELINVLKINLIGHRKRILASLGDRLHDDPPQKPPRSITLRTGDWGEPSITLRPPNEATASTPVQYWQHHPEKLIFQSCDYKAFYLGSMLIKELRGTESTQDACAKMRANCQKSTEQMKKVPTIILSVSYKGVKFIDATNKNIIAEHEIRNISCAAQDPEDLSTFAYITKDLKSNHHYCHVFTAFDVNLAYEIILTLGQAFEVAYQLALQARKGGHSSTLPESFENKPSKPIPKPRVSIRKSVIDPSEQKTLANLPWIVEPGQEAKRGINTKYETTIF

SEQ ID NO: 17039 - protein, 939 aa, Homo sapiens
MPAVSKGDGMRGLAVFISDIRNCKSKEAEIKRINKELANIRSKFKGDKALDGYSKKKYVCKLLFIFLLGHDIDFGHMEAVNLLSSNRYTEKQIGYLFISVLVNSNSELIRLINNAIKNDLASRNPTFMGLALHCIASVGSREMAEAFAGEIPKVLVAGDTMDSVKQSAALCLLRLYRTSPDLVPMGDWTSRVVHLLNDQHLGVVTAATSLITTLAQKNPEEFKTSVSLAVSRLSRIVTSASTDLQDYTYYFVPAPWLSVKLLRLLQCYPPPDPAVRGRLTECLETILNKAQEPPKSKKVQHSNAKNAVLFEAISLIIHHDSEPNLLVRACNQLGQFLQHRETNLRYLALESMCTLASSEFSHEAVKTHIETVINALKTERDVSVRQRAVDLLYAMCDRSNAPQIVAEMLSYLETADYSIREEIVLKVAILAEKYAVDYTWYVDTILNLIRIAGDYVSEEVWYRVIQIVINRDDVQGYAAKTVFEALQAPACHENLVKVGGYILGEFGNLIAGDPRSSPLIQFHLLHSKFHLCSVPTRALLLSTYIKFVNLFPEVKPTIQDVLRSDSQLRNADVELQQRAVEYLRLSTVASTDILATVLEEMPPFPERESSILAKLKKKKGPSTVTDLEDTKRDRSVDVNGGPEPAPASTSAVSTPSPSADLLGLGAAPPAPAGPPPSSGGSGLLVDVFSDSASVVAPLAPGSEDNFARFVCKNNGVLFENQLLQIGLKSEFRQNLGRMFIFYGNKTSTQFLNFTPTLICSDDLQPNLNLQTKPVDPTVEGGAQVQQVVNIECVSDFTEAPVLNIQFRYGGTFQNVSVQLPITLNKFFQPTEMASQDFFQRWKQLSNPQQEVQNIFKAKHPMDTEVTKAKIIGFGSALLEEVDPNPANFVGAGIIHTKTTQIGCLLRLEPNLQAQMYRLTLRTSKEAVSQRLCELLSAQF

SEQ ID NO: 17040 - protein, 940 aa, Homo sapiens
MPAVSKGDGMRGLAVFISDIRNCKSKEAEIKRINKELANIRSKFKGDKALDGYSKKKYVCKLLFIFLLGHDIDFGHMEAVNLLSSNRYTEKQIGYLFISVLVNSNSELIRLINNAIKNDLASRNPTFMGLALHCIASVGSREMAEAFAGEIPKVLVAGDTMDSVKQSAALCLLRLYRTSPDLVPMGDWTSRVVHLLNDQHLGVVTAATSLITTLAQKNPEEFKTSVSLAVSRLSRIVTSASTDLQDYTYYFVPAPWLSVKLLRLLQCYPPPEDPAVRGRLTECLETILNKAQEPPKSKKVQHSNAKNAVLFEAISLIIHHDSEPNLLVRACNQLGQFLQHRETNLRYLALESMCTLASSEFSHEAVKTHIETVINALKTERDVSVRQRAVDLLYAMCDRSNAPQIVAEMLSYLETADYSIREEIVLKVAILAEKYAVDYTWYVDTILNLIRIAGDYVSEEVWYRVIQIVINRDDVQGYAAKTVFEALQAPACHENLVKVGGYILGEFGNLIAGDPRSSPLIQFHLLHSKFHLCSVPTRALLLSTYIKFVNLFPEVKPTIQDVLRSDSQLRNADVELQQRAVEYLRLSTVASTDILATVLEEMPPFPERESSILAKLKKKKGPSTVTDLEDTKRDRSVDVNGGPEPAPASTSAVSTPSPSADLLGLGAAPPAPAGPPPSSGGSGLLVDVFSDSASVVAPLAPGSEDNFARFVCKNNGVLFENQLLQIGLKSEFRQNLGRMFIFYGNKTSTQFLNFTPTLICSDDLQPNLNLQTKPVDPTVEGGAQVQQVVNIECVSDFTEAPVLNIQFRYGGTFQNVSVQLPITLNKFFQPTEMASQDFFQRWKQLSNPQQEVQNIFKAKHPMDTEVTKAKIIGFGSALLEEVDPNPANFVGAGIIHTKTTQIGCLLRLEPNLQAQMYRLTLRTSKEAVSQRLCELLSAQF

SEQ ID NO: 17041 - protein, 656 aa, Homo sapiens
MPAVSKGDGMRGLAVFISDIRNCKSKEAEIKRINKELANIRSKFKGDKALDGYSKKKYVCKLLFIFLLGHDIDFGHMEAVNLLSSNRYTEKQIGYLFISVLVNSNSELIRLINNAIKNDLASRNPTFMGLALHCIASVGSREMAEAFAGEIPKVLVAGDTMDSVKQSAALCLLRLYRTSPDLVPMGDWTSRVVHLLNDQHLGVVTAATSLITTLAQKNPEEFKTSVSLAVSRLSRIVTSASTDLQDYTYYFVPAPWLSVKLLRLLQCYPPPEDPAVRGRLTECLETILNKAQEPPKSKKVQHSNAKNAVLFEAISLIIHHDSEPNLLVRACNQLGQFLQHRETNLRYLALESMCTLASSEFSHEAVKTHIETVINALKTERDVSVRQRAVDLLYAMCDRSNAPQIVAEMLSYLETADYSIREEIVLKVAILAEKYAVDYTWYVDTILNLIRIAGDYVSEEVWYRVIQIVINRDDVQGYAAKTVFEALQAPACHENLVKVGGYILGEFGNLIAGDPRSSPLIQFHLLHSKFHLCSVPTRALLLSTYIKFVNLFPEVKPTIQDVLRSDSQLRNADVELQQRAVEYLRLSTVASTDILATVLEEMPPFPERESSILAKLKKKKGPSTVTDLEDTKRDRSVDVNGGPEPAPASTSAVVCL

SEQ ID NO: 17042 - protein, 564 aa, Homo sapiens
MATAERRALGIGFQWLSLATLVLICAGQGGRREDGGPACYGGFDLYFILDKSGSVLHHWNEIYYFVEQLAHKFISPQLRMSFIVFSTRGTTLMKLTEDREQIRQGLEELQKVLPGGDTYMHEGFERASEQIYYENRQGYRTASVIIALTDGELHEDLFFYSEREANRSRDLGAIVYCVGVKDFNETQLARIADSKDHVFPVNDGFQALQGIIHSILKKSCIEILAAEPSTICAGESFQVVVRGNGFRHARNVDRVLCSFKINDSVTLNEKPFSVEDTYLLCPAPILKEVGMKAALQVSMNDGLSFISSSVIITTTHCSDGSILAIALLILFLLLALALLWWFWPLCCTVIIKEVPPPPAEESEEEDDDGLPKKKWPTVDASYYGGRGVGGIKRMEVRWGEKGSTEEGAKLEKAKNARVKMPEQEYEFPEPRNLNNNMRRPSSPRKWYSPIKGKLDALWVLLRKGYDRVSVMRPQPGDTGRCINFTRVKNNQPAKYPLNNAYHTSSPPPAPIYTPPPPAPHCPPPPPSAPTPPIPSPPSTLPPPPQAPPPNRAPPPSRPPPRPSV

SEQ ID NO: 17043 - protein, 368 aa, Homo sapiens
MATAERRALGIGFQWLSLATLVLICAGQGGRREDGGPACYGGFDLYFILDKSGSVLHHWNEIYYFVEQLAHKFISPQLRMSFIVFSTRGTTLMKLTEDREQIRQGLEELQKVLPGGDTYMHEGFERASEQIYYENRQGYRTASVIIALTDGELHEDLFFYSEREANRSRDLGAIVYCVGVKDFNETQLARIADSKDHVFPVNDGFQALQGIIHSILKKSCIEILAAEPSTICAGESFQVVVRGNGFRHARNVDRVLCSFKINDSVTLNEKPFSVEDTYLLCPAPILKEVGMKAALQVSMNDGLSFISSSVIITTTHCSDGSILAIALLILFLLLALALLWWFWPLCCTVIIKEVPPPPAEESEENKIK

SEQ ID NO: 17044 - protein, 297 aa, Homo sapiens
MATAERRALGIGFQWLSLATLVLICAGQGGRREDGGPACYGGFDLYFILDKSGSVLHHWNEIYYFVEQLAHKFISPQLRMSFIVFSTRGTTLMKLTEDREQIRQGLEELQKVLPGGDTYMHEGFERASEQIYYENRQGYRTASVIIALTDGELHEDLFFYSEREANRSRDLGAIVYCVGVKDFNETQLARIADSKDHVFPVNDGFQALQGIIHSILKKSCIEILAAEPSTICAGESFQVVVRGNGFRHARNVDRVLCSFKINDSVTLSKSLQSPWVSSTSGFKEGNSHPCLPARPHT

SEQ ID NO: 17045 - protein, 333 aa, Homo sapiens
MATAERRALGIGFQWLSLATLVLICAGQGGRREDGGPACYGGFDLYFILDKSGSVLHHWNEIYYFVEQLAHKFISPQLRMSFIVFSTRGTTLMKLTEDREQIRQGLEELQKVLPGGDTYMHEGFERASEQIYYENRQGYRTASVIIALTDGELHEDLFFYSEREANRSRDLGAIVYCVGVKDFNETQLARIADSKDHVFPVNDGFQALQGIIHSILKKSCIEILAAEPSTICAGESFQVVVRGNGFRHARNVDRVLCSFKINDSVTLNEKPFSVEDTYLLCPAPILKEVGMKAALQVSMNDGLSFISSSVIITTTHCSLHKIASGPTTAACME

SEQ ID NO: 17046 - protein, 528 aa, Homo sapiens
MATAERRALGIGFQWLSLATLVLICAGQGGRREDGGPACYGGFDLYFILDKSGSVLHHWNEIYYFVEQLAHKFISPQLRMSFIVFSTRGTTLMKLTEDREQIRQGLEELQKVLPGGDTYMHEGFERASEQIYYENRQGYRTASVIIALTDGELHEDLFFYSEREANRSRDLGAIVYCVGVKDFNETQLARIADSKDHVFPVNDGFQALQGIIHSILKKSCIEILAAEPSTICAGESFQVVVRGNGFRHARNVDRVLCSFKINDSVTLNEKPFSVEDTYLLCPAPILKEVGMKAALQVSMNDGLSFISSSVIITTTHCSDGSILAIALLILFLLLALALLWWFWPLCCTVIIKEVPPPPAEESEEEDDDGLPKKKWPTVDASYYGGRGVGGIKRMEVRWGEKGSTEEGAKLEKAKNARVKMPEQEYEFPEPRNLNNNMRRPSSPRKWYSPIKGKLDALWVLLRKGYDRVSVMRPQPGDTGRCINFTRVKNNQPAKYPLNNAYHTSSPPPAPIYTPPPPAPHCPPPRPSV

SEQ ID NO: 17047 - protein, 358 aa, Homo sapiens
MATAERRALGIGFQWLSLATLVLICAGQGGRREDGGPACYGGFDLYFILDKSGSVLHHWNEIYYFVEQLAHKFISPQLRMSFIVFSTRGTTLMKLTEDREQIRQGLEELQKVLPGGDTYMHEGFERASEQIYYENRQGYRTASVIIALTDGELHEDLFFYSEREANRSRDLGAIVYCVGVKDFNETQLARIADSKDHVFPVNDGFQALQGIIHSILKKSCIEILAAEPSTICAGESFQVVVRGNGFRHARNVDRVLCSFKINDSVTLNEKPFSVEDTYLLCPAPILKEVGMKAALQVSMNDGLSFISSSVIITTFHPSPSSPGSTSQQGTSSLPPSSKAFCLEPKVPALGSLRNFRRC

SEQ ID NO: 17048 - protein, 614 aa, Homo sapiens
MMRQATMDFSTPSVFDQQRGDSSEEVDLTMVYQAASNGDVNALTAVIREDPSILECCDSEGCTPLMHAVSGRQADTVKLLLKMGANINMQDAYGRTSLCLATYLGWLEGCVSLLRNGAKHNIPDKNGRLPLHAATAEPDMRLLTVLLQQSNISEINHQDNEGMTPLHWAAFHNQPQHTQMLLKKGADPTLVDKDFKTALHWAVQSGNRILCSIILSHHQGPSIINYDDESGKTCVHIAAAAGFSDIIHELARVPECNLQALDVDDRTPLHWAAAAGKAECVQSLLELGMDSNLRDINESTPLAYALYCGHTACVKLLSQESRTEPTRPPPSQSSRPQKKERRFNVLNQIFCKNKKEEQRAHQKDPSRDRYREEDTSEVNDIITTFDSIVGTNCQEQPGDQVAMVEFKKKTSDNSKYLLPEKKPLARKGLPPIRTQSLPPITLGNNFLTASHRATSHAGLSSAPHHMAQRSQKSRSEQDLLNNRTGCQMLLDNPWKSDSNQVFSYKVWTVSSSDKLLDRLLSVRPGHQEVSVPPHLRHLHNPSSGQNFQHLSPNRHKIRDLPFTRNNLAPLPDQKFLSGEPLRTNRVLPAIPSQRRHSTAAEESEHSANPTSDEN

SEQ ID NO: 17049 - protein, 326 aa, Homo sapiens
MDSNLRDINESTPLAYALYCGHTACVKLLSQESRTEPTRPPPSQSSRPQKKERRFNVLNQIFCKNKKEEQRAHQKDPSRDRYREEDTSEVNDIITTFDSIVGTNCQEQPGDQVAMVEFKKKTSDNSKYLLPEKKPLARKGLPPIRTQSLPPITLGNNFLTASHRATSHAGLSSAPHHMAQRSQKSRSEQDLLNNRTGCQMLLDNPWKSDSNQVFSYKVWTVSSSDKLLDRLLSVRPGHQEVSVPPHLRHLHNPSSGQNFQHLSPNRHKIRDLPFTRNNLAPLPDQKFLSGEPLRTNRVLPAIPSQRRHSTAAEESEHSANPTSDEN

SEQ ID NO: 17050 - protein, 295 aa, Homo sapiens
MLRTEPTRPPPSQSSRPQKKERRFNVLNQIFCKNKKEEQRAHQKDPSRDRYREEDTSEVNDIITTFDSIVGTNCQEQPGDQVAMVEFKKKTSDNSKYLLPEKKPLARKGLPPIRTQSLPPITLGNNFLTASHRATSHAGLSSAPHHMAQRSQKSRSEQDLLNNRTGCQMLLDNPWKSDSNQVFSYKVWTVSSSDKLLDRLLSVRPGHQEVSVPPHLRHLHNPSSGQNFQHLSPNRHKIRDLPFTRNNLAPLPDQKFLSGEPLRTNRVLPAIPSQRRHSTAAEESEHSANPTSDEN

SEQ ID NO: 17051 - protein, 464 aa, Homo sapiens
MYSNVIGTVTSGKRKVYLLSLLLIGFWDCVTCHGSPVDICTAKPRDIPMNPMCIYRSPEKKATEDEGSEQKIPEATNRRVWELSKANSRFATTFYQHLADSKNDNDNIFLSPLSISTAFAMTKLGACNDTLQQLMEVFKFDTISEKTSDQIHFFFAKLNCRLYRKANKSSKLVSANRLFGDKSLTFNETYQDISELVYGAKLQPLDFKENAEQSRAAINKWVSNKTEGRITDVIPSEAINELTVLVLVNTIYFKGLWKSKFSPENTRKELFYKADGESCSASMMYQEGKFRYRRVAEGTQVLELPFKGDDITMVLILPKPEKSLAKVEKELTPEVLQEWLDELEEMMLVVHMPRFRIEDGFSLKEQLQDMGLVDLFSPEKSKLPGIVAEGRDDLYVSDAFHKAFLEVNEEGSEAAASTAVVIAGRSLNPNRVTFKANRPFLVFIREVPLNTIIFMGRVANPCVK

SEQ ID NO: 17052 - protein, 191 aa, Homo sapiens
MGILYSEPICQAAYQNDFGQVWRWVKEDSSYANVQDGFNGDTPLICACRRGHVRIVSFLLRRNANVNLKNQKERTCLHYAVKKKFTFIDYLLIILLMPVLLIGYFLMVSKTKQNEALVRMLLDAGVEVNATDCYGCTALHYACEMKNQSLIPLLLEARADPTIKNKHGESSLDIARRLKFSQIELMLRKAL

SEQ ID NO: 17053 - protein, 485 aa, Homo sapiens
MRKRAPQSEMAPAGVSLRATILCLLAWAGLAAGDRVYIHPFHLVIHNESTCEQLAKANAGKPKDPTFIPAPIQAKTSPVDEKALQDQLVLVAAKLDTEDKLRAAMVGMLANFLGFRIYGMHSELWGVVHGATVLSPTAVFGTLASLYLGALDHTADRLQAILGVPWKDKNCTSRLDAHKVLSALQAVQGLLVAQGRADSQAQLLLSTVVGVFTAPGLHLKQPFVQGLALYTPVVLPRSLDFTELDVAAEKIDRFMQAVTGWKTGCSLMGASVDSTLAFNTYVHFQGKMKGFSLLAEPQEFWVDNSTSVSVPMLSGMGTFQHWSDIQDNFSVTQVPFTESACLLLIQPHYASDLDKVEGLTFQQNSLNWMKKLSPRTIHLTMPQLVLQGSYDLQDLLAQAELPAILHTELNLQKLSNDRIRVGEVLNSIFFELEADEREPTESTQQLNKPEVLEVTLNRPFLFAVYDQSATALHFLGRVANPLSTA

SEQ ID NO: 17054 - protein, 1023 aa, Homo sapiens
MDANSKDKPPETKESAMNNAGNASFILGTGKIVTPQKHAELPPNPCTPDTFKSPLNFSTVTVEQLGITPESFVRNSAGKSSSYLKKCRRRSAVGARGSPETNHLIRFIARQQNIKNARKSPLAQDSPSQGSPALYRNVNTLRERISAFQSAFHSIKENEKMTGCLEFSEAGKESEMTDLTRKEGLSACQQSGFPAVLSSKRRRISYQRDSDENLTDAEGKVIGLQIFNIDTDRACAVETSVDLSEISSKLGSTQSGFLVEESLPLSELTETSNALKVADCVVGKGSSDAVSPDTFTAEVSSDAVPDVRSPATPACRRDLPTPKTFVLRSVLKKPSVKMCLESLQEHCNNLYDDDGTHPSLISNLPNCCKEKEAEDEENFEAPAFLNMRKRKRVTFGEDLSPEVFDESLPANTPLRKGGTPVCKKDFSGLSSLLLEQSPVPEPLPQPDFDDKGENLENIEPLQVSFAVLSSPNKSSISETLSGTDTFSSSNNHEKISSPKVGRITRTSNRRNQLVSVVEESVCNLLNTEVQPCKEKKINRRKSQETKCTKRALPKKSQVLKSCRKKKGKGKKSVQKSLYGERDIASKKPLLSPIPELPEVPEMTPSIPSIRRLGSGYFSSNGKLEEVKTPKNPVKRKDLLRHDPDLHMHQGYDKYDVSEFCSYIKSSSSLGNATSDEDPNTNIMNINENKNIPKAKNKSESENEPKAGTDSPVSCASVTEERVASDSPKPALTLQQGQEFSAGGQNAENLCQFFKISPDLNIKCERKDDFLGAAEGKLQCNRLMPNSQKDCHCLGDVLIENTKESKSQSEDLGRKPMESSSVVSCRDRKDRRRSMCYSDGRSLHLEKNGNHTPSSSVGSSVEISLENSELFKDLSDAIEQTFQRRNSETKVRRSTRLQKDLENEGLVWISLPLPSTSQKAKRRTICTFDSSGFESMSPIKETVSSRQKPQMAPPVSDPENSQGPAAGSSDEPGKRRKSFCISTLANTKATSQFKGYRRRSSLNGKGESSLTALERIEHNGERKQ

SEQ ID NO: 17055 - protein, 68 aa, Homo sapiens
MDANSKDKPPETKESAMNNAGNASFILGTGKIVTPQKHAELPPNPCTPDTFKSPLNFSTVTVEQLGIN

SEQ ID NO: 17056 - protein, 220 aa, Homo sapiens
MELGLGGLSTLSHCPWPRQQPALWPTLAALALLSSVAEASLGSAPRSPAPREGPPPVLASPAGHLPGGRTARWCSGRARRPPPQPSRPAPPPPAPPSALPRGGRAARAGGPGSRARAAGARGCRLRSQLVPVRALGLGHRSDELVRFRFCSGSCRRARSPHDLSLASLLGAGALRPPPGSRPVSQPCCRPTRYEAVSFMDVNSTWRTVDRLSATACGCLG

SEQ ID NO: 17057 - protein, 237 aa, Homo sapiens
MPGLISARGQPLLEVLPPQAHLGALFLPEAPLGLSAQPALWPTLAALALLSSVAEASLGSAPRSPAPREGPPPVLASPAGHLPGGRTARWCSGRARRPPPQPSRPAPPPPAPPSALPRGGRAARAGGPGSRARAAGARGCRLRSQLVPVRALGLGHRSDELVRFRFCSGSCRRARSPHDLSLASLLGAGALRPPPGSRPVSQPCCRPTRYEAVSFMDVNSTWRTVDRLSATACGCLG

SEQ ID NO: 17058 - protein, 228 aa, Homo sapiens
MELGLGGLSTLSHCPWPRQQAPLGLSAQPALWPTLAALALLSSVAEASLGSAPRSPAPREGPPPVLASPAGHLPGGRTARWCSGRARRPPPQPSRPAPPPPAPPSALPRGGRAARAGGPGSRARAAGARGCRLRSQLVPVRALGLGHRSDELVRFRFCSGSCRRARSPHDLSLASLLGAGALRPPPGSRPVSQPCCRPTRYEAVSFMDVNSTWRTVDRLSATACGCLG

SEQ ID NO: 17059 - protein, 295 aa, Homo sapiens
MEHQLLCCEVETIRRAYPDANLLNDRVLRAMLKAEETCAPSVSYFKCVQKEVLPSMRKIVATWMLEVCEEQKCEEEVFPLAMNYLDRFLSLEPVKKSRLQLLGATCMFVASKMKETIPLTAEKLCIYTDNSIRPEELLQMELLLVNKLKWNLAAMTPHDFIEHFLSKMPEAEENKQIIRKHAQTFVALCATDVKFISNPPSMVAAGSVVAAVQGLNLRSPNNFLSYYRLTRFLSRVIKCDPDCLRACQEQIEALLESSLRQAQQNMDPKAAEEEEEEEEEVDLACTPTDVRDVDI

SEQ ID NO: 17060 - protein, 505 aa, Homo sapiens
MKFKLHVNSARQYKDLWNMSDDKPFLCTAPGCGQRFTNEDHLAVHKHKHEMTLKFGPARNDSVIVADQTPTPTRFLKNCEEVGLFNELASPFENEFKKASEDDIKKMPLDLSPLATPIIRSKIEEPSVVETTHQDSPLPHPESTTSDEKEVPLAQTAQPTSAIVRPASLQVPNVLLTSSDSSVIIQQAVPSPTSSTVITQAPSSNRPIVPVPGPFPLLLHLPNGQTMPVAIPASITSSNVHVPAAVPLVRPVTMVPSVPGIPGPSSPQPVQSEAKMRLKAALTQQHPPVTNGDTVKGHGSGLVRTQSEESRPQSLQQPATSTTETPASPAHTTPQTQSTSGRRRRAANEDPDEKRRKFLERNRAAASRCRQKRKVWVQSLEKKAEDLSSLNGQLQSEVTLLRNEVAQLKQLLLAHKDCPVTAMQKKSGYHTADKDDSSEDISVPSSPHTEAIQHSSVSTSNGVSSTSKAEAVATSVLTQMADQSTEPALSQIVMAPSSQSQPSGS

SEQ ID NO: 17061 - protein, 329 aa, Homo sapiens
MSTAYFQMMQQAVPSPTSSTVITQAPSSNRPIVPVPGPFPLLLHLPNGQTMPVAIPASITSSNVHVPAAVPLVRPVTMVPSVPGIPGPSSPQPVQSEAKMRLKAALTQQHPPVTNGDTVKGHGSGLVRTQSEESRPQSLQQPATSTTETPASPAHTTPQTQSTSGRRRRAANEDPDEKRRKFLERNRAAASRCRQKRKVWVQSLEKKAEDLSSLNGQLQSEVTLLRNEVAQLKQLLLAHKDCPVTAMQKKSGYHTADKDDSSEDISVPSSPHTEAIQHSSVSTSNGVSSTSKAEAVATSVLTQMADQSTEPALSQIVMAPSSQSQPSGS

SEQ ID NO: 17062 - protein, 209 aa, Homo sapiens
MKFKLHVNSARQYKDLWNMSDDKPFLCTAPGCGQRFTNEDHLAVHKHKHEMTLKFGPARNDSVIVADQTPTPTRFLKNCEEVGLFNELASPFENEFKKASEDDIKKMPLDLSPLATPIIRSKIEEPSVVETTHQDSPLPHPESTTSDEKEVPLAQTAQPTSAIVRPASLQVPNVLLTSSDSSVIIQQAVPSPTSSTVITQAPSSNRPIV

SEQ ID NO: 17063 - protein, 447 aa, Homo sapiens
MYCAWMWPDQTPTPTRFLKNCEEVGLFNELASPFENEFKKASEDDIKKMPLDLSPLATPIIRSKIEEPSVVETTHQDSPLPHPESTTSDEKEVPLAQTAQPTSAIVRPASLQVPNVLLTSSDSSVIIQQAVPSPTSSTVITQAPSSNRPIVPVPGPFPLLLHLPNGQTMPVAIPASITSSNVHVPAAVPLVRPVTMVPSVPGIPGPSSPQPVQSEAKMRLKAALTQQHPPVTNGDTVKGHGSGLVRTQSEESRPQSLQQPATSTTETPASPAHTTPQTQSTSGRRRRAANEDPDEKRRKFLERNRAAASRCRQKRKVWVQSLEKKAEDLSSLNGQLQSEVTLLRNEVAQLKQLLLAHKDCPVTAMQKKSGYHTADKDDSSEDISVPSSPHTEAIQHSSVSTSNGVSSTSKAEAVATSVLTQMADQSTEPALSQIVMAPSSQSQPSGS

SEQ ID NO: 17064 - protein, 487 aa, Homo sapiens
MSDDKPFLCTAPGCGQRFTNEDHLAVHKHKHEMTLKFGPARNDSVIVADQTPTPTRFLKNCEEVGLFNELASPFENEFKKASEDDIKKMPLDLSPLATPIIRSKIEEPSVVETTHQDSPLPHPESTTSDEKEVPLAQTAQPTSAIVRPASLQVPNVLLTSSDSSVIIQQAVPSPTSSTVITQAPSSNRPIVPVPGPFPLLLHLPNGQTMPVAIPASITSSNVHVPAAVPLVRPVTMVPSVPGIPGPSSPQPVQSEAKMRLKAALTQQHPPVTNGDTVKGHGSGLVRTQSEESRPQSLQQPATSTTETPASPAHTTPQTQSTSGRRRRAANEDPDEKRRKFLERNRAAASRCRQKRKVWVQSLEKKAEDLSSLNGQLQSEVTLLRNEVAQLKQLLLAHKDCPVTAMQKKSGYHTADKDDSSEDISVPSSPHTEAIQHSSVSTSNGVSSTSKAEAVATSVLTQMADQSTEPALSQIVMAPSSQSQPSGS

SEQ ID NO: 17065 - protein, 126 aa, Homo sapiens
MSDDKPFLCTAPGCGQSEVTLLRNEVAQLKQLLLAHKDCPVTAMQKKSGYHTADKDDSSEDISVPSSPHTEAIQHSSVSTSNGVSSTSKAEAVATSVLTQMADQSTEPALSQIVMAPSSQSQPSGS

SEQ ID NO: 17066 - protein, 219 aa, Homo sapiens
MSDDKPFLCTAPGCGQRFTNEDHLAVHKHKHEMTLKFGPARNDSVIVADQTPTPTRFLKNCEEVGLFNELASPFENEFKKASEDDIKKMPLDLSPLATPIIRSKIEEPSVVETTHQDSPLPHPESTTSDEKEVPLAQTAQPTSAIVRPASLQVPNVLLTSSDSSVIIQQAVPSPTSSTVITQAPSSNRPIVSFDQSPWCLVFQESQVLPLPNQYSQKQK

SEQ ID NO: 17067 - protein, 144 aa, Homo sapiens
MKFKLHVNSARQYKDLWNMSDDKPFLCTAPGCGQSEVTLLRNEVAQLKQLLLAHKDCPVTAMQKKSGYHTADKDDSSEDISVPSSPHTEAIQHSSVSTSNGVSSTSKAEAVATSVLTQMADQSTEPALSQIVMAPSSQSQPSGS

SEQ ID NO: 17068 - protein, 1220 aa, Homo sapiens
MGDMANSSIEFHPKPQQQRDVPQAGGFGCTLAELRTLMELRGAEALQKIEEAYGDVSGLCRRLKTSPTEGLADNTNDLEKRRQIYGQNFIPPKQPKTFLQLVWEALQDVTLIILEVAAIVSLGLSFYAPPGEESEACGNVSGGAEDEGEAEAGWIEGAAILLSVICVVLVTAFNDWSKEKQFRGLQSRIEQEQKFTVIRNGQLLQVPVAALVVGDIAQVKYGDLLPADGVLIQANDLKIDESSLTGESDHVRKSADKDPMLLSGTHVMEGSGRMVVTAVGVNSQTGIIFTLLGAGGEEEEKKDKKGKQQDGAMESSQTKAKKQDGAVAMEMQPLKSAEGGEMEEREKKKANAPKKEKSVLQGKLTKLAVQIGKAGLVMSAITVIILVLYFVIETFVVEGRTWLAECTPVYVQYFVKFFIIGVTVLVVAVPEGLPLAVTISLAYSVKKMMKDNNLVRHLDACETMGNATAICSDKTGTLTTNRMTVVQSYLGDTHYKEIPAPSALTPKILDLLVHAISINSAYTTKILPPEKEGALPRQVGNKTECALLGFVLDLKRDFQPVREQIPEDKLYKVYTFNSVRKSMSTVIRMPDGGFRLFSKGASEILLKKCTNILNSNGELRGFRPRDRDDMVRKIIEPMACDGLRTICIAYRDFSAGQEPDWDNENEVVGDLTCIAVVGIEDPVRPEVPEAIRKCQRAGITVRMVTGDNINTARAIAAKCGIIQPGEDFLCLEGKEFNRRIRNEKGEIEQERLDKVWPKLRVLARSSPTDKHTLVKGIIDSTTGEQRQVVAVTGDGTNDGPALKKADVGFAMGIAGTDVAKEASDIILTDDNFTSIVKAVMWGRNVYDSISKFLQFQLTVNVVAVIVAFTGACITQDSPLKAVQMLWVNLIMDTFASLALATEPPTESLLLRKPYGRDKPLISRTMMKNILGHAVYQLAIIFTLLFVGELFFDIDSGRNAPLHSPPSEHYTIIFNTFVMMQLFNEINARKIHGERNVFDGIFSNPIFCTIVLGTFGIQIVIVQFGGKPFSCSPLSTEQWLWCLFVGVGELVWGQVIATIPTSQLKCLKEAGHGPGKDEMTDEELAEGEEEIDHAERELRRGQILWFRGLNRIQTQIRVVKAFRSSLYEGLEKPESKTSIHNFMATPEFLINDYTHNIPLIDDTDVDENEERLRAPPPPSPNQNNNAIDSGIYLTTHVTKSATSSVFSSSPGSPLHSVETSL

SEQ ID NO: 17069 - protein, 1173 aa, Homo sapiens
MGDMANSSIEFHPKPQQQRDVPQAGGFGCTLAELRTLMELRGAEALQKIEEAYGDVSGLCRRLKTSPTEGLADNTNDLEKRRQIYGQNFIPPKQPKTFLQLVWEALQDVTLIILEVAAIVSLGLSFYAPPGEESEACGNVSGGAEDEGEAEAGWIEGAAILLSVICVVLVTAFNDWSKEKQFRGLQSRIEQEQKFTVIRNGQLLQVPVAALVVGDIAQVKYGDLLPADGVLIQANDLKIDESSLTGESDHVRKSADKDPMLLSGTHVMEGSGRMVVTAVGVNSQTGIIFTLLGAGGEEEEKKDKKGKQQDGAMESSQTKAKKQDGAVAMEMQPLKSAEGGEMEEREKKKANAPKKEKSVLQGKLTKLAVQIGKAGLVMSAITVIILVLYFVIETFVVEGRTWLAECTPVYVQYFVKFFIIGVTVLVVAVPEGLPLAVTISLAYSVKKMMKDNNLVRHLDACETMGNATAICSDKTGTLTTNRMTVVQSYLGDTHYKEIPAPSALTPKILDLLVHAISINSAYTTKILPPEKEGALPRQVGNKTECALLGFVLDLKRDFQPVREQIPEDKLYKVYTFNSVRKSMSTVIRMPDGGFRLFSKGASEILLKKCTNILNSNGELRGFRPRDRDDMVRKIIEPMACDGLRTICIAYRDFSAGQEPDWDNENEVVGDLTCIAVVGIEDPVRPEVPEAIRKCQRAGITVRMVTGDNINTARAIAAKCGIIQPGEDFLCLEGKEFNRRIRNEKGEIEQERLDKVWPKLRVLARSSPTDKHTLVKGIIDSTTGEQRQVVAVTGDGTNDGPALKKADVGFAMGIAGTDVAKEASDIILTDDNFTSIVKAVMWGRNVYDSISKFLQFQLTVNVVAVIVAFTGACITQDSPLKAVQMLWVNLIMDTFASLALATEPPTESLLLRKPYGRDKPLISRTMMKNILGHAVYQLAIIFTLLFVGELFFDIDSGRNAPLHSPPSEHYTIIFNTFVMMQLFNEINARKIHGERNVFDGIFSNPIFCTIVLGTFGIQIVIVQFGGKPFSCSPLSTEQWLWCLFVGVGELVWGQVIATIPTSQLKCLKEAGHGPGKDEMTDEELAEGEEEIDHAERELRRGQILWFRGLNRIQTQMEVVSTFKRSGSVQGAVRRRSSVLSQLHDVTNLSTPTHAILSAANPTSAAGNPGGESVP

SEQ ID NO: 17070 - protein, 1159 aa, Homo sapiens
MGDMANSSIEFHPKPQQQRDVPQAGGFGCTLAELRTLMELRGAEALQKIEEAYGDVSGLCRRLKTSPTEGLADNTNDLEKRRQIYGQNFIPPKQPKTFLQLVWEALQDVTLIILEVAAIVSLGLSFYAPPGEESEACGNVSGGAEDEGEAEAGWIEGAAILLSVICVVLVTAFNDWSKEKQFRGLQSRIEQEQKFTVIRNGQLLQVPVAALVVGDIAQVKYGDLLPADGVLIQANDLKIDESSLTGESDHVRKSADKDPMLLSGTHVMEGSGRMVVTAVGVNSQTGIIFTLLGAGGEEEEKKDKKAKKQDGAVAMEMQPLKSAEGGEMEEREKKKANAPKKEKSVLQGKLTKLAVQIGKAGLVMSAITVIILVLYFVIETFVVEGRTWLAECTPVYVQYFVKFFIIGVTVLVVAVPEGLPLAVTISLAYSVKKMMKDNNLVRHLDACETMGNATAICSDKTGTLTTNRMTVVQSYLGDTHYKEIPAPSALTPKILDLLVHAISINSAYTTKILPPEKEGALPRQVGNKTECALLGFVLDLKRDFQPVREQIPEDKLYKVYTFNSVRKSMSTVIRMPDGGFRLFSKGASEILLKKCTNILNSNGELRGFRPRDRDDMVRKIIEPMACDGLRTICIAYRDFSAGQEPDWDNENEVVGDLTCIAVVGIEDPVRPEVPEAIRKCQRAGITVRMVTGDNINTARAIAAKCGIIQPGEDFLCLEGKEFNRRIRNEKGEIEQERLDKVWPKLRVLARSSPTDKHTLVKGIIDSTTGEQRQVVAVTGDGTNDGPALKKADVGFAMGIAGTDVAKEASDIILTDDNFTSIVKAVMWGRNVYDSISKFLQFQLTVNVVAVIVAFTGACITQDSPLKAVQMLWVNLIMDTFASLALATEPPTESLLLRKPYGRDKPLISRTMMKNILGHAVYQLAIIFTLLFVGELFFDIDSGRNAPLHSPPSEHYTIIFNTFVMMQLFNEINARKIHGERNVFDGIFSNPIFCTIVLGTFGIQIVIVQFGGKPFSCSPLSTEQWLWCLFVGVGELVWGQVIATIPTSQLKCLKEAGHGPGKDEMTDEELAEGEEEIDHAERELRRGQILWFRGLNRIQTQMEVVSTFKRSGSVQGAVRRRSSVLSQLHDVTNLSTPTHAILSAANPTSAAGNPGGESVP

SEQ ID NO: 17071 - protein, 1206 aa, Homo sapiens
MGDMANSSIEFHPKPQQQRDVPQAGGFGCTLAELRTLMELRGAEALQKIEEAYGDVSGLCRRLKTSPTEGLADNTNDLEKRRQIYGQNFIPPKQPKTFLQLVWEALQDVTLIILEVAAIVSLGLSFYAPPGEESEACGNVSGGAEDEGEAEAGWIEGAAILLSVICVVLVTAFNDWSKEKQFRGLQSRIEQEQKFTVIRNGQLLQVPVAALVVGDIAQVKYGDLLPADGVLIQANDLKIDESSLTGESDHVRKSADKDPMLLSGTHVMEGSGRMVVTAVGVNSQTGIIFTLLGAGGEEEEKKDKKAKKQDGAVAMEMQPLKSAEGGEMEEREKKKANAPKKEKSVLQGKLTKLAVQIGKAGLVMSAITVIILVLYFVIETFVVEGRTWLAECTPVYVQYFVKFFIIGVTVLVVAVPEGLPLAVTISLAYSVKKMMKDNNLVRHLDACETMGNATAICSDKTGTLTTNRMTVVQSYLGDTHYKEIPAPSALTPKILDLLVHAISINSAYTTKILPPEKEGALPRQVGNKTECALLGFVLDLKRDFQPVREQIPEDKLYKVYTFNSVRKSMSTVIRMPDGGFRLFSKGASEILLKKCTNILNSNGELRGFRPRDRDDMVRKIIEPMACDGLRTICIAYRDFSAGQEPDWDNENEVVGDLTCIAVVGIEDPVRPEVPEAIRKCQRAGITVRMVTGDNINTARAIAAKCGIIQPGEDFLCLEGKEFNRRIRNEKGEIEQERLDKVWPKLRVLARSSPTDKHTLVKGIIDSTTGEQRQVVAVTGDGTNDGPALKKADVGFAMGIAGTDVAKEASDIILTDDNFTSIVKAVMWGRNVYDSISKFLQFQLTVNVVAVIVAFTGACITQDSPLKAVQMLWVNLIMDTFASLALATEPPTESLLLRKPYGRDKPLISRTMMKNILGHAVYQLAIIFTLLFVGELFFDIDSGRNAPLHSPPSEHYTIIFNTFVMMQLFNEINARKIHGERNVFDGIFSNPIFCTIVLGTFGIQIVIVQFGGKPFSCSPLSTEQWLWCLFVGVGELVWGQVIATIPTSQLKCLKEAGHGPGKDEMTDEELAEGEEEIDHAERELRRGQILWFRGLNRIQTQIRVVKAFRSSLYEGLEKPESKTSIHNFMATPEFLINDYTHNIPLIDDTDVDENEERLRAPPPPSPNQNNNAIDSGIYLTTHVTKSATSSVFSSSPGSPLHSVETSL

SEQ ID NO: 17072 - protein, 1168 aa, Homo sapiens
MGDMANSSIEFHPKPQQQRDVPQAGGFGCTLAELRTLMELRGAEALQKIEEAYGDVSGLCRRLKTSPTEGLADNTNDLEKRRQIYGQNFIPPKQPKTFLQLVWEALQDVTLIILEVAAIVSLGLSFYAPPGEESEACGNVSGGAEDEGEAEAGWIEGAAILLSVICVVLVTAFNDWSKEKQFRGLQSRIEQEQKFTVIRNGQLLQVPVAALVVGDIAQVKYGDLLPADGVLIQANDLKIDESSLTGESDHVRKSADKDPMLLSGTHVMEGSGRMVVTAVGVNSQTGIIFTLLGAGGEEEEKKDKKGKQQDGAMESSQTKAKKQDGAVAMEMQPLKSAEGGEMEEREKKKANAPKKEKSVLQGKLTKLAVQIGKAGLVMSAITVIILVLYFVIETFVVEGRTWLAECTPVYVQYFVKFFIIGVTVLVVAVPEGLPLAVTISLAYSVKKMMKDNNLVRHLDACETMGNATAICSDKTGTLTTNRMTVVQSYLGDTHYKEIPAPSALTPKILDLLVHAISINSAYTTKILPPEKEGALPRQVGNKTECALLGFVLDLKRDFQPVREQIPEDKLYKVYTFNSVRKSMSTVIRMPDGGFRLFSKGASEILLKKCTNILNSNGELRGFRPRDRDDMVRKIIEPMACDGLRTICIAYRDFSAGQEPDWDNENEVVGDLTCIAVVGIEDPVRPEVPEAIRKCQRAGITVRMVTGDNINTARAIAAKCGIIQPGEDFLCLEGKEFNRRIRNEKGEIEQERLDKVWPKLRVLARSSPTDKHTLVKGIIDSTTGEQRQVVAVTGDGTNDGPALKKADVGFAMGIAGTDVAKEASDIILTDDNFTSIVKAVMWGRNVYDSISKFLQFQLTVNVVAVIVAFTGACITQDSPLKAVQMLWVNLIMDTFASLALATEPPTESLLLRKPYGRDKPLISRTMMKNILGHAVYQLAIIFTLLFVGELFFDIDSGRNAPLHSPPSEHYTIIFNTFVMMQLFNEINARKIHGERNVFDGIFSNPIFCTIVLGTFGIQIVIVQFGGKPFSCSPLSTEQWLWCLFVGVGELVWGQVIATIPTSQLKCLKEAGHGPGKDEMTDEELAEGEEEIDHAERELRRGQILWFRGLNRIQTQMEVVSTFKRSGSVQGAVRRRSSVLSQLHDVTNLSTPTHAILSAANPTSAAGSES

SEQ ID NO: 17073 - protein, 1154 aa, Homo sapiens
MGDMANSSIEFHPKPQQQRDVPQAGGFGCTLAELRTLMELRGAEALQKIEEAYGDVSGLCRRLKTSPTEGLADNTNDLEKRRQIYGQNFIPPKQPKTFLQLVWEALQDVTLIILEVAAIVSLGLSFYAPPGEESEACGNVSGGAEDEGEAEAGWIEGAAILLSVICVVLVTAFNDWSKEKQFRGLQSRIEQEQKFTVIRNGQLLQVPVAALVVGDIAQVKYGDLLPADGVLIQANDLKIDESSLTGESDHVRKSADKDPMLLSGTHVMEGSGRMVVTAVGVNSQTGIIFTLLGAGGEEEEKKDKKAKKQDGAVAMEMQPLKSAEGGEMEEREKKKANAPKKEKSVLQGKLTKLAVQIGKAGLVMSAITVIILVLYFVIETFVVEGRTWLAECTPVYVQYFVKFFIIGVTVLVVAVPEGLPLAVTISLAYSVKKMMKDNNLVRHLDACETMGNATAICSDKTGTLTTNRMTVVQSYLGDTHYKEIPAPSALTPKILDLLVHAISINSAYTTKILPPEKEGALPRQVGNKTECALLGFVLDLKRDFQPVREQIPEDKLYKVYTFNSVRKSMSTVIRMPDGGFRLFSKGASEILLKKCTNILNSNGELRGFRPRDRDDMVRKIIEPMACDGLRTICIAYRDFSAGQEPDWDNENEVVGDLTCIAVVGIEDPVRPEVPEAIRKCQRAGITVRMVTGDNINTARAIAAKCGIIQPGEDFLCLEGKEFNRRIRNEKGEIEQERLDKVWPKLRVLARSSPTDKHTLVKGIIDSTTGEQRQVVAVTGDGTNDGPALKKADVGFAMGIAGTDVAKEASDIILTDDNFTSIVKAVMWGRNVYDSISKFLQFQLTVNVVAVIVAFTGACITQDSPLKAVQMLWVNLIMDTFASLALATEPPTESLLLRKPYGRDKPLISRTMMKNILGHAVYQLAIIFTLLFVGELFFDIDSGRNAPLHSPPSEHYTIIFNTFVMMQLFNEINARKIHGERNVFDGIFSNPIFCTIVLGTFGIQIVIVQFGGKPFSCSPLSTEQWLWCLFVGVGELVWGQVIATIPTSQLKCLKEAGHGPGKDEMTDEELAEGEEEIDHAERELRRGQILWFRGLNRIQTQMEVVSTFKRSGSVQGAVRRRSSVLSQLHDVTNLSTPTHAILSAANPTSAAGSES

SEQ ID NO: 17074 - protein, 1129 aa, Homo sapiens
MGDMANSSIEFHPKPQQQRDVPQAGGFGCTLAELRTLMELRGAEALQKIEEAYGDVSGLCRRLKTSPTEGLADNTNDLEKRRQIYGQNFIPPKQPKTFLQLVWEALQDVTLIILEVAAIVSLGLSFYAPPGEESEACGNVSGGAEDEGEAEAGWIEGAAILLSVICVVLVTAFNDWSKEKQFRGLQSRIEQEQKFTVIRNGQLLQVPVAALVVGDIAQVKYGDLLPADGVLIQANDLKIDESSLTGESDHVRKSADKDPMLLSGTHVMEGSGRMVVTAVGVNSQTGIIFTLLGAGGEEEEKKDKKGKQQDGAMESSQTKAKKQDGAVAMEMQPLKSAEGGEMEEREKKKANAPKKEKSVLQGKLTKLAVQIGKAGLVMSAITVIILVLYFVIETFVVEGRTWLAECTPVYVQYFVKFFIIGVTVLVVAVPEGLPLAVTISLAYSVKKMMKDNNLVRHLDACETMGNATAICSDKTGTLTTNRMTVVQSYLGDTHYKEIPAPSALTPKILDLLVHAISINSAYTTKILPPEKEGALPRQVGNKTECALLGFVLDLKRDFQPVREQIPEDKLYKVYTFNSVRKSMSTVIRMPDGGFRLFSKGASEILLKKCTNILNSNGELRGFRPRDRDDMVRKIIEPMACDGLRTICIAYRDFSAGQEPDWDNENEVVGDLTCIAVVGIEDPVRPEVPEAIRKCQRAGITVRMVTGDNINTARAIAAKCGIIQPGEDFLCLEGKEFNRRIRNEKGEIEQERLDKVWPKLRVLARSSPTDKHTLVKGIIDSTTGEQRQVVAVTGDGTNDGPALKKADVGFAMGIAGTDVAKEASDIILTDDNFTSIVKAVMWGRNVYDSISKFLQFQLTVNVVAVIVAFTGACITQDSPLKAVQMLWVNLIMDTFASLALATEPPTESLLLRKPYGRDKPLISRTMMKNILGHAVYQLAIIFTLLFVGELFFDIDSGRNAPLHSPPSEHYTIIFNTFVMMQLFNEINARKIHGERNVFDGIFSNPIFCTIVLGTFGIQIVIVQFGGKPFSCSPLSTEQWLWCLFVGVGELVWGQVIATIPTSQLKCLKEAGHGPGKDEMTDEELAEGEEEIDHAERELRRGQILWFRGLNRIQTQVCWDGKKMLRTTEVG

SEQ ID NO: 17075 - protein, 1115 aa, Homo sapiens
MGDMANSSIEFHPKPQQQRDVPQAGGFGCTLAELRTLMELRGAEALQKIEEAYGDVSGLCRRLKTSPTEGLADNTNDLEKRRQIYGQNFIPPKQPKTFLQLVWEALQDVTLIILEVAAIVSLGLSFYAPPGEESEACGNVSGGAEDEGEAEAGWIEGAAILLSVICVVLVTAFNDWSKEKQFRGLQSRIEQEQKFTVIRNGQLLQVPVAALVVGDIAQVKYGDLLPADGVLIQANDLKIDESSLTGESDHVRKSADKDPMLLSGTHVMEGSGRMVVTAVGVNSQTGIIFTLLGAGGEEEEKKDKKAKKQDGAVAMEMQPLKSAEGGEMEEREKKKANAPKKEKSVLQGKLTKLAVQIGKAGLVMSAITVIILVLYFVIETFVVEGRTWLAECTPVYVQYFVKFFIIGVTVLVVAVPEGLPLAVTISLAYSVKKMMKDNNLVRHLDACETMGNATAICSDKTGTLTTNRMTVVQSYLGDTHYKEIPAPSALTPKILDLLVHAISINSAYTTKILPPEKEGALPRQVGNKTECALLGFVLDLKRDFQPVREQIPEDKLYKVYTFNSVRKSMSTVIRMPDGGFRLFSKGASEILLKKCTNILNSNGELRGFRPRDRDDMVRKIIEPMACDGLRTICIAYRDFSAGQEPDWDNENEVVGDLTCIAVVGIEDPVRPEVPEAIRKCQRAGITVRMVTGDNINTARAIAAKCGIIQPGEDFLCLEGKEFNRRIRNEKGEIEQERLDKVWPKLRVLARSSPTDKHTLVKGIIDSTTGEQRQVVAVTGDGTNDGPALKKADVGFAMGIAGTDVAKEASDIILTDDNFTSIVKAVMWGRNVYDSISKFLQFQLTVNVVAVIVAFTGACITQDSPLKAVQMLWVNLIMDTFASLALATEPPTESLLLRKPYGRDKPLISRTMMKNILGHAVYQLAIIFTLLFVGELFFDIDSGRNAPLHSPPSEHYTIIFNTFVMMQLFNEINARKIHGERNVFDGIFSNPIFCTIVLGTFGIQIVIVQFGGKPFSCSPLSTEQWLWCLFVGVGELVWGQVIATIPTSQLKCLKEAGHGPGKDEMTDEELAEGEEEIDHAERELRRGQILWFRGLNRIQTQVCWDGKKMLRTTEVG

SEQ ID NO: 17076 - protein, 1251 aa, Homo sapiens
MSTERDSETTFDEDSQPNDEVVPYSDDETEDELDDQGSAVEPEQNRVNREAEENREPFRKECTWQVKANDRKYHEQPHFMNTKFLCIKESKYANNAIKTYKYNAFTFIPMNLFEQFKRAANLYFLALLILQAVPQISTLAWYTTLVPLLVVLGVTAIKDLVDDVARHKMDKEINNRTCEVIKDGRFKVAKWKEIQVGDVIRLKKNDFVPADILLLSSSEPNSLCYVETAELDGETNLKFKMSLEITDQYLQREDTLATFDGFIECEEPNNRLDKFTGTLFWRNTSFPLDADKILLRGCVIRNTDFCHGLVIFAGADTKIMKNSGKTRFKRTKIDYLMNYMVYTIFVVLILLSAGLAIGHAYWEAQVGNSSWYLYDGEDDTPSYRGFLIFWGYIIVLNTMVPISLYVSVEVIRLGQSHFINWDLQMYYAEKDTPAKARTTTLNEQLGQIHYIFSDKTGTLTQNIMTFKKCCINGQIYGDHRDASQHNHNKIEQVDFSWNTYADGKLAFYDHYLIEQIQSGKEPEVRQFFFLLAVCHTVMVDRTDGQLNYQAASPDEGALVNAARNFGFAFLARTQNTITISELGTERTYNVLAILDFNSDRKRMSIIVRTPEGNIKLYCKGADTVIYERLHRMNPTKQETQDALDIFANETLRTLCLCYKEIEEKEFTEWNKKFMAASVASTNRDEALDKVYEEIEKDLILLGATAIEDKLQDGVPETISKLAKADIKIWVLTGDKKETAENIGFACELLTEDTTICYGEDINSLLHARMENQRNRGGVYAKFAPPVQESFFPPGGNRALIITGSWLNEILLEKKTKRNKILKLKFPRTEEERRMRTQSKRRLEAKKEQRQKNFVDLACECSAVICCRVTPKQKAMVVDLVKRYKKAITLAIGDGANDVNMIKTAHIGVGISGQEGMQAVMSSDYSFAQFRYLQRLLLVHGRWSYIRMCKFLRYFFYKNFAFTLVHFWYSFFNGYSAQTAYEDWFITLYNVLYTSLPVLLMGLLDQDVSDKLSLRFPGLYIVGQRDLLFNYKRFFVSLLHGVLTSMILFFIPLGAYLQTVGQDGEAPSDYQSFAVTIASALVITVNFQIGLDTSYWTFVNAFSIFGSIALYFGIMFDFHSAGIHVLFPSAFQFTGTASNALRQPYIWLTIILAVAVCLLPVVAIRFLSMTIWPSESDKIQKHRKRLKAEEQWQRRQQVFRRGVSTRRSAYAFSHQRGYADLISSGRSIRKKRSPLDAIVADGTAEYRRTGDS

SEQ ID NO: 17077 - protein, 2248 aa, Homo sapiens
MKDKRKKKDRTWAEAARLALEKHPNSPMTAKQILEVIQKEGLKETSGTSPLACLNAMLHTNTRIGDGTFFKIPGKSGLYALKKEESSCPADGTLDLVCESELDGTDMAEANAHGEENGVCSKQVTDEASSTRDSSLTNTAVQSKLVSSFQQHTKKALKQALRQQQKRRNGVSMMVNKTVPRVVLTPLKVSDEQSDSPSGSESKNGEADSSDKEMKHGQKSPTGKQTSQHLKRLKKSGLGHLKWTKAEDIDIETPGSILVNTNLRALINKHTFASLPQHFQQYLLLLLPEVDRQMGSDGILRLSTSALNNEFFAYAAQGWKQRLAEGEFTPEMQLRIRQEIEKEKKTEPWKEKFFERFYGEKLGMSREESVKLTTGPNNAGAQSSSSCGTSGLPVSAQTALAEQQPKSMKSPASPEPGFCATLCPMVEIPPKDIMAELESEDILIPEESVIQEEIAEEVETSICECQDENHKTIPEFSEEAESLTNSHEEPQIAPPEDNLESCVMMNDVLETLPHIEVKIEGKSESPQEEMTVVIDQLEVCDSLIPSTSSMTHVSDTEHKESETAVETSTPKIKTGSSSLEGQFPNEGIAIDMELQSDPEEQLSENACISETSFSSESPEGACTSLPSPGGETQSTSEESCTPASLETTFCSEVSSTENTDKYNQRNSTDENFHASLMSEISPISTSPEISEASLMSNLPLTSEASPVSNLPLTSETSPMSDLPLTSETSSVSSMLLTSETTFVSSLPLPSETSPISNSSINERMAHQQRKSPSVSEEPLSPQKDESSATAKPLGENLTSQQKNLSNTPEPIIMSSSSIAPEAFPSEDLHNKTLSQQTCKSHVDTEKPYPASIPELASTEMIKVKNHSVLQRTEKKVLPSPLELSVFSEGTDNKGNELPSAKLQDKQYISSVDKAPFSEGSRNKTHKQGSTQSRLETSHTSKSSEPSKSPDGIRNESRDSEISKRKTAEQHSFGICKEKRARIEDDQSTRNISSSSPPEKEQPPREEPRVPPLKIQLSKIGPPFIIKSQPVSKPESRASTSTSVSGGRNTGARTLADIKARAQQARAQREAAAAAAVAAAASIVSGAMGSPGEGGKTRTLAHIKEQTKAKLFAKHQARAHLFQTSKETRLPPPLSSKEGPPNLEVSSTPETKMEGSTGVIIVNPNCRSPSNKSAHLRETTTVLQQSLNPSKLPETATDLSVHSSDENIPVSHLSEKIVSSTSSENSSVPMLFNKNSVPVSVCSTAISGAIKEHPFVSSVDKSSVLMSVDSANTTISACNISMLKTIQGTDTPCIAIIPKCIESTPISATTEGSSISSSMDDKQLLISSSSASNLVSTQYTSVPTPSIGNNLPNLSTSSVLIPPMGINNRFPSEKIAIPGSEEQATVSMGTTVRAALSCSDSVAVTDSLVAHPTVAMFTGNMLTINSYDSPPKLSAESLDKNSGPRNRADNSGKPQQPPGGFAPAAINRSIPCKVIVDHSTTLTSSLSLTVSVESSEASLDLQGRPVRTEASVQPVACPQVSVISRPEPVANEGIDHSSTFIAASAAKQDSKTLPATCTSLRELPLVPDKLNEPTAPSHNFAEQARGPAPFKSEADTTCSNQYNPSNRICWNDDGMRSTGQPLVTHSGSSKQKEYLEQSCPKAIKTEHANYLNVSELHPRNLVTNVALPVKSELHEADKGFRMDTEDFPGPELPPPAAEGASSVQQTQNMKASTSSPMEEAISLATDALKRVPGAGSSGCRLSSVEANNPLVTQLLQGNLPLEKVLPQPRLGAKLEINRLPLPLQTTSVGKTAPERNVEIPPSSPNPDGKGYLAGTLAPLQMRKRENHPKKRVARTVGEHTQVKCEPGKLLVEPDVKGVPCVISSGISQLGHSQPFKQEWLNKHSMQNRIVHSPEVKQQKRLLPSCSFQQNLFHVDKNGGFHTDAGTSHRQQFYQMPVAARGPIPTAALLQASSKTPVGCNAFAFNRHLEQKGLGEVSLSSAPHQLRLANMLSPNMPMKEGDEVGGTAHTMPNKALVHPPPPPPPPPPPPLALPPPPPPPPPLPPPLPNAEVPSDQKQPPVTMETTKRLSWPQSTGICSNIKSEPLSFEEGLSSSCELGMKQVSYDQNEMKEQLKAFALKSADFSSYLLSEPQKPFTQLAAQKMQVQQQQQLCGNYPTIHFGSTSFKRAASAIEKSIGILGSGSNPATGLSGQNAQMPVQNFADSSNADELELKCSCRLKAMIVCKGCGAFCHDDCIGPSKLCVACLVVR

SEQ ID NO: 17078 - protein, 317 aa, Homo sapiens
MKDKRKKKDRTWAEAARLALEKHPNSPMTAKQILEVIQKEGLKETSGTSPLACLNAMLHTNTRIGDGTFFKIPGKSGLYALKKEESSCPADGTLDLVCESELDGTDMAEANAHGEENGVCSKQVTDEASSTRDSSLTNTAVQSKLVSSFQQHTKKALKQALRQQQKRRNGVSMMVNKTVPRVVLTPLKVSDEQSDSPSGSESKNGEADSSDKEMKHGQKSPTGKQTSQHLKRLKKSGLGHLKWTKAEDIDIETPGSILVNTNLRALINKHTFASLPQHFQQYLLLLLPEVDRQSRNEPFLQEAMVPISGGCHEIKMS

SEQ ID NO: 17079 - protein, 1132 aa, Homo sapiens
MQMVPSLPPASECAGEEKRVGTRTVFVGNHPVSETEAYIAQRFCDNRIVSSKYTLWNFLPKNLFEQFRRIANFYFLIIFLVQVTVDTPTSPVTSGLPLFFVITVTAIKQGYEDCLRHRADNEVNKSTVYIIENAKRVRKESEKIKVGDVVEVQADETFPCDLILLSSCTTDGTCYVTTASLDGESNCKTHYAVRDTIALCTAESIDTLRAAIECEQPQPDLYKFVGRINIYSNSLEAVARSLGPENLLLKGATLKNTEKIYGVAVYTGMETKMALNYQGKSQKRSAVEKSINAFLIVYLFILLTKAAVCTTLKYVWQSTPYNDEPWYNQKTQKERETLKVLKMFTDFLSFMVLFNFIIPVSMYVTVEMQKFLGSFFISWDKDFYDEEINEGALVNTSDLNEELGQVDYVFTDKTGTLTENSMEFIECCIDGHKYKGVTQEVDGLSQTDGTLTYFDKVDKNREELFLRALCLCHTVEIKTNDAVDGATESAELTYISSSPDEIALVKGAKRYGFTFLGNRNGYMRVENQRKEIEEYELLHTLNFDAVRRRMSVIVKTQEGDILLFCKGADSAVFPRVQNHEIELTKVHVERNAMDGYRTLCVAFKEIAPDDYERINRQLIEAKMALQDREEKMEKVFDDIETNMNLIGATAVEDKLQDQAAETIEALHAAGLKVWVLTGDKMETAKSTCYACRLFQTNTELLELTTKTIEESERKEDRLHELLIEYRKKLLHEFPKSTRSFKKAWTEHQEYGLIIDGSTLSLILNSSQDSSSNNYKSIFLQICMKCTAVLCCRMAPLQKAQIVRMVKNLKGSPITLSIGDGANDVSMILESHVGIGIKGKEGRQAARNSDYSVPKFKHLKKLLLAHGHLYYVRIAHLVQYFFYKNLCFILPQFLYQFFCGFSQQPLYDAAYLTMYNICFTSLPILAYSLLEQHINIDTLTSDPRLYMKISGNAMLQLGPFLYWTFLAAFEGTVFFFGTYFLFQTASLEENGKVYGNWTFGTIVFTVLVFTVTLKLALDTRFWTWINHFVIWGSLAFYVFFSFFWGGIIWPFLKQQRMYFVFAQMLSSVSTWLAIILLIFISLFPEILLIVLKNVRRRSARRNLSCRRASDSLSARPSVRPLLLRTFSDESNVL

SEQ ID NO: 17080 - protein, 1108 aa, Homo sapiens
MQMVPSLPPASECAGEEKRVGTRTVFVGNHPVSETEAYIAQRFCDNRIVSSKYTLWNFLPKNLFEQFRRIANFYFLIIFLVQVTVDTPTSPVTSGLPLFFVITVTAIKQGYEDCLRHRADNEVNKSTVYIIENAKRVRKESEKIKVGDVVEVQADETFPCDLILLSSCTTDGTCYVTTASLDGESNCKTHYAVRDTIALCTAESIDTLRAAIECEQPQPDLYKFVGRINIYSNSLEAVARSLGPENLLLKGATLKNTEKIYGVAVYTGMETKMALNYQGKSQKRSAVEKSINAFLIVYLFILLTKAAVCTTLKYVWQSTPYNDEPWYNQKTQKERETLKVLKMFTDFLSFMVLFNFIIPVSMYVTVEMQKFLGSFFISWDKDFYDEEINEGALVNTSDLNEELGQVDYVFTDKTGTLTENSMEFIECCIDGHKYKGVTQEVDGLSQTDGTLTYFDKVDKNREELFLRALCLCHTVEIKTNDAVDGATESAELTYISSSPDEIALVKGAKRYGFTFLGNRNGYMRVENQRKEIEEYELLHTLNFDAVRRRMSVIVKTQEGDILLFCKGADSAVFPRVQNHEIELTKVHVERNAMDGYRTLCVAFKEIAPDDYERINRQLIEAKMALQDREEKMEKVFDDIETNMNLIGATAVEDKLQDQAAETIEALHAAGLKVWVLTGDKMETAKSTCYACRLFQTNTELLELTTKTIEESERKEDRLHELLIEYRKKLLHEFPKSTRSFKKAWTEHQEYGLIIDGSTLSLILNSSQDSSSNNYKSIFLQICMKCTAVLCCRMAPLQKAQIVRMVKNLKGSPITLSIGDGANDVSMILESHVGIGIKGKEGRQAARNSDYSVPKFKHLKKLLLAHGHLYYVRIAHLVQYFFYKNLCFILPQFLYQFFCGFSQQPLYDAAYLTMYNICFTSLPILAYSLLEQHINIDTLTSDPRLYMKISGNAMLQLGPFLYWTFLAAFEGTVFFFGTYFLFQTASLEENGKVYGNWTFGTIVFTVLVFTVTLKLALDTRFWTWINHFVIWGSLAFYVFFSFFWGGIIWPFLKQQRMYFVFAQMLSSVSTWLAIILLIFISLFPEILLIVLKNVRRRSARVHHLISSSA

SEQ ID NO: 17081 - protein, 1119 aa, Homo sapiens
MQMVPSLPPASECAGEEKRVGTRTVFVGNHPVSETEAYIAQRFCDNRIVSSKYTLWNFLPKNLFEQFRRIANFYFLIIFLVQVTVDTPTSPVTSGLPLFFVITVTAIKQGYEDCLRHRADNEVNKSTVYIIENAKRVRKESEKIKVGDVVEVQADETFPCDLILLSSCTTDGTCYVTTASLDGESNCKTHYAVRDTIALCTAESIDTLRAAIECEQPQPDLYKFVGRINIYSNSLEAVARSLGPENLLLKGATLKNTEKIYGVAVYTGMETKMALNYQGKSQKRSAVEKSINAFLIVYLFILLTKAAVCTTLKYVWQSTPYNDEPWYNQKTQKERETLKVLKMFTDFLSFMVLFNFIIPVSMYVTVEMQKFLGSFFISWDKDFYDEEINEGALVNTSDLNEELGQVDYVFTDKTGTLTENSMEFIECCIDGHKYKGVTQEVDGLSQTDGTLTYFDKVDKNREELFLRALCLCHTVEIKTNDAVDGATESAELTYISSSPDEIALVKGAKRYGFTFLGNRNGYMRVENQRKEIEEYELLHTLNFDAVRRRMSVIVKTQEGDILLFCKGADSAVFPRVQNHEIELTKVHVERNAMDGYRTLCVAFKEIAPDDYERINRQLIEAKMALQDREEKMEKVFDDIETNMNLIGATAVEDKLQDQAAETIEALHAAGLKVWVLTGDKMETAKSTCYACRLFQTNTELLELTTKTIEESERKEDRLHELLIEYRKKLLHEFPKSTRSFKKAWTEHQEYGLIIDGSTLSLILNSSQDSSSNNYKSIFLQICMKCTAVLCCRMAPLQKAQIVRMVKNLKGSPITLSIGDGANDVSMILESHVGIGIKGKEGRQAARNSDYSVPKFKHLKKLLLAHGHLYYVRIAHLVQYFFYKNLCFILPQFLYQFFCGFSQQPLYDAAYLTMYNICFTSLPILAYSLLEQHINIDTLTSDPRLYMKISGNAMLQLGPFLYWTFLAAFEGTVFFFGTYFLFQTASLEENGKVYGNWTFGTIVFTVLVFTVTLKLALDTRFWTWINHFVIWGSLAFYVFFSFFWGGIIWPFLKQQRMYFVFAQMLSSVSTWLAIILLIFISLFPEILLIVLKNVRRRSARNPNLELPMLLSYKHTDSGYS

SEQ ID NO: 17082 - protein, 1128 aa, Homo sapiens
MQMVPSLPPASECAGEEKRVGTRTVFVGNHPVSETEAYIAQRFCDNRIVSSKYTLWNFLPKNLFEQFRRIANFYFLIIFLVQVTVDTPTSPVTSGLPLFFVITVTAIKQGYEDCLRHRADNEVNKSTVYIIENAKRVRKESEKIKVGDVVEVQADETFPCDLILLSSCTTDGTCYVTTASLDGESNCKTHYAVRDTIALCTAESIDTLRAAIECEQPQPDLYKFVGRINIYSNSLEAVARSLGPENLLLKGATLKNTEKIYGVAVYTGMETKMALNYQGKSQKRSAVEKSINAFLIVYLFILLTKAAVCTTLKYVWQSTPYNDEPWYNQKTQKERETLKVLKMFTDFLSFMVLFNFIIPVSMYVTVEMQKFLGSFFISWDKDFYDEEINEGALVNTSDLNEELGQVDYVFTDKTGTLTENSMEFIECCIDGHKYKGVTQEVDGLSQTDGTLTYFDKVDKNREELFLRALCLCHTVEIKTNDAVDGATESAELTYISSSPDEIALVKGAKRYGFTFLGNRNGYMRVENQRKEIEEYELLHTLNFDAVRRRMSVIVKTQEGDILLFCKGADSAVFPRVQNHEIELTKVHVERNAMDGYRTLCVAFKEIAPDDYERINRQLIEAKMALQDREEKMEKVFDDIETNMNLIGATAVEDKLQDQAAETIEALHAAGLKVWVLTGDKMETAKSTCYACRLFQTNTELLELTTKTIEESERKEDRLHELLIEYRKKLLHEFPKSTRSFKKAWTEHQEYGLIIDGSTLSLILNSSQDSSSNNYKSIFLQICMKCTAVLCCRMAPLQKAQIVRMVKNLKGSPITLSIGDGANDVSMILESHVGIGIKGKEGRQAARNSDYSVPKFKHLKKLLLAHGHLYYVRIAHLVQYFFYKNLCFILPQFLYQFFCGFSQQPLYDAAYLTMYNICFTSLPILAYSLLEQHINIDTLTSDPRLYMKISGNAMLQLGPFLYWTFLAAFEGTVFFFGTYFLFQTASLEENGKVYGNWTFGTIVFTVLVFTVTLKLALDTRFWTWINHFVIWGSLAFYVFFSFFWGGIIWPFLKQQRMYFVFAQMLSSVSTWLAIILLIFISLFPEILLIVLKNVRRRSARVTKRLPSSGTSAIFMLSQTSSNHSFSWSE

SEQ ID NO: 17083 - protein, 79 aa, Homo sapiens
MSEILPYSEDKMGRFGADPEGSDLSFSCRLQDTNSFFAGNQAKRPPKLGQIGRAKRVVIEDDRIDDVLKGMGEKPPSGV

SEQ ID NO: 17084 - protein, 193 aa, Homo sapiens
MDGGTLPRSAPPAPPVPVGCAARRRPASPELLRCSRRRRPATAETGGGAAAVARRNERERNRVKLVNLGFQALRQHVPHGGASKKLSKVETLRSAVEYIRALQRLLAEHDAVRNALAGGLRPQAVRPSAPRGPPGTTPVAASPSRASSSPGRGGSSEPGSPRSAYSSDDSGCEGALSPAERELLDFSSWLGGY

SEQ ID NO: 17085 - protein, 1039 aa, Homo sapiens
MHQKTPEIYSVELSGTKDIVKTDKGDGKEKYRGLKNNCLELKKKNHKEEFQKELHLDDHKLSNRELEEKYGTDIIMGLSSTRAAELLARDGPNSLTPPKQTPEIVKFLKQMVGGFSILLWVGAFLCWIAYGIQYSSDKSASLNNVYLGCVLGLVVILTGIFAYYQEAKSTNIMSSFNKMIPQQALVIRDSEKKTIPSEQLVVGDIVEVKGGDQIPADIRVLSSQGCRVDNSSLTGESEPQPRSSEFTHENPLETKNICFYSTTCLEGTVTGMVINTGDRTIIGHIASLASGVGNEKTPIAIEIEHFVHIVAGVAVSIGILFFIIAVSLKYQVLDSIIFLIGIIVANVPEGLLATVTVTLSLTAKRMAKKNCLVKNLEAVETLGSTSIICSDKTGTLTQNRMTVAHLWFDNQIFVADTSEDHSNQVFDQSSRTWASLSKIITLCNRAEFKPGQENVPIMKKAVIGDASETALLKFSEVILGDVMEIRKRNRKVAEIPFNSTNKFQLSIHEMDDPHGKRFLMVMKGAPERILEKCSTIMINGEEHPLDKSTAKTFHTAYMELGGLGERVLGFCHLYLPADEFPETYSFDIDAMNFPTSNLCFVGLLSMIDPPRSTVPDAVTKCRSAGIKVIMVTGDHPITAKAIAKSVGIISANSETVEDIAHRLNIAVEQVNKRDAKAAVVTGMELKDMSSEQLDEILANYQEIVFARTSPQQKLIIVEGCQRQDAVVAVTGDGVNDSPALKKADIGIAMGIAGSDAAKNAADMVLLDDNFASIVTGVEEGRLIFDNLKKTIAYSLTKNIAELCPFLIYIIVGLPLPIGTITILFIDLGTDIIPSIALAYEKAESDIMNRKPRHKNKDRLVNQPLAVYSYLHIGLMQALGAFLVYFTVYAQEGFLPRTLINLRVEWEKDYVNDLKDSYGQEWTRYQREYLEWTGYTAFFVGILVQQIADLIIRKTRRNSIFQQGLFRNKVIWVGITSQIIIGLILSYGLGSVTALSFTMLRAQYWFVAVPHAILIWVYDEVRKLFIRLYPGSWWDKNMYY

SEQ ID NO: 17086 - protein, 1045 aa, Homo sapiens
MHQKTPEIYSVELSGTKDIVKTDKGDGKEKYRGLKNNCLELKKKNHKEEFQKELHLDDHKLSNRELEEKYGTDIIMGLSSTRAAELLARDGPNSLTPPKQTPEIVKFLKQMVGGFSILLWVGAFLCWIAYGIQYSSDKSASLNNVYLGCVLGLVVILTGIFAYYQEAKSTNIMSSFNKMIPQQALVIRDSEKKTIPSEQLVVGDIVEVKGGDQIPADIRVLSSQGCRVDNSSLTGESEPQPRSSEFTHENPLETKNICFYSTTCLEASTSPVGTVTGMVINTGDRTIIGHIASLASGVGNEKTPIAIEIEHFVHIVAGVAVSIGILFFIIAVSLKYQVLDSIIFLIGIIVANVPEGLLATVTVTLSLTAKRMAKKNCLVKNLEAVETLGSTSIICSDKTGTLTQNRMTVAHLWFDNQIFVADTSEDHSNQVFDQSSRTWASLSKIITLCNRAEFKPGQENVPIMKKAVIGDASETALLKFSEVILGDVMEIRKRNRKVAEIPFNSTNKFQLSIHEMDDPHGKRFLMVMKGAPERILEKCSTIMINGEEHPLDKSTAKTFHTAYMELGGLGERVLGFCHLYLPADEFPETYSFDIDAMNFPTSNLCFVGLLSMIDPPRSTVPDAVTKCRSAGIKVIMVTGDHPITAKAIAKSVGIISANSETVEDIAHRLNIAVEQVNKRDAKAAVVTGMELKDMSSEQLDEILANYQEIVFARTSPQQKLIIVEGCQRQDAVVAVTGDGVNDSPALKKADIGIAMGIAGSDAAKNAADMVLLDDNFASIVTGVEEGRLIFDNLKKTIAYSLTKNIAELCPFLIYIIVGLPLPIGTITILFIDLGTDIIPSIALAYEKAESDIMNRKPRHKNKDRLVNQPLAVYSYLHIGLMQALGAFLVYFTVYAQEGFLPRTLINLRVEWEKDYVNDLKDSYGQEWTRYQREYLEWTGYTAFFVGILVQQIADLIIRKTRRNSIFQQGLFRNKVIWVGITSQIIIGLILSYGLGSVTALSFTMLRAQYWFVAVPHAILIWVYDEVRKLFIRLYPGSWWDKNMYY

SEQ ID NO: 17087 - protein, 180 aa, Homo sapiens [sequence omitted]

SEQ ID NO: 17088 - protein, 412 aa, Homo sapiens
MSSKGSVVLAYSGGLDTSCILVWLKEQGYDVIAYLANIGQKEDFEEARKKALKLGAKKVFIEDVSREFVEEFIWPAIQSSALYEDRYLLGTSLARPCIARKQVEIAQREGAKYVSHGATGKGNDQVRFELSCYSLAPQIKVIAPWRMPEFYNRFKGRNDLMEYAKQHGIPIPVTPKNPWSMDENLMHISYEAGILENPKNQAPPGLYTKTQDPAKAPNTPDILEIEFKKGVPVKVTNVKDGTTHQTSLELFMYLNEVAGKHGVGRIDIVENRFIGMKSRGIYETPAGTILYHAHLDIEAFTMDREVRKIKQGLGLKFAELVYTGFWHSPECEFVRHCIAKSQERVEGKVQVSVLKGQVYILGRESPLSLYNEELVSMNVQGDYEPTDATGFININSLRLKEYHRLQSKVTAK

SEQ ID NO: 17089 - protein, 1026 aa, Homo sapiens
MRLPWELLVLQSFILCLADDSTLHGPIFIQEPSPVMFPLDSEEKKVKLNCEVKGNPKPHIRWKLNGTDVDTGMDFRYSVVEGSLLINNPNKTQDAGTYQCTATNSFGTIVSREAKLQFAYLDNFKTRTRSTVSVRRGQGMVLLCGPPPHSGELSYAWIFNEYPSYQDNRRFVSQETGNLYIAKVEKSDVGNYTCVVTNTVTNHKVLGPPTPLILRNDGVMGEYEPKIEVQFPETVPTAKGATVKLECFALGNPVPTIIWRRADGKPIARKARRHKSNGILEIPNFQQEDAGLYECVAENSRGKNVARGQLTFYAQPNWIQKINDIHVAMEENVFWECKANGRPKPTYKWLKNGEPLLTRDRIQIEQGTLNITIVNLSDAGMYQCLAENKHGVIFSNAELSVIAVGPDFSRTLLKRVTLVKVGGEVVIECKPKASPKPVYTWKKGRDILKENERITISEDGNLRIINVTKSDAGSYTCIATNHFGTASSTGNLVVKDPTRVMVPPSSMDVTVGESIVLPCQVTHDHSLDIVFTWSFNGHLIDFDRDGDHFERVGGQDSAGDLMIRNIQLKHAGKYVCMVQTSVDRLSAAADLIVRGPPGPPEAVTIDEITDTTAQLSWRPGPDNHSPITMYVIQARTPFSVGWQAVSTVPELIDGKTFTATVVGLNPWVEYEFRTVAANVIGIGEPSRPSEKRRTEEALPEVTPANVSGGGGSKSELVITWETVPEELQNGRGFGYVVAFRPYGKMIWMLTVLASADASRYVFRNESVHPFSPFEVKVGVFNNKGEGPFSPTTVVYSAEEEPTKPPASIFARSLSATDIEVFWASPLEKNRGRIQGYEVKYWRHEDKEENARKIRTVGNQTSTKITNLKGSVLYHLAVKAYNSAGTGPSSATVNVTTRKPPPSQPPGNIIWNSSDSKIILNWDQVKALDNESEVKGYKVLYRWNRQSSTSVIETNKTSVELSLPFDEDYIIEIKPFSDGGDGSSSEQIRIPKISNAYARGSGASTSNACTLSAISTIMISLTARSSL

SEQ ID NO: 17090 - protein, 282 aa, Homo sapiens
MIWMLTVLASADASRYVFRNESVHPFSPFEVKVGVFNNKGEGPFSPTTVVYSAEEEPTKPPASIFARSLSATDIEVFWASPLEKNRGRIQGYEVKYWRHEDKEENARKIRTVGNQTSTKITNLKGSVLYHLAVKAYNSAGTGPSSATVNVTTRKPPPSQPPGNIIWNSSDSKIILNWDQVKALDNESEVKGYKVLYRWNRQSSTSVIETNKTSVELSLPFDEDYIIEIKPFSDGGDGSSSEQIRIPKISNAYARGSGASTSNACTLSAISTIMISLTARSSL

SEQ ID NO: 17091 - protein, 697 aa, Homo sapiens
MEENVFWECKANGRPKPTYKWLKNGEPLLTRDRIQIEQGTLNITIVNLSDAGMYQCLAENKHGVIFSNAELSVIAVGPDFSRTLLKRVTLVKVGGEVVIECKPKASPKPVYTWKKGRDILKENERITISEDGNLRIINVTKSDAGSYTCIATNHFGTASSTGNLVVKDPTRVMVPPSSMDVTVGESIVLPCQVTHDHSLDIVFTWSFNGHLIDFDRDGDHFERVGGDSAGDLMIRNIQLKHAGKYVCMVQTSVDRLSAAADLIVRGPPGPPEAVTIDEITDTTAQLSWRPGPDNHSPITMYVIQARTPFSVGWQAVSTVPELIDGKTFTATVVGLNPWVEYEFRTVAANVIGIGEPSRPSEKRRTEEALPEVTPANVSGGGGSKSELVITWETVPEELQNGRGFGYVVAFRPYGKMIWMLTVLASADASRYVFRNESVHPFSPFEVKVGVFNNKGEGPFSPTTVVYSAEEEPTKPPASIFARSLSATDIEVFWASPLEKNRGRIQGYEVKYWRHEDKEENARKIRTVGNQTSTKITNLKGSVLYHLAVKAYNSAGTGPSSATVNVTTRKPPPSQPPGNIIWNSSDSKIILNWDQVKALDNESEVKGYKVLYRWNRQSSTSVIETNKTSVELSLPFDEDYIIEIKPFSDGGDGSSSEQIRIPKISNAYARGSGASTSNACTLSAISTIMISLTARSSL

SEQ ID NO: 17092 - protein, 698 aa, Homo sapiens
MEENVFWECKANGRPKPTYKWLKNGEPLLTRDRIQIEQGTLNITIVNLSDAGMYQCLAENKHGVIFSNAELSVIAVGPDFSRTLLKRVTLVKVGGEVVIECKPKASPKPVYTWKKGRDILKENERITISEDGNLRIINVTKSDAGSYTCIATNHFGTASSTGNLVVKDPTRVMVPPSSMDVTVGESIVLPCQVTHDHSLDIVFTWSFNGHLIDFDRDGDHFERVGGQDSAGDLMIRNIQLKHAGKYVCMVQTSVDRLSAAADLIVRGPPGPPEAVTIDEITDTTAQLSWRPGPDNHSPITMYVIQARTPFSVGWQAVSTVPELIDGKTFTATVVGLNPWVEYEFRTVAANVIGIGEPSRPSEKRRTEEALPEVTPANVSGGGGSKSELVITWETVPEELQNGRGFGYVVAFRPYGKMIWMLTVLASADASRYVFRNESVHPFSPFEVKVGVFNNKGEGPFSPTTVVYSAEEEPTKPPASIFARSLSATDIEVFWASPLEKNRGRIQGYEVKYWRHEDKEENARKIRTVGNQTSTKITNLKGSVLYHLAVKAYNSAGTGPSSATVNVTTRKPPPSQPPGNIIWNSSDSKIILNWDQVKALDNESEVKGYKVLYRWNRQSSTSVIETNKTSVELSLPFDEDYIIEIKPFSDGGDGSSSEQIRIPKISNAYARGSGASTSNACTLSAISTIMISLTARSSL

SEQ ID NO: 17093 - protein, 346 aa, Homo sapiens
MERKFMSLQPSISVSEMEPNGTFSNNNSRNCTIENFKREFFPIVYLIIFFWGVLGNGLSIYVFLQPYKKSTSVNVFMLNLAISDLLFISTLPFRADYYLRGSNWIFGDLACRIMSYSLYVNMYSSIYFLTVLSVVRFLAMVHPFRLLHVTSIRSAWILCGIIWILIMASSIMLLDSGSEQNGSVTSCLELNLYKIAKLQTMNYIALVVGCLLPFFTLSICYLLIIRVLLKVEVPESGLRVSHRKALTTIIITLIIFFLCFLPYHTLRTVHLTTWKVGLCKDRLHKALVITLALAAANACFNPLLYYFAGENFKDRLKSALRKGHPQKAKTKCVFPVSVWLRKETRV

SEQ ID NO: 17094 - protein, 117 aa, Homo sapiens
MFTLLLSNYYSRLEGWMMDNNFSHHWKGMFPTETESTVFCLFVYLFIFVFETASGFVAQTGVHWCNLGSLQPLPPGFKRFSCLSLPSSLDYRHAPPCLANFYIFSGDRVSPCWPDWS

SEQ ID NO: 17095 - protein, 2325 aa, Homo sapiens
MKKGSQQKIFSKAKIPSSSHSPIPSSMSNMRSRSLSPLIGSETLPFHSGGQWCEQVEIADENNMLLDYQDHKGADSHAGVRYITEALIKKLTKQDNLALIKSLNLSLSKDGGKKFKYIENLEKCVKLEVLNLSYNLIGKIEKLDKLLKLRELNLSYNKISKIEGIENMCNLQKLNLAGNEIEHIPVWLGKKLKSLRVLNLKGNKISSLQDISKLKPLQDLISLILVENPVVTLPHYLQFTIFHLRSLESLEGQPVTTQDRQEAFERFSLEEVERLERDLEKKMIETEELKSKQTRFLEEIKNQDKLNKSLKEEAMLQKQSCEELKSDLNTKNELLKQKTIELTRACQKQYELEQELAFYKIDAKFEPLNYYPSEYAEIDKAPDESPYIGKSRYKRNMFATESYIIDSAQAVQIKKMEPDEQLRNDHMNLRGHTPLDTQLEDKEKKISAAQTRLSELHDEIEKAEQQILRATEEFKQLEEAIQLKKISEAGKDLLYKQLSGRLQLVNKLRQEALDLELQMEKQKQEIAGKQKEIKDLQIAIDSLDSKDPKHSHMKAQKSGKEQQLDIMNKQYQQLESRLDEILSRIAKETEEIKDLEEQLTEGQIAANEALKKDLEGVISGLQEYLGTIKGQATQAQNECRKLRDEKETLLQRLTEVEQERDQLEIVAMDAENMRKELAELESALQEQHEVNASLQQTQGDLSAYEAELEARLNLRDAEANQLKEELEKVTRLTQLEQSALQAELEKERQALKNALGKAQFSEEKEQENSELHAKLKHLQDDNNLLKQQLKDFQNHLNHVVDGLVRPEEVAARVDELRRKLKLGTGEMNIHSPSDVLGKSLADLQKQFSEILARSKWERDEAQVRERKLQEEMALQQEKLATGQEEFRQACERALEARMNFDKRQHEARIQQMENEIHYLQENLKSMEEIQGLTDLQLQEADEEKERILAQLRELEKKKKLEDAKSQEQVFGLDKELKKLKKAVATSDKLATAELTIAKDQLKSLHGTVMKINQERAEELQEAERFSRKAAQAARDLTRAEAEIELLQNLLRQKGEQFRLEMEKTGVGTGANSQVLEIEKLNETMERQRTEIARLQNVLDLTGSDNKGGFENVLEEIAELRREVSYQNDYISSMADPFKRRGYWYFMPPPPSSKVSSHSSQATKDSGVGLKYSASTPVRKPRPGQQDGKEGSQPPPASGYWVYSPIRSGLHKLFPSRDADSGGDSQEESELDDQEEPPFVPPPGYMMYTVLPDGSPVPQGMALYAPPPPLPNNSRPLTPGTVVYGPPPAGAPMVYGPPPPNFSIPFIPMGVLHCNVPEHHNLENEVSRLEDIMQHLKSKKREERWMRASKRQSEKEMEELHHNIDDLLQEKKSLECEVEELHRTVQKRQQQKDFIDGNVESLMTELEIEKSLKHHEDIVDEIECIEKTLLKRRSELREADRLLAEAESELSCTKEKTKNAVEKFTDAKRSLLQTESDAEELERRAQETAVNLVKADQQLRSLQADAKDLEQHKIKQEEILKEINKIVAAKDSDFQCLSKKKEKLTEELQKLQKDIEMAERNEDHHLQVLKESEVLLQAKRAELEKLKSQVTSQQQEMAVLDRQLGHKKEELHLLQGSMVQAKADLQEALRLGETEVTEKCNHIREVKSLLEELSFQKGELNVQISERKTQLTLIKQEIEKEEENLQVVLRQMSKHKTELKNILDMLQLENHELQGLKLQHDQRVSELEKTQVAVLEEKLELENLQQISQQQKGEIEWQKQLLERDKREIERMTAESRALQSCVECLSKEKEDLQEKCDIWEKKLAQTKRVLAAAEENSKMEQSNLEKLELNVRKLQQELDQLNRDKLSLHNDISAMQQQLQEKREAVNSLQEELANVQDHLNLAKQDLLHTTKHQDVLLSEQTRLQKDISEWANRFEDCQKEEETKQQQLQVLQNEIEENKLKLVQQEMMFQRLQKERESEESKLETSKVTLKEQQHQLEKELTDQKSKLDQVLSKVLAAEERVRTLQEEERWCESLEKTLSQTKRQLSEREQQLVEKSGELLALQKEADSMRADFSLLRNQFLTERKKAEKQVASLKEALKIQRSQLEKNLLEQKQENSCIQKEMATIELVAQDNHERARRLMKELNQMQYEYTELKKQMANQKDLERRQMEISDAMRTLKSEVKDEIRTSLKNLNQFLPELPADLEAILERNENLEGELESLKENLPFTMNEGPFEEKLNFSQVHIMDEHWRGEALREKLRHREDRLKAQLRHCMSKQAEVLIKGKRQTEGTLHSLRRQVDALGELVTSTSADSASSPSLSQLESSLTEDSQLGQNQEKNASAR

SEQ ID NO: 17096 - protein, 1773 aa, Homo sapiens
MKAQKSGKEQQLDIMNKQYQQLESRLDEILSRIAKETEEIKDLEEQLTEGQIAANEALKKDLEGVISGLQEYLGTIKGQATQAQNECRKLRDEKETLLQRLTEVEQERDQLEIVAMDAENMRKELAELESALQEQHEVNASLQQTQGDLSAYEAELEARLNLRDAEANQLKEELEKVTRLTQLEQSALQAELEKERQALKNALGKAQFSEEKEQENSELHAKLKHLQDDNNLLKQQLKDFQNHLNHVVDGLVRPEEVAARVDELRRKLKLGTGEMNIHSPSDVLGKSLADLQKQFSEILARSKWERDEAQVRERKLQEEMALQQEKLATGQEEFRQACERALEARMNFDKRQHEARIQQMENEIHYLQENLKSMEEIQGLTDLQLQEADEEKERILAQLRELEKKKKLEDAKSQEQVFGLDKELKKLKKAVATSDKLATAELTIAKDQLKSLHGTVMKINQERAEELQEAERFSRKAAQAARDLTRAEAEIELLQNLLRQKGEQFRLEMEKTGVGTGANSQVLEIEKLNETMERQRTEIARLQNVLDLTGSDNKGGFENVLEEIAELRREVSYQNDYISSMADPFKRRGYWYFMPPPPSSKVSSHSSQATKDSGVGLKYSASTPVRKPRPGQQDGKEGSQPPPASGYWVYSPIRSGLHKLFPSRDADSGGDSQEESELDDQEEPPFVPPPGYMMYTVLPDGSPVPQGMALYAPPPPLPNNSRPLTPGTVVYGPPPAGAPMVYGPPPPNFSIPFIPMGVLHCNVPEHHNLENEVSRLEDIMQHLKSKKREERWMRASKRQSEKEMEELHHNIDDLLQEKKSLECEVEELHRTVQKRQQQKDFIDGNVESLMTELEIEKSLKHHEDIVDEIECIEKTLLKRRSELREADRLLAEAESELSCTKEKTKNAVEKFTDAKRSLLQTESDAEELERRAQETAVNLVKADQQLRSLQADAKDLEQHKIKQEEILKEINKIVAAKDSDFQCLSKKKEKLTEELQKLQKDIEMAERNEDHHLQVLKESEVLLQAKRAELEKLKSQVTSQQQEMAVLDRQLGHKKEELHLLQGSMVQAKADLQEALRLGETEVTEKCNHIREVKSLLEELSFQKGELNVQISERKTQLTLIKQEIEKEEENLQVVLRQMSKHKTELKNILDMLQLENHELQGLKLQHDQRVSELEKTQVAVLEEKLELENLQQISQQQKGEIEWQKQLLERDKREIERMTAESRALQSCVECLSKEKEDLQEKCDIWEKKLAQTKRVLAAAEENSKMEQSNLEKLELNVRKLQQELDQLNRDKLSLHNDISAMQQQLQEKREAVNSLQEELANVQDHLNLAKQDLLHTTKHQDVLLSEQTRLQKDISEWANRFEDCQKEEETKQQQLQVLQNEIEENKLKLVQQEMMFQRLQKERESEESKLETSKVTLKEQQHQLEKELTDQKSKLDQVLSKVLAAEERVRTLQEEERWCESLEKTLSQTKRQLSEREQQLVEKSGELLALQKEADSMRADFSLLRNQFLTERKKAEKQVASLKEALKIQRSQLEKNLLEQKQENSCIQKEMATIELVAQDNHERARRLMKELNQMQYEYTELKKQMANQKDLERRQMEISDAMRTLKSEVKDEIRTSLKNLNQFLPELPADLEAILERNENLEGELESLKENLPFTMNEGPFEEKLNFSQVHIMDEHWRGEALREKLRHREDRLKAQLRHCMSKQAEVLIKGKRQTEGTLHSLRRQVDALGELVTSTSADSASSPSLSQLESSLTEDSQLGQNQEKNASAR

SEQ ID NO: 17097 - protein, 994 aa, Homo sapiens
MQHLKSKKREERWMRASKRQSEKEMEELHHNIDDLLQEKKSLECEVEELHRTVQKRQQQKDFIDGNVESLMTELEIEKSLKHHEDIVDEIECIEKTLLKRRSELREADRLLAEAESELSCTKEKTKNAVEKFTDAKRSLLQTESDAEELERRAQETAVNLVKADQQLRSLQADAKDLEQHKIKQEEILKEINKIVAAKDSDFQCLSKKKEKLTEELQKLQKDIEMAERNEDHHLQVLKESEVLLQAKRAELEKLKSQVTSQQQEMAVLDRQLGHKKEELHLLQGSMVQAKADLQEALRLGETEVTEKCNHIREVKSLLEELSFQKGELNVQISERKTQLTLIKQEIEKEEENLQVVLRQMSKHKTELKNILDMLQLENHELQGLKLQHDQRVSELEKTQVAVLEEKLELENLQQISQQQKGEIEWQKQLLERDKREIERMTAESRALQSCVECLSKEKEDLQEKCDIWEKKLAQTKRVLAAAEENSKMEQSNLEKLELNVRKLQQELDQLNRDKLSLHNDISAMQQQLQEKREAVNSLQEELANVQDHLNLAKQDLLHTTKHQDVLLSEQTRLQKDISEWANRFEDCQKEEETKQQQLQVLQNEIEENKLKLVQQEMMFQRLQKERESEESKLETSKVTLKEQQHQLEKELTDQKSKLDQVLSKVLAAEERVRTLQEEERWCESLEKTLSQTKRQLSEREQQLVEKSGELLALQKEADSMRADFSLLRNQFLTERKKAEKQVASLKEALKIQRSQLEKNLLEQKQENSCIQKEMATIELVAQDNHERARRLMKELNQMQYEYTELKKQMANQKDLERRQMEISDAMRTLKSEVKDEIRTSLKNLNQFLPELPADLEAILERNENLEGELESLKENLPFTMNEGPFEEKLNFSQVHIMDEHWRGEALREKLRHREDRLKAQLRHCMSKQAEVLIKGKRQTEGTLHSLRRQVDALGELVTSTSADSASSPSLSQLESSLTEDSQLGQNQEKNASAR

SEQ ID NO: 17098 - protein, 482 aa, Homo sapiens
MEQSNLEKLELNVRKLQQELDQLNRDKLSLHNDISAMQQQLQEKREAVNSLQEELANVQDHLNLAKQDLLHTTKHQDVLLSEQTRLQKDISEWANRFEDCQKEEETKQQQLQVLQNEIEENKLKLVQQEMMFQRLQKERESEESKLDQVLSKVLAAEERVRTLQEEERWCESLEKTLSQTKRQLSEREQQLVEKSGELLALQKEADSMRADFSLLRNQFLTERKKAEKQVASLKEALKIQRSQLEKNLLEQKQENSCIQKEMATIELVAQDNHERARRLMKELNQMQYEYTELKKQMANQKDLERRQMEISDAMRTLKSEVKDEIRTSLKNLNQFLPELPADLEAILERNENLEGELESLKENLPFTMNEGPFEEKLNFSQVHIMDEHWRGEALREKLRHREDRLKAQLRHCMSKQAEVLIKGKRQTEGTLHSLRRQVDALGELVTSTSADSASSPSLSQLESSLTEDSQLGQNQEKNASAR

SEQ ID NO: 17099 - protein, 2319 aa, Homo sapiens
MKKGSQQKIFSKAKIPSSSHSPIPSSMSNMRSRSLSPLIGSETLPFHSGGQWCEQVEIADENNMLLDYQDHKGADSHAGVRYITEALIKKLTKQDNLALIKSLNLSLSKDGGKKFKYIENLEKCVKLEVLNLSYNLIGKIEKLDKLLKLRELNLSYNKISKIEGIENMCNLQKLNLAGNEIEHIPVWLGKKLKSLRVLNLKGNKISSLQDISKLKPLQDLISLILVENPVVTLPHYLQFTIFHLRSLESLEGQPVTTQDRQEAFERFSLEEVERLERDLEKKMIETEELKSKQTRFLEEIKNQDKLNKSLKEEAMLQKQSCEELKSDLNTKNELLKQKTIELTRACQKQYELEQELAFYKIDAKFEPLNYYPSEYAEIDKAPDESPYIGKSRYKRNMFATESYIIDSAQAVQIKKMEPDEQLRNDHMNLRGHTPLDTQLEDKEKKISAAQTRLSELHDEIEKAEQQILRATEEFKQLEEAIQLKKISEAGKDLLYKQLSGRLQLVNKLRQEALDLELQMEKQKQEIAGKQKEIKDLQIAIDSLDSKDPKHSHMKAQKSGKEQQLDIMNKQYQQLESRLDEILSRIAKETEEIKDLEEQLTEGQIAANEALKKDLEGVISGLQEYLGTIKGQATQAQNECRKLRDEKETLLQRLTEVEQERDQLEIVAMDAENMRKELAELESALQEQHEVNASLQQTQGDLSAYEAELEARLNLRDAEANQLKEELEKVTRLTQLEQSALQAELEKERQALKNALGKAQFSEEKEQENSELHAKLKHLQDDNNLLKQQLKDFQNHLNHVVDGLVRPEEVAARVDELRRKLKLGTGEMNIHSPSDVLGKSLADLQKQFSEILARSKWERDEAQVRERKLQEEMALQQEKLATGQEEFRQACERALEARMNFDKRQHEARIQQMENEIHYLQENLKSMEEIQGLTDLQLQEADEEKERILAQLRELEKKKKLEDAKSQEQVFGLDKELKKLKKAVATSDKLATAELTIAKDQLKSLHGTVMKINQERAEELQEAERFSRKAAQAARDLTRAEAEIELLQNLLRQKGEQFRLEMEKTGVGTGANSQVLEIEKLNETMERQRTEIARLQNVLDLTGSDNKGGFENVLEEIAELRREVSYQNDYISSMADPFKRRGYWYFMPPPPSSKVSSHSSQATKDSGVGLKYSASTPVRKPRPGQQDGKEGSQPPPASGYWVYSPIRSGLHKLFPSRDADSGGDSQEESELDDQEEPPFVPPPGYMMYTVLPDGSPVPQGMALYAPPPPLPNNSRPLTPGTVVYGPPPAGAPPPNFSIPFIPMGVLHCNVPEHHNLENEVSRLEDIMQHLKSKKREERWMRASKRQSEKEMEELHHNIDDLLQEKKSLECEVEELHRTVQKRQQQKDFIDGNVESLMTELEIEKSLKHHEDIVDEIECIEKTLLKRRSELREADRLLAEAESELSCTKEKTKNAVEKFTDAKRSLLQTESDAEELERRAQETAVNLVKADQQLRSLQADAKDLEQHKIKQEEILKEINKIVAAKDSDFQCLSKKKEKLTEELQKLQKDIEMAERNEDHHLQVLKESEVLLQAKRAELEKLKSQVTSQQQEMAVLDRQLGHKKEELHLLQGSMVQAKADLQEALRLGETEVTEKCNHIREVKSLLEELSFQKGELNVQISERKTQLTLIKQEIEKEEENLQVVLRQMSKHKTELKNILDMLQLENHELQGLKLQHDQRVSELEKTQVAVLEEKLELENLQQISQQQKGEIEWQKQLLERDKREIERMTAESRALQSCVECLSKEKEDLQEKCDIWEKKLAQTKRVLAAAEENSKMEQSNLEKLELNVRKLQQELDQLNRDKLSLHNDISAMQQQLQEKREAVNSLQEELANVQDHLNLAKQDLLHTTKHQDVLLSEQTRLQKDISEWANRFEDCQKEEETKQQQLQVLQNEIEENKLKLVQQEMMFQRLQKERESEESKLETSKVTLKEQQHQLEKELTDQKSKLDQVLSKVLAAEERVRTLQEEERWCESLEKTLSQTKRQLSEREQQLVEKSGELLALQKEADSMRADFSLLRNQFLTERKKAEKQVASLKEALKIQRSQLEKNLLEQKQENSCIQKEMATIELVAQDNHERARRLMKELNQMQYEYTELKKQMANQKDLERRQMEISDAMRTLKSEVKDEIRTSLKNLNQFLPELPADLEAILERNENLEGELESLKENLPFTMNEGPFEEKLNFSQVHIMDEHWRGEALREKLRHREDRLKAQLRHCMSKQAEVLIKGKRQTEGTLHSLRRQVDALGELVTSTSADSASSPSLSQLESSLTEDSQLGQNQEKNASAR

SEQ ID NO: 17100 - protein, 418 aa, Homo sapiens
MGGEAGCAAAVGAEGRVKSLGLVFEDERKGCYSSGETVAGHVLLEASEPVALRALRLEAQGRATAAWGPSTCPRASASTAALAVFSEVEYLNVRLSLREPPAGEGIILLQPGKHEFPFRFQLPSEPLVTSFTGKYGSIQYCVRAVLERPKVPDQSVKRELQVVSHVDVNTPALLTPVLKTQEKMVGCWFFTSGPVSLSAKIERKGYCNGEAIPIYAEIENCSSRLIVPKAAIFQTQTYLASGKTKTIRHMVANVRGNHIASGSTDTWNGKTLKIPPVTPSILDCCIIRVDYSLAVYIHIPGAKKLMLELPLVIGTIPYNGFGSRNSSIASQFSMDMSWLTLTLPEQPEAPPNYADVVSEEEFSRHIPPYPQPPNCEGEVCCPVFACIQEFRFQPPPLYSEVDPHPSDVEESQPVSFIL

SEQ ID NO: 17101 - protein, 68 aa, Homo sapiens
MPQKDPCQKQACEIQKCLQANSYMESKCQAVIQELRKCCAQYPKGRSVVCSGFEKEEEENLTRKSASK

SEQ ID NO: 17102 - protein, 414 aa, Homo sapiens
MVLGKVKSLTISFDCLNDSNVPVYSSGDTVSGRVNLEVTGEIRVKSLKIHARGHAKVRWTESRNAGSNTAYTQNYTEEVEYFNHKDILIGHERDDDNSEEGFHTIHSGRHEYAFSFELPQTPLATSFEGRHGSVRYWVKAELHRPWLLPVKLKKEFTVFEHIDINTPSLLSPQAGTKEKTLCCWFCTSGPISLSAKIERKGYTPGESIQIFAEIENCSSRMVVPKAAIYQTQAFYAKGKMKEVKQLVANLRGESLSSGKTETWNGKLLKIPPVSPSILDCSIIRVEYSLMVYVDIPGAMDLFLNLPLVIGTIPLHPFGSRTSSVSSQCSMNMNWLSLSLPERPEAPPSYAEVVTEEQRRNNLAPVSACDDFERALQGPLFAYIQEFRFLPPPLYSEIDPNPDQSADDRPSCPSR

SEQ ID NO: 17103 - protein, 418 aa, Homo sapiens
MAGRLPACVVDCGTGYTKLGYAGNTEPQFIIPSCIAIKESAKVGDQAQRRVMKGVDDLDFFIGDEAIEKPTYATKWPIRHGIVEDWDLMERFMEQVIFKYLRAEPEDHYFLLTEPPLNTPENREYTAEIMFESFNVPGLYIAVQAVLALAASWTSRQVGERTLTGTVIDSGDGVTHVIPVAEGYVIGSCIKHIPIAGRDITYFIQQLLRDREVGIPPEQSLETAKAVKERYSYVCPDLVKEFNKYDTDGSKWIKQYTGINAISKKEFSIDVGYERFLGPEIFFHPEFANPDFTQPISEVVDEVIQNCPIDVRRPLYKNIVLSGGSTMFRDFGRRLQRDLKRTVDARLKLSEELSGGRLKPKPIDVQVITHHMQRYAVWFGGSMLASTPEFYQVCHTKKDYEEIGPSICRHNPVFGVMS

SEQ ID NO: 17104 - protein, 935 aa, Homo sapiens
MAAAKPTLTDSLSFCLAQLAAAAGEALGGEKDPATNETPLSRALLALRTRHIKAAGGIERFRARGGLRPLLALLRRAAAAGSAPSQAGPGSAPSSAASGASSPAPASGPAPSAVSSSSPTPPVRLRKTLDLALSILADCCTEGACRTEVRRLGGILPLVTILQCMKTDSIQNRTARALGNLAMEPESCGDIHCAGAVPLLVESLTACQDSQCLQSVVRALRNLADSPQHRLALAQQGAVRPLAELLATAPDAALTLALVRALLELSRGCSRACAEQLSLGGGLGPLVSLASHPKRAVREGTILILANLCAQGLIRPALGNAGGVEVLVDELRQRRDPNGASPTSQQPLVRAVCLLCREAINRARLRDAGGLDLLMGLLRDPRASAWHPRIVAALVGFLYDTGALGRLQALGLVPLLAGQLCGEAGEEEEEGREAASWDFPEERTPERAQGGSFRSLRSWLISEGYATGPDDISPDWSPEQCPPEPMEPASPAPTPTSLRAPRTQRTPGRSPAAAIEEPWGREGPALLLLSRFSQAPDPSGALVTGPALYGLLTYVTGAPGPPSPRALRILSRLTCNPACLEAFVRSYGAALLRAWLVLGVAPDDWPAPRARPTLHSRHRELGERLLQNLTVQAESPFGVGALTHLLLSGSPEDRVACALTLPFICRKPSLWRRLLLEQGGLRLLLAALTRPAPHPLFLFFAADSLSCLQDLVSPTVSPAVPQAVPMDLDSPSPCLYEPLLGPAPVPAPDLHFLLDSGLQLPAQRAASATASPFFRALLSGSFAEAQMDLVPLRGLSPGAAWPVLHHLHGCRGCGAALGPVPPPGQPLLGSEAEEALEAAGRFLLPGLEEELEEAVGRIHLGPQGGPESVGEVFRLGRPRLAAHCARWTLGSEQCPRKRGLALVGLVEAAGEEAGPLTEALLAVVMGIELGARVPA

SEQ ID NO: 17105 - protein, 771 aa, Homo sapiens
MKTDSIQNRTARALGNLAMEPESCGDIHCAGAVPLLVESLTACQDSQCLQSVVRALRNLADSPQHRLALAQQGAVRPLAELLATAPDAALTLALVRALLELSRGCSRACAEQLSLGGGLGPLVSLASHPKRAVREGTILILANLCAQGLIRPALGNAGGVEVLVDELRQRRDPNGASPTSQQPLVRAVCLLCREAINRARLRDAGGLDLLMGLLRDPRASAWHPRIVAALVGFLYDTGALGRLQALGLVPLLAGQLCGEAGEEEEEGREAASWDFPEERTPERAQGGSFRSLRSWLISEGYATGPDDISPDWSPEQCPPEPMEPASPAPTPTSLRAPRTQRTPGRSPAAAIEEPWGREGPALLLLSRFSQAPDPSGALVTGPALYGLLTYVTGAPGPPSPRALRILSRLTCNPACLEAFVRSYGAALLRAWLVLGVAPDDWPAPRARPTLHSRHRELGERLLQNLTVQAESPFGVGALTHLLLSGSPEDRVACALTLPFICRKPSLWRRLLLEQGGLRLLLAALTRPAPHPLFLFFAADSLSCLQDLVSPTVSPAVPQAVPMDLDSPSPCLYEPLLGPAPVPAPDLHFLLDSGLQLPAQRAASATASPFFRALLSGSFAEAQMDLVPLRGLSPGAAWPVLHHLHGCRGCGAALGPVPPPGQPLLGSEAEEALEAAGRFLLPGLEEELEEAVGRIHLGPQGGPESVGEVFRLGRPRLAAHCARWTLGSEQCPRKRGLALVGLVEAAGEEAGPLTEALLAVVMGIELGARVPA

SEQ ID NO: 17106 - protein, 502 aa, Homo sapiens
MKTDSIQNRTARALGNLAMEPESCGDIHCAGAVPLLVESLTACQDSQCLQSVVRALRNLADSPQHRLALAQQGAVRPLAELLATAPDAALTLALVRALLELSRGCSRACAEQLSLGGGLGPLVSLASHPKRAVREGTILILANLCAQGLIRPALGNAGGVEVLVDELRQRRDPNGASPTSQQPLVRAVCLLCREAINRARLRDAGGLDLLMGLLRDPRASAWHPRIVAALVGFLYDTGALGRLQALGLVPLLAGQLCGEAGEEEEEGREAASWDFPEERTPERAQGGSFRSLRSWLISEGYATGPDDISPDWSPEQCPPEPMEPASPAPTPTSLRAPRTQRTPGRSPAAAIEEPWGREGPALLLLSRFSQAPDPSGALVTGPALYGLLTYVTGAPGPPSPRALRILSRLTCNPACLEAFVRSYGAALLRAWLVLGVAPDDWPAPRARPTLHSRHRELGERLLQNLTVQAESPFGVGALTHLLLSGSPEDRVACALTLPFICR

SEQ ID NO: 17107 - protein, 725 aa, Homo sapiens
MAAAKPTLTDSLSFCLAQLAAAAGEALGGEKDPATNETPLSRALLALRTRHIKAAGGIERFRARGGLRPLLALLRRAAAAGSAPSQAGPGSAPSSAASGASSPAPASGPAPSAVSSSSPTPPVRLRKTLDLALSILADCCTEGACRTEVRRLGGILPLVTILQCMKTDSIQNRTARALGNLAMEPESCGDIHCAGAVPLLVESLTACQDSQCLQSVVRALRNLADSPQHRLALAQQGAVRPLAELLATAPDAALTLALVRALLELSRGCSRACAEQLSLGGGLGPLVSLASHPKRAVREGTILILANLCAQGLIRPALGNAGGVEVLVDELRQRRDPNGASPTSQQPLVRAVCLLCREAINRARLRDAGGLDLLMGLLRDPRASAWHPRIVAALVGFLYDTGALGRLQALGLVPLLAGQLCGEAGEEEEEGREAASWDFPEERTPERAQGGSFRSLRSWLISEGYATGPDDISPDWSPEQCPPEPMEPASPAPTPTSLRAPRTQRTPGRSPAAAIEEPWGREGPALLLLSRFSQAPDPSGALVTGPALYGLLTYVTGAPGPPSPRALRILSRLTCNPACLEAFVRSYGAALLRAWLVLGVAPDDWPAPRARPTLHSRHRELGEFPYPPVSLPPCESPSSPMASMGPEPHLPTHLSSPARPPDNLSPEWGGEQGVPVPPWAHRQSSAVSSALALGPRYPNSRCSPAPRIWAGLCFFPGSAIGSALS

SEQ ID NO: 17108 - protein, 507 aa, Homo sapiens
MGAPRSLLLALAAGLAVARPPNIVLIFADDLGYGDLGCYGHPSSTTPNLDQLAAGGLRFTDFYVPVSLCTPSRAALLTGRLPVRMGMYPGVLVPSSRGGLPLEEVTVAEVLAARGYLTGMAGKWHLGVGPEGAFLPPHQGFHRFLGIPYSHDQGPCQNLTCFPPATPCDGGCDQGLVPIPLLANLSVEAQPPWLPGLEARYMAFAHDLMADAQRQDRPFFLYYASHHTHYPQFSGQSFAERSGRGPFGDSLMELDAAVGTLMTAIGDLGLLEETLVIFTADNGPETMRMSRGGCSGLLRCGKGTTYEGGVREPALAFWPGHIAPGVTHELASSLDLLPTLAALAGAPLPNVTLDGFDLSPLLLGTGKSPRQSLFFYPSYPDEVRGVFAVRTGKYKAHFFTQGSAHSDTTADPACHASSSLTAHEPPLLYDLSKDPGENYNLLGGVAGATPEVLQALKQLQLLKAQLDAAVTFGPSQVARGEDPALQICCHPGCTPRPACCHCPDPHA

SEQ ID NO: 17109 - protein, 423 aa, Homo sapiens
MGMYPGVLVPSSRGGLPLEEVTVAEVLAARGYLTGMAGKWHLGVGPEGAFLPPHQGFHRFLGIPYSHDQGPCQNLTCFPPATPCDGGCDQGLVPIPLLANLSVEAQPPWLPGLEARYMAFAHDLMADAQRQDRPFFLYYASHHTHYPQFSGQSFAERSGRGPFGDSLMELDAAVGTLMTAIGDLGLLEETLVIFTADNGPETMRMSRGGCSGLLRCGKGTTYEGGVREPALAFWPGHIAPGVTHELASSLDLLPTLAALAGAPLPNVTLDGFDLSPLLLGTGKSPRQSLFFYPSYPDEVRGVFAVRTGKYKAHFFTQGSAHSDTTADPACHASSSLTAHEPPLLYDLSKDPGENYNLLGGVAGATPEVLQALKQLQLLKAQLDAAVTFGPSQVARGEDPALQICCHPGCTPRPACCHCPDPHA

SEQ ID NO: 17110 - protein, 198 aa, Homo sapiens
MAQKPKVDPHVGRLGYLQALVTEFQETQSQDAKEQVLANLANFAYDPSNYEYLRQLQVLDLFLDSLSEENETLVEFAIGGLCNLCPDRANKEHILHAGGVPLIINCLSSPNEETVLSAITTLMHLSPPGRSFLPELTATPVVQCMLRFSLSASARLRNLAQIFLEDFCSPRQVAEARSRQAHSALGIPLPRSVAPRQR

SEQ ID NO: 17111 - protein, 103 aa, Homo sapiens
MAQKPKVDPHVGRLGYLQALVTEFQETQSQDAKEQVLANLANFAYDPSNYEYLRQLQEACATCAQTGPTRSTSCTQEVSHSSSTAYPAPMRRRCCLPSPRSCT

SEQ ID NO: 17112 - protein, 396 aa, Homo sapiens
MTTLVLDNGAYNAKIGYSHENVSVIPNCQFRSKTARLKTFTANQIDEIKDPSGLFYILPFQKGYLVNWDVQRQVWDYLFGKEMYQVDFLDTNIIITEPYFNFTSIQESMNEILFEEYQFQAVLRVNAGALSAHRYFRDNPSELCCIIVDSGYSFTHIVPYCRSKKKKEAIIRINVGGKLLTNHLKEIISYRQLHVMDETHVINQVKEDVCYVSQDFYRDMDIAKLKGEENTVMIDYVLPDFSTIKKGFCKPREEMVLSGKYKSGEQILRLANERFAVPEILFNPSDIGIQEMGIPEAIVYSIQNLPEEMQPHFFKNIVLTGGNSLFPGFRDRVYSEVRCLTPTDYDVSVVLPENPITYAWEGGKLISENDDFEDMVVTREDYEENGHSVCEEKFDI

SEQ ID NO: 17113 - protein, 183 aa, Homo sapiens
MTTLVLDNGAYNAKIGYSHENVSVIPNCQFRSKTARLKTFTANQIDEIKDPSGLFYILPFQKGYLVNWDVQRQVWDYLFGKEMYQVDFLDTNIIITEPYFNFTSIQESMNEILFEEYQFQAVLRVNGEFKFSLKLSYMTMDMNRVILIKSQNIKWHSWLAQWLTPVTPSVWEAEASRSLEFRI

SEQ ID NO: 17114 - protein, 689 aa, Homo sapiens
MKPVHERSQECLPPKKRDLPVTSEDMGRTTSCSTNHTPSSDASEWSRGVVVAGQSQAGARVSLGGDGAEAITGLTVDQYGMLYKVAVPPATFSPTGLPSVVNMSPLPPTFNVASSLIQHPGIHYPPLHYAQLPSTSLQFIGSPYSLPYAVPPNFLPSPLLSPSANLATSHLPHFVPYASLLAEGATPPPQAPSPAHSFNKAPSATSPSGQLPHHSSTQPLDLAPGRMPIYYQMSRLPAGYTLHETPPAGASPVLTPQESQSALEAAAANGGQRPRERNLVRRESEALDSPNSKGEGQGLVPVVECVVDGQLFSGSQTPRVEVAAPAHRGTPDTDLEVQRVVGALASQDYRVVAAQRKEEPSPLNLSHHTPDHQGEGRGSARNPAELAEKSQARGFYPQSHQEPVKHRPLPKAMVVANGNLVPTGTDSGLLPVGSEILVASSLDVQARATFPDKEPTPPPITSSHLPSHFMKGAIIQLATGELKRVEDLQTQDFVRSAEVSGGLKIDSSTVVDIQESQWPGFVMLHFVVGEQQSKVSIEVPPEHPFFVYGQGWSSCSPGRTTQLFSLPCHRLQVGDVCISISLQSLNSNSVSQASCAPPSQLGPPRERPERTVLGSRELCDSEGKSQPAGEGSRVVEPSQPESGAQACWPAPSFQRYSMQGEEARAALLRPSFIPQEVKLSIEGRSNAGK

SEQ ID NO: 17115 - protein, 632 aa, Homo sapiens
MSRVRDAGCVAAGIVIGAGAWYCVYKYTRGRDQTKKRMAKPKNRAVAGTGARARAGLRAGFTIDLGSGFSPPTPVRAEAEDRAQDEASALDTVGAEAVAPAASSAEAQSGAGSQAQEADGAGVGPKAESVVGAAMASAIAPPPGVTEALGAAEAPAMAGAPKVAEAPREAETSRAAVPPGTVVPTEAAAPTEVTEGPGVAAPTKVAEAPGVASPTEAAEAPVPATPTGAAAPTGAAESPGTSGSPRTAVVPGTSAAKKATPGAHTGAIPKATSATGAVPKGGGKGVTRSRNGGKGKGKKSKVEVDELGMGFRPGDGAAAAAAASANGGQAFLAEVPDSEEGESGWTDTESDSDSEPETQRRGRGRRPVAMQKRPFPYEIDEILGVRDLRKVLALLQKSDDPFIQQVALLTLSNNANYSCNQETIRKLGGLPIIANMINKTDPHIKEKALMAMNNLSENYENQGRLQVYMNKVMDDIMASNLNSAVQVVGLKFLTNMTITNDYQHLLVNSIANFFRLLSQGGGKIKVEILKILSNFAENPDMLKKLLSTQVPASFSSLYNSYVESEILINALTLFEIIYDNLRAEVFNYREFNKGSLFYLCTTSGVCVKKIRALANHHDLLVKVKVIKLVNKF

SEQ ID NO: 17116 - protein, 453 aa, Homo sapiens
MGRTREAGCVAAGVVIGAGACYCVYRLAWGRDENEKIWDEDEESTDTSEIGVETVKGAKTNAGAGSGAKLQGDSEVKPEVSLGLEDCPGVKEKAHSGSHSGGGLEAKAKALFNTLKEQASAKAGKGARVGTISGNRTLAPSLPCPGGRGGGCHPTRSGSRAGGRASGKSKGKARSKSTRAPATTWPVRRGKFNFPYKIDDILSAPDLQKVLNILERTNDPFIQEVALVTLGNNAAYSFNQNAIRELGGVPIIAKLIKTKDPIIREKTYNALNNLSVNAENQGKIKTYISQVCDDTMVCRLDSAVQMAGLRLLTNMTVTNHYQHLLSYSFPDFFALLFLGNHFTKIQIMKLIINFTENPAMTRELVSCKVPSELISLFNKEWDREILLNILTLFENINDNIKNEGLASSRKEFSRSSLFFLFKESGVCVKKIKALANHNDLVVKVKVLKVLTKL

SEQ ID NO: 17117 - protein, 300 aa, Homo sapiens
MGRAREVGWMAAGLMIGAGACYCVYKLTIGRDDSEKLEEEGEEEWDDDQELDEEEPDIWFDFETMARPWTEDGDWTEPGAPGGTEDRPSGGGKANRAHPIKQRPFPYEHKNTWSAQNCKNGSCVLDLSKCLFIQGKLLFAEPKDAGFPFSQDINSHLASLSMARNTSPTPDPTVREALCAPDNLNASIESQGQIKMYINEVCRETVSRCCNSFLQQAGLNLLISMTVINNMLAKSASDLKFPLISEGSGCAKVQVLKPLMGLSEKPVLAGELVGAQMLFSFMSLFIRNGNREILLETPAP

SEQ ID NO: 17118 - protein, 1736 aa, Homo sapiens
MERCSRCHRLLLLLPLVLGLSAAPGWAGAPPVDVLRALRFPSLPDGVRRAKGICPADVAYRVARPAQLSAPTRQLFPGGFPKDFSLLTVVRTRPGLQAPLLTLYSAQGVRQLGLELGRPVRFLYEDQTGRPQPPSQPVFRGLSLADGKWHRVAVAVKGQSVTLIVDCKKRVTRPLPRSARPVLDTHGVIIFGARILDEEVFEGDVQELAIVPGVQAAYESCEQKELECEGGQRERPQNQQPHRAQRSPQQQPSRLHRPQNQEPQSQPTESLYYDYEPPYYDVMTTGTTPDYQDPTPGEEEEILESSLLPPLEEEQTDLQVPPTADRFQAEEYGEGGTDPPEGPYDYTYGYGDDYREETELGPALSAETAHSGAAAHGPRGLKGEKGEPAVLEPGMLVEGPPGPEGPAGLIGPPGIQGNPGPVGDPGERGPPGRAGLPGSDGAPGPPGTSLMLPFRFGSGGGDKGPVVAAQEAQAQAILQQARLALRGPPGPMGYTGRPGPLGQPGSPGLKGESGDLGPQGPRGPQGLTGPPGKAGRRGRAGADGARGMPGDPGVKGDRGFDGLPGLPGEKGHRGDTGAQGLPGPPGEDGERGDDGEIGPRGLPGESGPRGLLGPKGPPGIPGPPGVRGMDGPQGPKGSLGPQGEPGPPGQQGTPGTQGLPGPQGAIGPHGEKGPQGKPGLPGMPGSDGPPGHPGKEGPPGTKGNQGPSGPQGPLGYPGPRGVKGVDGIRGLKGHKGEKGEDGFPGFKGDIGVKGDRGEVGVPGSRGEDGPEGPKGRTGPTGDPGPPGLMGEKGKLGVPGLPGYPGRQGPKGSLGFPGFPGASGEKGARGLSGKSGPRGERGPTGPRGQRGPRGATGKSGAKGTSGGDGPHGPPGERGLPGPQGPNGFPGPKGPLGPPGKDGLPGHPGQRGEVGFQGKTGPPGPPGVVGPQGAAGETGPMGERGHPGPPGPPGEQGLPGTAGKEGTKGDPGPPGAPGKDGPAGLRGFPGERGLPGTAGGPGLKGNEGPSGPPGPAGSPGERGAAGSGGPIGPPGRPGPQGPPGAAGEKGVPGEKGPIGPTGRDGVQGPVGLPGPAGPPGVAGEDGDKGEVGDPGQKGTKGNKGEHGPPGPPGPIGPVGQPGAAGADGEPGARGPQGHFGAKGDEGTRGFNGPPGPIGLQGLPGPSGEKGETGDVGPMGPPGPPGPRGPAGPNGADGPQGPPGGVGNLGPPGEKGEPGESGSPGIQGEPGVKGPRGERGEKGESGQPGEPGPPGPKGPTGDDGPKGNPGPVGFPGDPGPPGEGGPRGQDGAKGDRGEDGEPGQPGSPGPTGENGPPGPLGKRGPAGSPGSEGRQGGKGAKGDPGAIGAPGKTGPVGPAGPAGKPGPDGLRGLPGSVGQQGRPGATGQAGPPGPVGPPGLPGLRGDAGAKGEKGHPGLIGLIGPPGEQGEKGDRGLPGPQGSPGQKGEMGIPGASGPIGPGGPPGLPGPAGPKGAKGATGPGGPKGEKGVQGPPGHPGPPGEVIQPLPIQMPKKTRRSVDGSRLMQEDEAIPTGGAPGSPGGLEEIFGSLDSLREEIEQMRRPTGTQDSPARTCQDLKLCHPELPDGEYWVDPNQGCARDAFRVFCNFTAGGETCVTPRDDVTQFSYVDSEGSPVGVVQLTFLRLLSVSAHQDVSYPCSGAARDGPLRLRGANEDELSPETSPYVKEFRDGCQTQQGRTVLEVRTPVLEQLPVLDASFSDLGAPPRRGGVLLGPVCFMG

SEQ ID NO: 17119 - protein, 1710 aa, Homo sapiens
MERCSRCHRLLLLLPLVLGLSAAPGWAGAPPVDVLRALRFPSLPDGVRRAKGICPADVAYRVARPAQLSAPTRQLFPGGFPKDFSLLTVVRTRPGLQAPLLTLYSAQGVRQLGLELGRPVRFLYEDQTGRPQPPSQPVFRGLSLADGKWHRVAVAVKGQSVTLIVDCKKRVTRPLPRSARPVLDTHGVIIFGARILDEEVFEGDVQELAIVPGVQAAYESCEQKELECEGGQRERPQNQQPHRAQRSPQQQPSRLHRPQNQEPQSQDPTPGEEEEILESSLLPPLEEEQTDLQVPPTADRFQAEEYGEGGTDPPEGPYDYTYGYGDDYREETELGPALSAETAHSGAAAHGPRGLKGEKGEPAVLEPGMLVEGPPGPEGPAGLIGPPGIQGNPGPVGDPGERGPPGRAGLPGSDGAPGPPGTSLMLPFRFGSGGGDKGPVVAAQEAQAQAILQQARLALRGPPGPMGYTGRPGPLGQPGSPGLKGESGDLGPQGPRGPQGLTGPPGKAGRRGRAGADGARGMPGDPGVKGDRGFDGLPGLPGEKGHRGDTGAQGLPGPPGEDGERGDDGEIGPRGLPGESGPRGLLGPKGPPGIPGPPGVRGMDGPQGPKGSLGPQGEPGPPGQQGTPGTQGLPGPQGAIGPHGEKGPQGKPGLPGMPGSDGPPGHPGKEGPPGTKGNQGPSGPQGPLGYPGPRGVKGVDGIRGLKGHKGEKGEDGFPGFKGDIGVKGDRGEVGVPGSRGEDGPEGPKGRTGPTGDPGPPGLMGEKGKLGVPGLPGYPGRQGPKGSLGFPGFPGASGEKGARGLSGKSGPRGERGPTGPRGQRGPRGATGKSGAKGTSGGDGPHGPPGERGLPGPQGPNGFPGPKGPLGPPGKDGLPGHPGQRGEVGFQGKTGPPGPPGVVGPQGAAGETGPMGERGHPGPPGPPGEQGLPGTAGKEGTKGDPGPPGAPGKDGPAGLRGFPGERGLPGTAGGPGLKGNEGPSGPPGPAGSPGERGAAGSGGPIGPPGRPGPQGPPGAAGEKGVPGEKGPIGPTGRDGVQGPVGLPGPAGPPGVAGEDGDKGEVGDPGQKGTKGNKGEHGPPGPPGPIGPVGQPGAAGADGEPGARGPQGHFGAKGDEGTRGFNGPPGPIGLQGLPGPSGEKGETGDVGPMGPPGPPGPRGPAGPNGADGPQGPPGGVGNLGPPGEKGEPGESGSPGIQGEPGVKGPRGERGEKGESGQPGEPGPPGPKGPTGDDGPKGNPGPVGFPGDPGPPGEGGPRGQDGAKGDRGEDGEPGQPGSPGPTGENGPPGPLGKRGPAGSPGSEGRQGGKGAKGDPGAIGAPGKTGPVGPAGPAGKPGPDGLRGLPGSVGQQGRPGATGQAGPPGPVGPPGLPGLRGDAGAKGEKGHPGLIGLIGPPGEQGEKGDRGLPGPQGSPGQKGEMGIPGASGPIGPGGPPGLPGPAGPKGAKGATGPGGPKGEKGVQGPPGHPGPPGEVIQPLPIQMPKKTRRSVDGSRLMQEDEAIPTGGAPGSPGGLEEIFGSLDSLREEIEQMRRPTGTQDSPARTCQDLKLCHPELPDGEYWVDPNQGCARDAFRVFCNFTAGGETCVTPRDDVTQFSYVDSEGSPVGVVQLTFLRLLSVSAHQDVSYPCSGAARDGPLRLRGANEDELSPETSPYVKEFRDGCQTQQGRTVLEVRTPVLEQLPVLDASFSDLGAPPRRGGVLLGPVCFMG

SEQ ID NO: 17120 - protein, 1715 aa, Homo sapiens
MERCSRCHRLLLLLPLVLGLSAAPGWAGAPPVDVLRALRFPSLPDGVRRAKGICPADVAYRVARPAQLSAPTRQLFPGGFPKDFSLLTVVRTRPGLQAPLLTLYSAQGVRQLGLELGRPVRFLYEDQTGRPQPPSQPVFRGLSLADGKWHRVAVAVKGQSVTLIVDCKKRVTRPLPRSARPVLDTHGVIIFGARILDEEVFEGDVQELAIVPGVQAAYESCEQKELECEGGQRERPQNQQPHRAQRSPQQQPSRLHRPQNQEPQSQPTESLYYDYEPPYYDVMTTGTTPDYQEQTDLQVPPTADRFQAEEYGEGGTDPPEGPYDYTYGYGDDYREETELGPALSAETAHSGAAAHGPRGLKGEKGEPAVLEPGMLVEGPPGPEGPAGLIGPPGIQGNPGPVGDPGERGPPGRAGLPGSDGAPGPPGTSLMLPFRFGSGGGDKGPVVAAQEAQAQAILQQARLALRGPPGPMGYTGRPGPLGQPGSPGLKGESGDLGPQGPRGPQGLTGPPGKAGRRGRAGADGARGMPGDPGVKGDRGFDGLPGLPGEKGHRGDTGAQGLPGPPGEDGERGDDGEIGPRGLPGESGPRGLLGPKGPPGIPGPPGVRGMDGPQGPKGSLGPQGEPGPPGQQGTPGTQGLPGPQGAIGPHGEKGPQGKPGLPGMPGSDGPPGHPGKEGPPGTKGNQGPSGPQGPLGYPGPRGVKGVDGIRGLKGHKGEKGEDGFPGFKGDIGVKGDRGEVGVPGSRGEDGPEGPKGRTGPTGDPGPPGLMGEKGKLGVPGLPGYPGRQGPKGSLGFPGFPGASGEKGARGLSGKSGPRGERGPTGPRGQRGPRGATGKSGAKGTSGGDGPHGPPGERGLPGPQGPNGFPGPKGPLGPPGKDGLPGHPGQRGEVGFQGKTGPPGPPGVVGPQGAAGETGPMGERGHPGPPGPPGEQGLPGTAGKEGTKGDPGPPGAPGKDGPAGLRGFPGERGLPGTAGGPGLKGNEGPSGPPGPAGSPGERGAAGSGGPIGPPGRPGPQGPPGAAGEKGVPGEKGPIGPTGRDGVQGPVGLPGPAGPPGVAGEDGDKGEVGDPGQKGTKGNKGEHGPPGPPGPIGPVGQPGAAGADGEPGARGPQGHFGAKGDEGTRGFNGPPGPIGLQGLPGPSGEKGETGDVGPMGPPGPPGPRGPAGPNGADGPQGPPGGVGNLGPPGEKGEPGESGSPGIQGEPGVKGPRGERGEKGESGQPGEPGPPGPKGPTGDDGPKGNPGPVGFPGDPGPPGEGGPRGQDGAKGDRGEDGEPGQPGSPGPTGENGPPGPLGKRGPAGSPGSEGRQGGKGAKGDPGAIGAPGKTGPVGPAGPAGKPGPDGLRGLPGSVGQQGRPGATGQAGPPGPVGPPGLPGLRGDAGAKGEKGHPGLIGLIGPPGEQGEKGDRGLPGPQGSPGQKGEMGIPGASGPIGPGGPPGLPGPAGPKGAKGATGPGGPKGEKGVQGPPGHPGPPGEVIQPLPIQMPKKTRRSVDGSRLMQEDEAIPTGGAPGSPGGLEEIFGSLDSLREEIEQMRRPTGTQDSPARTCQDLKLCHPELPDGEYWVDPNQGCARDAFRVFCNFTAGGETCVTPRDDVTQFSYVDSEGSPVGVVQLTFLRLLSVSAHQDVSYPCSGAARDGPLRLRGANEDELSPETSPYVKEFRDGCQTQQGRTVLEVRTPVLEQLPVLDASFSDLGAPPRRGGVLLGPVCFMG

SEQ ID NO: 17121 - protein, 1676 aa, Homo sapiens
MERCSRCHRLLLLLPLVLGLSAAPGWAGAPPVDVLRALRFPSLPDGVRRAKGICPADVAYRVARPAQLSAPTRQLFPGGFPKDFSLLTVVRTRPGLQAPLLTLYSAQGVRQLGLELGRPVRFLYEDQTGRPQPPSQPVFRGLSLADGKWHRVAVAVKGQSVTLIVDCKKRVTRPLPRSARPVLDTHGVIIFGARILDEEVFEGDVQELAIVPGVQAAYESCEQKELECEGGQRERPQNQQPHRAQRSPQQQPSRLHRPQNQEPQSQPTESLYYDYEPPYYDVMTTGTTPDYQDPTPGEEEEILESSLLPPLEEAAHGPRGLKGEKGEPAVLEPGMLVEGPPGPEGPAGLIGPPGIQGNPGPVGDPGERGPPGRAGLPGSDGAPGPPGTSLMLPFRFGSGGGDKGPVVAAQEAQAQAILQQARLALRGPPGPMGYTGRPGPLGQPGSPGLKGESGDLGPQGPRGPQGLTGPPGKAGRRGRAGADGARGMPGDPGVKGDRGFDGLPGLPGEKGHRGDTGAQGLPGPPGEDGERGDDGEIGPRGLPGESGPRGLLGPKGPPGIPGPPGVRGMDGPQGPKGSLGPQGEPGPPGQQGTPGTQGLPGPQGAIGPHGEKGPQGKPGLPGMPGSDGPPGHPGKEGPPGTKGNQGPSGPQGPLGYPGPRGVKGVDGIRGLKGHKGEKGEDGFPGFKGDIGVKGDRGEVGVPGSRGEDGPEGPKGRTGPTGDPGPPGLMGEKGKLGVPGLPGYPGRQGPKGSLGFPGFPGASGEKGARGLSGKSGPRGERGPTGPRGQRGPRGATGKSGAKGTSGGDGPHGPPGERGLPGPQGPNGFPGPKGPLGPPGKDGLPGHPGQRGEVGFQGKTGPPGPPGVVGPQGAAGETGPMGERGHPGPPGPPGEQGLPGTAGKEGTKGDPGPPGAPGKDGPAGLRGFPGERGLPGTAGGPGLKGNEGPSGPPGPAGSPGERGAAGSGGPIGPPGRPGPQGPPGAAGEKGVPGEKGPIGPTGRDGVQGPVGLPGPAGPPGVAGEDGDKGEVGDPGQKGTKGNKGEHGPPGPPGPIGPVGQPGAAGADGEPGARGPQGHFGAKGDEGTRGFNGPPGPIGLQGLPGPSGEKGETGDVGPMGPPGPPGPRGPAGPNGADGPQGPPGGVGNLGPPGEKGEPGESGSPGIQGEPGVKGPRGERGEKGESGQPGEPGPPGPKGPTGDDGPKGNPGPVGFPGDPGPPGEGGPRGQDGAKGDRGEDGEPGQPGSPGPTGENGPPGPLGKRGPAGSPGSEGRQGGKGAKGDPGAIGAPGKTGPVGPAGPAGKPGPDGLRGLPGSVGQQGRPGATGQAGPPGPVGPPGLPGLRGDAGAKGEKGHPGLIGLIGPPGEQGEKGDRGLPGPQGSPGQKGEMGIPGASGPIGPGGPPGLPGPAGPKGAKGATGPGGPKGEKGVQGPPGHPGPPGEVIQPLPIQMPKKTRRSVDGSRLMQEDEAIPTGGAPGSPGGLEEIFGSLDSLREEIEQMRRPTGTQDSPARTCQDLKLCHPELPDGEYWVDPNQGCARDAFRVFCNFTAGGETCVTPRDDVTQFSYVDSEGSPVGVVQLTFLRLLSVSAHQDVSYPCSGAARDGPLRLRGANEDELSPETSPYVKEFRDGCQTQQGRTVLEVRTPVLEQLPVLDASFSDLGAPPRRGGVLLGPVCFMG

SEQ ID NO: 17122 - protein, 1689 aa, Homo sapiens
MERCSRCHRLLLLLPLVLGLSAAPGWAGAPPVDVLRALRFPSLPDGVRRAKGICPADVAYRVARPAQLSAPTRQLFPGGFPKDFSLLTVVRTRPGLQAPLLTLYSAQGVRQLGLELGRPVRFLYEDQTGRPQPPSQPVFRGLSLADGKWHRVAVAVKGQSVTLIVDCKKRVTRPLPRSARPVLDTHGVIIFGARILDEEVFEGDVQELAIVPGVQAAYESCEQKELECEGGQRERPQNQQPHRAQRSPQQQPSRLHRPQNQEPQSQEQTDLQVPPTADRFQAEEYGEGGTDPPEGPYDYTYGYGDDYREETELGPALSAETAHSGAAAHGPRGLKGEKGEPAVLEPGMLVEGPPGPEGPAGLIGPPGIQGNPGPVGDPGERGPPGRAGLPGSDGAPGPPGTSLMLPFRFGSGGGDKGPVVAAQEAQAQAILQQARLALRGPPGPMGYTGRPGPLGQPGSPGLKGESGDLGPQGPRGPQGLTGPPGKAGRRGRAGADGARGMPGDPGVKGDRGFDGLPGLPGEKGHRGDTGAQGLPGPPGEDGERGDDGEIGPRGLPGESGPRGLLGPKGPPGIPGPPGVRGMDGPQGPKGSLGPQGEPGPPGQQGTPGTQGLPGPQGAIGPHGEKGPQGKPGLPGMPGSDGPPGHPGKEGPPGTKGNQGPSGPQGPLGYPGPRGVKGVDGIRGLKGHKGEKGEDGFPGFKGDIGVKGDRGEVGVPGSRGEDGPEGPKGRTGPTGDPGPPGLMGEKGKLGVPGLPGYPGRQGPKGSLGFPGFPGASGEKGARGLSGKSGPRGERGPTGPRGQRGPRGATGKSGAKGTSGGDGPHGPPGERGLPGPQGPNGFPGPKGPLGPPGKDGLPGHPGQRGEVGFQGKTGPPGPPGVVGPQGAAGETGPMGERGHPGPPGPPGEQGLPGTAGKEGTKGDPGPPGAPGKDGPAGLRGFPGERGLPGTAGGPGLKGNEGPSGPPGPAGSPGERGAAGSGGPIGPPGRPGPQGPPGAAGEKGVPGEKGPIGPTGRDGVQGPVGLPGPAGPPGVAGEDGDKGEVGDPGQKGTKGNKGEHGPPGPPGPIGPVGQPGAAGADGEPGARGPQGHFGAKGDEGTRGFNGPPGPIGLQGLPGPSGEKGETGDVGPMGPPGPPGPRGPAGPNGADGPQGPPGGVGNLGPPGEKGEPGESGSPGIQGEPGVKGPRGERGEKGESGQPGEPGPPGPKGPTGDDGPKGNPGPVGFPGDPGPPGEGGPRGQDGAKGDRGEDGEPGQPGSPGPTGENGPPGPLGKRGPAGSPGSEGRQGGKGAKGDPGAIGAPGKTGPVGPAGPAGKPGPDGLRGLPGSVGQQGRPGATGQAGPPGPVGPPGLPGLRGDAGAKGEKGHPGLIGLIGPPGEQGEKGDRGLPGPQGSPGQKGEMGIPGASGPIGPGGPPGLPGPAGPKGAKGATGPGGPKGEKGVQGPPGHPGPPGEVIQPLPIQMPKKTRRSVDGSRLMQEDEAIPTGGAPGSPGGLEEIFGSLDSLREEIEQMRRPTGTQDSPARTCQDLKLCHPELPDGEYWVDPNQGCARDAFRVFCNFTAGGETCVTPRDDVTQFSYVDSEGSPVGVVQLTFLRLLSVSAHQDVSYPCSGAARDGPLRLRGANEDELSPETSPYVKEFRDGCQTQQGRTVLEVRTPVLEQLPVLDASFSDLGAPPRRGGVLLGPVCFMG

SEQ ID NO: 17123 - protein, 1650 aa, Homo sapiens
MERCSRCHRLLLLLPLVLGLSAAPGWAGAPPVDVLRALRFPSLPDGVRRAKGICPADVAYRVARPAQLSAPTRQLFPGGFPKDFSLLTVVRTRPGLQAPLLTLYSAQGVRQLGLELGRPVRFLYEDQTGRPQPPSQPVFRGLSLADGKWHRVAVAVKGQSVTLIVDCKKRVTRPLPRSARPVLDTHGVIIFGARILDEEVFEGDVQELAIVPGVQAAYESCEQKELECEGGQRERPQNQQPHRAQRSPQQQPSRLHRPQNQEPQSQDPTPGEEEEILESSLLPPLEEAAHGPRGLKGEKGEPAVLEPGMLVEGPPGPEGPAGLIGPPGIQGNPGPVGDPGERGPPGRAGLPGSDGAPGPPGTSLMLPFRFGSGGGDKGPVVAAQEAQAQAILQQARLALRGPPGPMGYTGRPGPLGQPGSPGLKGESGDLGPQGPRGPQGLTGPPGKAGRRGRAGADGARGMPGDPGVKGDRGFDGLPGLPGEKGHRGDTGAQGLPGPPGEDGERGDDGEIGPRGLPGESGPRGLLGPKGPPGIPGPPGVRGMDGPQGPKGSLGPQGEPGPPGQQGTPGTQGLPGPQGAIGPHGEKGPQGKPGLPGMPGSDGPPGHPGKEGPPGTKGNQGPSGPQGPLGYPGPRGVKGVDGIRGLKGHKGEKGEDGFPGFKGDIGVKGDRGEVGVPGSRGEDGPEGPKGRTGPTGDPGPPGLMGEKGKLGVPGLPGYPGRQGPKGSLGFPGFPGASGEKGARGLSGKSGPRGERGPTGPRGQRGPRGATGKSGAKGTSGGDGPHGPPGERGLPGPQGPNGFPGPKGPLGPPGKDGLPGHPGQRGEVGFQGKTGPPGPPGVVGPQGAAGETGPMGERGHPGPPGPPGEQGLPGTAGKEGTKGDPGPPGAPGKDGPAGLRGFPGERGLPGTAGGPGLKGNEGPSGPPGPAGSPGERGAAGSGGPIGPPGRPGPQGPPGAAGEKGVPGEKGPIGPTGRDGVQGPVGLPGPAGPPGVAGEDGDKGEVGDPGQKGTKGNKGEHGPPGPPGPIGPVGQPGAAGADGEPGARGPQGHFGAKGDEGTRGFNGPPGPIGLQGLPGPSGEKGETGDVGPMGPPGPPGPRGPAGPNGADGPQGPPGGVGNLGPPGEKGEPGESGSPGIQGEPGVKGPRGERGEKGESGQPGEPGPPGPKGPTGDDGPKGNPGPVGFPGDPGPPGEGGPRGQDGAKGDRGEDGEPGQPGSPGPTGENGPPGPLGKRGPAGSPGSEGRQGGKGAKGDPGAIGAPGKTGPVGPAGPAGKPGPDGLRGLPGSVGQQGRPGATGQAGPPGPVGPPGLPGLRGDAGAKGEKGHPGLIGLIGPPGEQGEKGDRGLPGPQGSPGQKGEMGIPGASGPIGPGGPPGLPGPAGPKGAKGATGPGGPKGEKGVQGPPGHPGPPGEVIQPLPIQMPKKTRRSVDGSRLMQEDEAIPTGGAPGSPGGLEEIFGSLDSLREEIEQMRRPTGTQDSPARTCQDLKLCHPELPDGEYWVDPNQGCARDAFRVFCNFTAGGETCVTPRDDVTQFSYVDSEGSPVGVVQLTFLRLLSVSAHQDVSYPCSGAARDGPLRLRGANEDELSPETSPYVKEFRDGCQTQQGRTVLEVRTPVLEQLPVLDASFSDLGAPPRRGGVLLGPVCFMG

SEQ ID NO: 17124 - protein, 1655 aa, Homo sapiens
MERCSRCHRLLLLLPLVLGLSAAPGWAGAPPVDVLRALRFPSLPDGVRRAKGICPADVAYRVARPAQLSAPTRQLFPGGFPKDFSLLTVVRTRPGLQAPLLTLYSAQGVRQLGLELGRPVRFLYEDQTGRPQPPSQPVFRGLSLADGKWHRVAVAVKGQSVTLIVDCKKRVTRPLPRSARPVLDTHGVIIFGARILDEEVFEGDVQELAIVPGVQAAYESCEQKELECEGGQRERPQNQQPHRAQRSPQQQPSRLHRPQNQEPQSQPTESLYYDYEPPYYDVMTTGTTPDYQAAHGPRGLKGEKGEPAVLEPGMLVEGPPGPEGPAGLIGPPGIQGNPGPVGDPGERGPPGRAGLPGSDGAPGPPGTSLMLPFRFGSGGGDKGPVVAAQEAQAQAILQQARLALRGPPGPMGYTGRPGPLGQPGSPGLKGESGDLGPQGPRGPQGLTGPPGKAGRRGRAGADGARGMPGDPGVKGDRGFDGLPGLPGEKGHRGDTGAQGLPGPPGEDGERGDDGEIGPRGLPGESGPRGLLGPKGPPGIPGPPGVRGMDGPQGPKGSLGPQGEPGPPGQQGTPGTQGLPGPQGAIGPHGEKGPQGKPGLPGMPGSDGPPGHPGKEGPPGTKGNQGPSGPQGPLGYPGPRGVKGVDGIRGLKGHKGEKGEDGFPGFKGDIGVKGDRGEVGVPGSRGEDGPEGPKGRTGPTGDPGPPGLMGEKGKLGVPGLPGYPGRQGPKGSLGFPGFPGASGEKGARGLSGKSGPRGERGPTGPRGQRGPRGATGKSGAKGTSGGDGPHGPPGERGLPGPQGPNGFPGPKGPLGPPGKDGLPGHPGQRGEVGFQGKTGPPGPPGVVGPQGAAGETGPMGERGHPGPPGPPGEQGLPGTAGKEGTKGDPGPPGAPGKDGPAGLRGFPGERGLPGTAGGPGLKGNEGPSGPPGPAGSPGERGAAGSGGPIGPPGRPGPQGPPGAAGEKGVPGEKGPIGPTGRDGVQGPVGLPGPAGPPGVAGEDGDKGEVGDPGQKGTKGNKGEHGPPGPPGPIGPVGQPGAAGADGEPGARGPQGHFGAKGDEGTRGFNGPPGPIGLQGLPGPSGEKGETGDVGPMGPPGPPGPRGPAGPNGADGPQGPPGGVGNLGPPGEKGEPGESGSPGIQGEPGVKGPRGERGEKGESGQPGEPGPPGPKGPTGDDGPKGNPGPVGFPGDPGPPGEGGPRGQDGAKGDRGEDGEPGQPGSPGPTGENGPPGPLGKRGPAGSPGSEGRQGGKGAKGDPGAIGAPGKTGPVGPAGPAGKPGPDGLRGLPGSVGQQGRPGATGQAGPPGPVGPPGLPGLRGDAGAKGEKGHPGLIGLIGPPGEQGEKGDRGLPGPQGSPGQKGEMGIPGASGPIGPGGPPGLPGPAGPKGAKGATGPGGPKGEKGVQGPPGHPGPPGEVIQPLPIQMPKKTRRSVDGSRLMQEDEAIPTGGAPGSPGGLEEIFGSLDSLREEIEQMRRPTGTQDSPARTCQDLKLCHPELPDGEYWVDPNQGCARDAFRVFCNFTAGGETCVTPRDDVTQFSYVDSEGSPVGVVQLTFLRLLSVSAHQDVSYPCSGAARDGPLRLRGANEDELSPETSPYVKEFRDGCQTQQGRTVLEVRTPVLEQLPVLDASFSDLGAPPRRGGVLLGPVCFMG

SEQ ID NO: 17125 - protein, 1629 aa, Homo sapiens
MERCSRCHRLLLLLPLVLGLSAAPGWAGAPPVDVLRALRFPSLPDGVRRAKGICPADVAYRVARPAQLSAPTRQLFPGGFPKDFSLLTVVRTRPGLQAPLLTLYSAQGVRQLGLELGRPVRFLYEDQTGRPQPPSQPVFRGLSLADGKWHRVAVAVKGQSVTLIVDCKKRVTRPLPRSARPVLDTHGVIIFGARILDEEVFEGDVQELAIVPGVQAAYESCEQKELECEGGQRERPQNQQPHRAQRSPQQQPSRLHRPQNQEPQSQAAHGPRGLKGEKGEPAVLEPGMLVEGPPGPEGPAGLIGPPGIQGNPGPVGDPGERGPPGRAGLPGSDGAPGPPGTSLMLPFRFGSGGGDKGPVVAAQEAQAQAILQQARLALRGPPGPMGYTGRPGPLGQPGSPGLKGESGDLGPQGPRGPQGLTGPPGKAGRRGRAGADGARGMPGDPGVKGDRGFDGLPGLPGEKGHRGDTGAQGLPGPPGEDGERGDDGEIGPRGLPGESGPRGLLGPKGPPGIPGPPGVRGMDGPQGPKGSLGPQGEPGPPGQQGTPGTQGLPGPQGAIGPHGEKGPQGKPGLPGMPGSDGPPGHPGKEGPPGTKGNQGPSGPQGPLGYPGPRGVKGVDGIRGLKGHKGEKGEDGFPGFKGDIGVKGDRGEVGVPGSRGEDGPEGPKGRTGPTGDPGPPGLMGEKGKLGVPGLPGYPGRQGPKGSLGFPGFPGASGEKGARGLSGKSGPRGERGPTGPRGQRGPRGATGKSGAKGTSGGDGPHGPPGERGLPGPQGPNGFPGPKGPLGPPGKDGLPGHPGQRGEVGFQGKTGPPGPPGVVGPQGAAGETGPMGERGHPGPPGPPGEQGLPGTAGKEGTKGDPGPPGAPGKDGPAGLRGFPGERGLPGTAGGPGLKGNEGPSGPPGPAGSPGERGAAGSGGPIGPPGRPGPQGPPGAAGEKGVPGEKGPIGPTGRDGVQGPVGLPGPAGPPGVAGEDGDKGEVGDPGQKGTKGNKGEHGPPGPPGPIGPVGQPGAAGADGEPGARGPQGHFGAKGDEGTRGFNGPPGPIGLQGLPGPSGEKGETGDVGPMGPPGPPGPRGPAGPNGADGPQGPPGGVGNLGPPGEKGEPGESGSPGIQGEPGVKGPRGERGEKGESGQPGEPGPPGPKGPTGDDGPKGNPGPVGFPGDPGPPGEGGPRGQDGAKGDRGEDGEPGQPGSPGPTGENGPPGPLGKRGPAGSPGSEGRQGGKGAKGDPGAIGAPGKTGPVGPAGPAGKPGPDGLRGLPGSVGQQGRPGATGQAGPPGPVGPPGLPGLRGDAGAKGEKGHPGLIGLIGPPGEQGEKGDRGLPGPQGSPGQKGEMGIPGASGPIGPGGPPGLPGPAGPKGAKGATGPGGPKGEKGVQGPPGHPGPPGEVIQPLPIQMPKKTRRSVDGSRLMQEDEAIPTGGAPGSPGGLEEIFGSLDSLREEIEQMRRPTGTQDSPARTCQDLKLCHPELPDGEYWVDPNQGCARDAFRVFCNFTAGGETCVTPRDDVTQFSYVDSEGSPVGVVQLTFLRLLSVSAHQDVSYPCSGAARDGPLRLRGANEDELSPETSPYVKEFRDGCQTQQGRTVLEVRTPVLEQLPVLDASFSDLGAPPRRGGVLLGPVCFMG

SEQ ID NO: 17126 - protein, 290 aa, Homo sapiens
MERCSRCHRLLLLLPLVLGLSAAPGWAGAPPVDVLRALRFPSLPDGVRRAKGICPADVAYRVARPAQLSAPTRQLFPGGFPKDFSLLTVVRTRPGLQAPLLTLYSAQGVRQLGLELGRPVRFLYEDQTGRPQPPSQPVFRGLSLADGKWHRVAVAVKGQSVTLIVDCKKRVTRPLPRSARPVLDTHGVIIFGARILDEEVFEGDVQELAIVPGVQAAYESCEQKELECEGGQRERPQNQQPHRAQRSPQQQPSRLHRPQNQEPQSQVRELGEPPSAAHPREGRHPGISPP

SEQ ID NO: 17127 - protein, 81 aa, Homo sapiens
MDSYSAKIRANLVCRRSTDPSIRVTFSSRSLGSLPAFAMFRSSRPSFIKICFPFSSSIVLASGYSVRASMRSSFERQNRSE

SEQ ID NO: 17128 - protein, 300 aa, Homo sapiens
MILLEVNNRIIEETLALKFENAAAGNKPEAVEVTFADFDGVLYHISNPNGDKTKVMVSISLKFYKELQAHGADELLKRVYGSFLVNPESGYNVSLLYDLENLPASKDSIVHQAGMLKRNCFASVFEKYFQFQEEGKEGENRAVIHYRDDETMYVESKKDRVTVVFSTVFKDDDDVVIGKVFMQEFKEGRRASHTAPQVLFSHREPPLELKDTDAAVGDNIGYITFVLFPRHTNASARDNTINLIHTFRDYLHYHIKCSKAYIHTRMRAKTSDFLKVLNRARPDAEKKEMKTITGKTFSSR

SEQ ID NO: 17129 - protein, 160 aa, Homo sapiens
MAFLMKSMISNQVKNLGFGGGSEENKEEGGASDPAAAQGMTREEYEEYQKQMIEEKMERDAAFTQKKAERACLRVHLREKYRLPKSEMDENQIQMAGDDVDLPEDLRKMVDEDQEEEEDKDSILGQIQNLQNMDLDTIKEKAQATFTEIKQTAEQKCSVM

SEQ ID NO: 17130 - protein, 1035 aa, Homo sapiens
MGKAENYELYSVELGPGPGGDMAAKMSKKKKAGGGGGKRKEKLENMKKEMEINDHQLSVAELEQKYQTSATKGLSASLAAELLLRDGPNALRPPRGTPEYVKFARQLAGGLQCLMWVAAAICLIAFAIQASEGDLTTDDNLYLAIALIAVVVVTGCFGYYQEFKSTNIIASFKNLVPQQATVIRDGDKFQINADQLVVGDLVEMKGGDRVPADIRILAAQGCKVDNSSLTGESEPQTRSPECTHESPLETRNIAFFSTMCLEGTVQGLVVNTGDRTIIGRIASLASGVENEKTPIAIEIEHFVDIIAGLAILFGATFFIVAMCIGYTFLRAMVFFMAIVVAYVPEGLLATVTVCLSLTAKRLASKNCVVKNLEAVETLGSTSVICSDKTGTLTQNRMTVSHLWFDNHIHTADTTEDQSGQTFDQSSETWRALCRVLTLCNRAAFKSGQDAVPVPKRIVIGDASETALLKFSELTLGNAMGYRDRFPKVCEIPFNSTNKFQLSIHTLEDPRDPRHLLVMKGAPERVLERCSSILIKGQELPLDEQWREAFQTAYLSLGGLGERVLGFCQLYLNEKDYPPGYAFDVEAMNFPSSGLCFAGLVSMIDPPRATVPDAVLKCRTAGIRVIMVTGDHPITAKAIAASVGIISEGSETVEDIAARLRVPVDQVNRKDARACVINGMQLKDMDPSELVEALRTHPEMVFARTSPQQKLVIVESCQRLGAIVAVTGDGVNDSPALKKADIGVAMGIAGSDAAKNAADMILLDDNFASIVTGVEQGRLIFDNLKKSIAYTLTKNIPELTPYLIYITVSVPLPLGCITILFIELCTDIFPSVSLAYEKAESDIMHLRPRNPKRDRLVNEPLAAYSYFQIGAIQSFAGFTDYFTAMAQEGWFPLLCVGLRAQWEDHHLQDLQDSYGQEWTFGQRLYQQYTCYTVFFISIEVCQIADVLIRKTRRLSAFQQGFFRNKILVIAIVFQVCIGCFLCYCPGMPNIFNFMPIRFQWWLVPLPYGILIFVYDEIRKLGVRCCPGSWWDQELYY

SEQ ID NO: 17131 - protein, 51 aa, Homo sapiens
MVAYWRQAGLSYIRYSQICAKAVRDALKTEFKANAEKTSGSNVKIVKVKKE

SEQ ID NO: 17132 - protein, 1187 aa, Homo sapiens
MRPRGAAFAAGPPGDLHLGTAIGFAGAIWRSRSPAMSTLLDIKSSVLRQVQVCPSFRRRTEQDPGSASADPQEPATGAWKPGDGVEFFAHMRLMLKKGEGRQGLPCLEVPLRSGSPAPPEPVDPSLGLRALAPEEVEMLYEEALYTVLYRAGTMGPDQVDDEEALLSYLQQVFGTSLEEHTEAIERVRKAKAPTYALKVSVMRAKNLLAKDPNGFSDPYCMLGILPASDATREPRAQKEQRFGFRKGSKRGGPLPAKCIQVTEVKSSTLNPVWKEHFLFEIEDVSTDQLHLDIWDHDDDVSLVEACRKLNEVIGLKGMGRYFKQIVKSARANGTAGPTEDHTDDFLGCLNIPVREVPVAGVDRWFKLEPRSSASRVQGHCHLVLKLITTQRDTAMSQRGRSGFLSHLLLLSHLLRLEHSAEEPNSSSWRGELSTPAATILCLHGAQSNLSPLQLAVLHWQVSSRHHQTCTLDYSYLLGLLEDMQAHWEEAPSLPQEQEESLADSLSAFSEFGLQLLRQLRDYFPATNSTAVHRLELLLKCLGKLQLFQPSFEICPFESELNMDIAAALKRGNREWYDRILNDKSPREQPGPQRLPGLVVLADAVYDDLQFCYSVYASLFHSILNVDVFTLTFRQLERLVAEEAWVLTEELSPKMTLEVASGLFELYLTLADLQRFWDSIPGRDSRSLALAGIHAPFLPAVKLWFQVLRDQAKWRLQGAVDMDTLEPVDASSRHSSSAATAGLCLSHIQELWVRLAWPDPAQAQGLGTQLGQDVCEATLFYTELLRKKVDTQPGAAGEAVSEALCVVLNNVELVRKAAGQALKGLAWPEGATGPEGVLPRPLLSCTQALDDDLQREAHTVTAHLTSKMVGDIRKYVQHISLSPDSIQNDEAVAPLMKYLDEKLALLNASLVKGNLSRVLEALWELLLQAILQALGANRDVSADFYSRFHFTLEALVSFFHAEGQGLPLESLRDGSYKRLKEELRLHKCSTRECIEQFYLDKLKQRTLEQNRFGRLSVRCHYEAAEQRLAVEVLHAADLLPLDANGLSDPFVIVELGPPHLFPLVRSQRTQVKTRTLHPVYDELFYFSVPAEACRRRAACVLFTVMDHDWLSTNDFAGEAALGLGGVTGVARPQVGGGARAGQPVTLHLCRPRAQVRSALRRLEGRTSKEAQEFVKKLKELEKCMEADP

SEQ ID NO: 17133 - protein, 1169 aa, Homo sapiens
MSTLLDIKSSVLRQVQVCPSFRRRTEQDPGSASADPQEPATGAWKPGDGVEFFAHMRLMLKKGEGRQGLPCLEAWGSPCRQSPHPGPHTQVPLRSGSPAPPEPVDPSLGLRALAPEEVEMLYEEALYTVLYRAGTMGPDQVDDEEALLSYLQQVFGTSLEEHTEAIERVRKAKAPTYALKVSVMRAKNLLAKDPNGFSDPYCMLGILPASDATREPRAQKEQRFGFRKGSKRGGPLPAKCIQVTEVKSSTLNPVWKEHFLFEIEDVSTDQLHLDIWDHDDDVSLVEACRKLNEVIGLKGMGRYFKQIVKSARANGTAGPTEDHTDDFLGCLNIPVREVPVAGVDRWFKLEPRSSASRVQGHCHLVLKLITTQRDTAMSQRGRSGFLSHLLLLSHLLRLEHSAEEPNSSSWRGELSTPAATILCLHGAQSNLSPLQLAVLHWQVSSRHHQTCTLDYSYLLGLLEDMQAHWEEAPSLPQEQEESLADSLSAFSEFGLQLLRQLRDYFPATNSTAVHRLELLLKCLGKLQLFQPSFEICPFESELNMDIAAALKRGNREWYDRILNDKSPREQPGPQRLPGLVVLADAVYDDLQFCYSVYASLFHSILNVDVFTLTFRQLERLVAEEAWVLTEELSPKMTLEVASGLFELYLTLADLQRFWDSIPGRDSRSLALAGIHAPFLPAVKLWFQVLRDQAKWRLQGAVDMDTLEPVDASSRHSSSAATAGLCLSHIQELWVRLAWPDPAQAQGLGTQLGQDVCEATLFYTELLRKKVDTQPGAAGEAVSEALCVVLNNVELVRKAAGQALKGLAWPEGATGPEGVLPRPLLSCTQALDDDLQREAHTVTAHLTSKMVGDIRKYVQHISLSPDSIQNDEAVAPLMKYLDEKLALLNASLVKGNLSRVLEALWELLLQAILQALGANRDVSADFYSRFHFTLEALVSFFHAEGQGLPLESLRDGSYKRLKEELRLHKCSTRECIEQFYLDKLKQRTLEQNRFGRLSVRCHYEAAEQRLAVEVLHAADLLPLDANGLSDPFVIVELGPPHLFPLVRSQRTQVKTRTLHPVYDELFYFSVPAEACRRRAACVLFTVMDHDWLSTNDFAGEAALGLGGVTGVARPQVGGGARAGQPVTLHLCRPRAQVRSALRRLEGRTSKEAQEFVKKLKELEKCMEADP

SEQ ID NO: 17134 - protein, 1129 aa, Homo sapiens
MSTLLDIKSSVLRQVQVCPSFRRRTEQDPGSASADPQEPATGAWKPGDGVEFFAHMRLMLKKGEGRQGLPCLEVPLRSGSPAPPEPVDPSLGLRALAPEEVDDEEALLSYLQQVFGTSLEEHTEAIERVRKAKAPTYALKVSVMRAKNLLAKDPNGFSDPYCMLGILPASDATREPRAQKEQRFGFRKGSKRGGPLPAKCIQVTEVKSSTLNPVWKEHFLFEIEDVSTDQLHLDIWDHDDDVSLVEACRKLNEVIGLKGMGRYFKQIVKSARANGTAGPTEDHTDDFLGCLNIPVREVPVAGVDRWFKLEPRSSASRVQGHCHLVLKLITTQRDTAMSQRGRSGFLSHLLLLSHLLRLEHSAEEPNSSSWRGELSTPAATILCLHGAQSNLSPLQLAVLHWQVSSRHHQTCTLDYSYLLGLLEDMQAHWEEAPSLPQEQEESLADSLSAFSEFGLQLLRQLRDYFPATNSTAVHRLELLLKCLGKLQLFQPSFEICPFESELNMDIAAALKRGNREWYDRILNDKSPREQPGPQRLPGLVVLADAVYDDLQFCYSVYASLFHSILNVDVFTLTFRQLERLVAEEAWVLTEELSPKMTLEVASGLFELYLTLADLQRFWDSIPGRDSRSLALAGIHAPFLPAVKLWFQVLRDQAKWRLQGAVDMDTLEPVDASSRHSSSAATAGLCLSHIQELWVRLAWPDPAQAQGLGTQLGQDVCEATLFYTELLRKKVDTQPGAAGEAVSEALCVVLNNVELVRKAAGQALKGLAWPEGATGPEGVLPRPLLSCTQALDDDLQREAHTVTAHLTSKMVGDIRKYVQHISLSPDSIQNDEAVAPLMKYLDEKLALLNASLVKGNLSRVLEALWELLLQAILQALGANRDVSADFYSRFHFTLEALVSFFHAEGQGLPLESLRDGSYKRLKEELRLHKCSTRECIEQFYLDKLKQRTLEQNRFGRLSVRCHYEAAEQRLAVEVLHAADLLPLDANGLSDPFVIVELGPPHLFPLVRSQRTQVKTRTLHPVYDELFYFSVPAEACRRRAACVLFTVMDHDWLSTNDFAGEAALGLGGVTGVARPQVGGGARAGQPVTLHLCRPRAQVRSALRRLEGRTSKEAQEFVKKLKELEKCMEADP

SEQ ID NO: 17135 - protein, 1124 aa, Homo sapiens
MSTLLDIKSSVLRQVQVCPSFRRRTEQDPGSASADPQEPATGAWKPGDGVEFFAHMRLMLKKGEGRQGLPCLEVPLRSGSPAPPEPVDPSLGLRALAPEEALLSYLQQVFGTSLEEHTEAIERVRKAKAPTYALKVSVMRAKNLLAKDPNGFSDPYCMLGILPASDATREPRAQKEQRFGFRKGSKRGGPLPAKCIQVTEVKSSTLNPVWKEHFLFEIEDVSTDQLHLDIWDHDDDVSLVEACRKLNEVIGLKGMGRYFKQIVKSARANGTAGPTEDHTDDFLGCLNIPVREVPVAGVDRWFKLEPRSSASRVQGHCHLVLKLITTQRDTAMSQRGRSGFLSHLLLLSHLLRLEHSAEEPNSSSWRGELSTPAATILCLHGAQSNLSPLQLAVLHWQVSSRHHQTCTLDYSYLLGLLEDMQAHWEEAPSLPQEQEESLADSLSAFSEFGLQLLRQLRDYFPATNSTAVHRLELLLKCLGKLQLFQPSFEICPFESELNMDIAAALKRGNREWYDRILNDKSPREQPGPQRLPGLVVLADAVYDDLQFCYSVYASLFHSILNVDVFTLTFRQLERLVAEEAWVLTEELSPKMTLEVASGLFELYLTLADLQRFWDSIPGRDSRSLALAGIHAPFLPAVKLWFQVLRDQAKWRLQGAVDMDTLEPVDASSRHSSSAATAGLCLSHIQELWVRLAWPDPAQAQGLGTQLGQDVCEATLFYTELLRKKVDTQPGAAGEAVSEALCVVLNNVELVRKAAGQALKGLAWPEGATGPEGVLPRPLLSCTQALDDDLQREAHTVTAHLTSKMVGDIRKYVQHISLSPDSIQNDEAVAPLMKYLDEKLALLNASLVKGNLSRVLEALWELLLQAILQALGANRDVSADFYSRFHFTLEALVSFFHAEGQGLPLESLRDGSYKRLKEELRLHKCSTRECIEQFYLDKLKQRTLEQNRFGRLSVRCHYEAAEQRLAVEVLHAADLLPLDANGLSDPFVIVELGPPHLFPLVRSQRTQVKTRTLHPVYDELFYFSVPAEACRRRAACVLFTVMDHDWLSTNDFAGEAALGLGGVTGVARPQVGGGARAGQPVTLHLCRPRAQVRSALRRLEGRTSKEAQEFVKKLKELEKCMEADP

SEQ ID NO: 17136 - protein, 1152 aa, Homo sapiens
MSTLLDIKSSVLRQVQVCPSFRRRTEQDPGSASADPQEPATGAWKPGDGVEFFAHMRLMLKKGEGRQGLPCLEVPLRSGSPAPPEPVDPSLGLRALAPEEVEMLYEEALYTVLYRAGTMGPDQVDDEEALLSYLQQVFGTSLEEHTEAIERVRKAKAPTYALKVSVMRAKNLLAKDPNGFSDPYCMLGILPASDATREPRAQKEQRFGFRKGSKRGGPLPAKCIQVTEVKSSTLNPVWKEHFLFEIEDVSTDQLHLDIWDHDDDVSLVEACRKLNEVIGLKGMGRYFKQIVKSARANGTAGPTEDHTDDFLGCLNIPVREVPVAGVDRWFKLEPRSSASRVQGHCHLVLKLITTQRDTAMSQRGRSGFLSHLLLLSHLLRLEHSAEEPNSSSWRGELSTPAATILCLHGAQSNLSPLQLAVLHWQVSSRHHQTCTLDYSYLLGLLEDMQAHWEEAPSLPQEQEESLADSLSAFSEFGLQLLRQLRDYFPATNSTAVHRLELLLKCLGKLQLFQPSFEICPFESELNMDIAAALKRGNREWYDRILNDKSPREQPGPQRLPGLVVLADAVYDDLQFCYSVYASLFHSILNVDVFTLTFRQLERLVAEEAWVLTEELSPKMTLEVASGLFELYLTLADLQRFWDSIPGRDSRSLALAGIHAPFLPAVKLWFQVLRDQAKWRLQGAVDMDTLEPVDASSRHSSSAATAGLCLSHIQELWVRLAWPDPAQAQGLGTQLGQDVCEATLFYTELLRKKVDTQPGAAGEAVSEALCVVLNNVELVRKAAGQALKGLAWPEGATGPEGVLPRPLLSCTQALDDDLQREAHTVTAHLTSKMVGDIRKYVQHISLSPDSIQNDEAVAPLMKYLDEKLALLNASLVKGNLSRVLEALWELLLQAILQALGANRDVSADFYSRFHFTLEALVSFFHAEGQGLPLESLRDGSYKRLKEELRLHKCSTRECIEQFYLDKLKQRTLEQNRFGRLSVRCHYEAAEQRLAVEVLHAADLLPLDANGLSDPFVIVELGPPHLFPLVRSQRTQVKTRTLHPVYDELFYFSVPAEACRRRAACVLFTVMDHDWLSTNDFAGEAALGLGGVTGVARPQVGGGARAGQPVTLHLCRPRAQVRSALRRLEGRTSKEAQEFVKKLKELEKCMEADP

SEQ ID NO: 17137 - protein, 1116 aa, Homo sapiens
MSTLLDIKSSVLRQVQVCPSFRRRTEQDPGSASADPQEPATGAWKPGDGVEFFAHMRLMLKKGEGRQGLPCLEVPLRSGSPAPPEPVDPSLGLRALAPEEVEMLYEEALYTVLYRAGTMGPDQVDDEEALLSYLQQVFGTSLEEHTEAIERVRKAKAPTYALKVSVMRAKNLLAKDPNGFSDPYCMLGILPASDATREPRAQKEQRFGFRKGSKRGGPLPAKCIQVTEVKSSTLNPVWKEHFLFEIEDVSTDQLHLDIWDHDDDVSLVEACRKLNEVIGLKGMGRYFKQIVKSARANGTAGPTEDHTDDFLGCLNIPVRRDTAMSQRGRSGFLSHLLLLSHLLRLEHSAEEPNSSSWRGELSTPAATILCLHGAQSNLSPLQLAVLHWQVSSRHHQTCTLDYSYLLGLLEDMQAHWEEAPSLPQEQEESLADSLSAFSEFGLQLLRQLRDYFPATNSTAVHRLELLLKCLGKLQLFQPSFEICPFESELNMDIAAALKRGNREWYDRILNDKSPREQPGPQRLPGLVVLADAVYDDLQFCYSVYASLFHSILNVDVFTLTFRQLERLVAEEAWVLTEELSPKMTLEVASGLFELYLTLADLQRFWDSIPGRDSRSLALAGIHAPFLPAVKLWFQVLRDQAKWRLQGAVDMDTLEPVDASSRHSSSAATAGLCLSHIQELWVRLAWPDPAQAQGLGTQLGQDVCEATLFYTELLRKKVDTQPGAAGEAVSEALCVVLNNVELVRKAAGQALKGLAWPEGATGPEGVLPRPLLSCTQALDDDLQREAHTVTAHLTSKMVGDIRKYVQHISLSPDSIQNDEAVAPLMKYLDEKLALLNASLVKGNLSRVLEALWELLLQAILQALGANRDVSADFYSRFHFTLEALVSFFHAEGQGLPLESLRDGSYKRLKEELRLHKCSTRECIEQFYLDKLKQRTLEQNRFGRLSVRCHYEAAEQRLAVEVLHAADLLPLDANGLSDPFVIVELGPPHLFPLVRSQRTQVKTRTLHPVYDELFYFSVPAEACRRRAACVLFTVMDHDWLSTNDFAGEAALGLGGVTGVARPQVGGGARAGQPVTLHLCRPRAQVRSALRRLEGRTSKEAQEFVKKLKELEKCMEADP

SEQ ID NO: 17138 - protein, 2624 aa, Homo sapiens
MFRRARLSVKPNVRPGVGARGSTASNPQRGRESPRPPDPATDSASKPAEPTDVPTVDFGGAEPQEKAPRSSTEKTGGDNDVEESSRSSSTVSQRRKRISSTSSLVKSSVSVPSESHPLSTINQEAPQPTATSTKEKQPCSDRYRIYKAQKLREMLKEELRKEKKQWKNKYAINESQRPPDRSKMTMRDFIYYLPDNNPMTSSLEQEKKTEKPSTPVQTREQEGKSTPNAEDNEMEEETDDGPLLVPRVKVAEDGSIILDEESLTVEVLRTKGPCVVEENDPIFERGSTTTYSSFRKNYYSKPWSNKETDMFFLAISMVGTDFSMIGQLFPHRARIEIKNKFKREEKTNGWRIDKAFQEKRPFDFDFFAHLLQKVLAEEEKRKQKSVKNHSLKEKKSTKPRKNVKVKKVACEGVNNDPDESMSSRISDTERSQKDAQTVEEESLTLSREDAEQVALEVDLNQKKRRRKKQDGANELGVNNLLENATVQAGPSKGEKHKNKCQAIRPELKEGECSKEQMLSCTQNIDGIVGFASTEKVEKRTDPILSLSNQQDATSVATESSESSTSDLPSFEVGIRALCEVNNAEGSCIEERNVDLKNNSLEIDQTENVKPMLRGRFQRPKPNLSRAGKKSVLSQGKTESESKNSHSKTSVEKNHVEKDKMNTLDILRMETTERENPEAETVSVLGEKNCLQEGSQLKALRPVQVRGRLQKPKPNAGKAAERKEILISQEEIGANVEKNENESCADRDTPQHMEDQSRKDFEEEDVILQPEKNDSFQNVQPDEPKVLNECLSVQENNKANKLNQVPILRTRFQKPKPNIGRGTGRREISSKEEVLEKILVSGEMAAALRETVRLDTSPKEMVPAEINTKEMQSDLKETGRRAISPREKILDVIDDTIEMETGLKAMGREICLREKTPEVIDATEEIDKDLEEAGRREISPQKNGPEEVKPLGEVETDLKATGNESSPREKTPEVTDATEEIDKNLEETGRRKISPRENGPEEVKPVDEMETDLNATGRESSPREKTPEVIDATEEIDLEETEREVSPQENGLEEVKPLGEMETDLKATGRDSFPRGKTPEVIDAIEEIEIDLEETEREISPQENGLEEVKPLGEMQTDLKATGREISPREKTPEVIDATEEIDKDLEETGRREISPEENGPEEVKPVDEMETDLKTTGREGSSREKTREVIDAAEVIETDLEETEREISPQENGPEEVKPVGKMETDLKEIREEISQREKVLAEFSAIREKEIDLKETGKRDIPIMEKVSGKMAVVEEMEADLKETGKENFRERGSEEICVTEEKVAELKQTGKTDISPRENELEETSTSRQTDTHLMQSGSNDFSAVPSLDIQNISSEVLSMMHTPVEEKRNSEKEVSSHFSHFKISSQTHESDKTEVQGIQSPDVPEQFSDINLSKSLPQEQKPLEIKPAPFVRSRFKRPKPNLARAALKRETTESEKYIYEKKSETKKMETIVMQENNEQTDTLPSQHDEASLMISREKDTLGHRNEEAVILPCTQTERNLSPSNSCEPKEESQSAPVQKNDSVVSVGTNNVNTFQQEMKESVIQTARQVRGRLQRPRPNIRKTGQRQIVDKGEAKGIIKEGRTILPKDETEKKVLTVSNSQIETEIEVPSSAVPEHRMYENQSQVVLVENLHVNKTNETIRHENKPYVPSSAQMTRRKFQKAKPNLGRAHSKKEEPVLEKVTTDQSKEGKPEDHLLQKGASNTQLLLKEKAELLTSLEVSARKDCVGSKESALAKIDAELEEVGPSRRVGEETVGDNSPSSVVEEQYLNKLTSCPQPLNETSYSKIALDGKTTISSTSEYERNRGERRSHKKFKPNVTRGRGSKRVRGKTSKKEPRASKAMLVTLRASQEEDDDADDFESDYEEESYHLAPEEVNKAPVFVPVGLRSPEPVSAQIEETMEELEITVNVPDVGCIAVVEHELPNTDVTTEEMKQEENLSVPFEMTTSEHIQDEPGTNDGSTEAAITLLTMGDLVLQSEISSEQGDVGVCIIPHVHSKDKSHIPSSLDNVNHKIVHECQELSSPVITTSPASFEENKIVLEEQSSREEISLMEKVKENATPTRNTISKVTSNLRIRSRLAKPKPNLEKTLGTNRLDDYQEVSSLCVTKGAEMETQRETEKNASKATELENKNLGPVTTAENKDQSKLACVHGIKGTSISSEVNLTERNENQEESSQEVHMLSVAPVASSETGPCTLGLDRGLGENSVEEPQIKDSKGDSVLTLPVPEYTPTSIPEVQQENIINPQDLTVNLVANVPQDGEDEQAFILTLVEIPANAVEEFTDATAQFMPNPLLPAPILVKSVNTEERGDMSICLPATSVGQDAMGLSISGRDNSKKPPDNLDLVSRKRFQCRLDKNDHIPPAKKRSLTLRDDCQEYTTEVHSKELTNVFEETGESHKGQDIFLTSGSTLTTPEPQRQQVEAAFQSRGSRSPDACMDKNVPQLPQDEMIVSDKEERTDAAPKSQQMDSRTSSSKASLSRPGRRPLGFLSLICSKNSLESDEPMQVHSKKRLKPLIPGLRKKLKRSNPFNESQEKNRESSDLLPSPSVITTQSENISSSATQVSCDQPLLKEGYKSAQKRAPQGEATTVSEYFFNDIFIEVDETE

SEQ ID NO: 17139 - protein, 2254 aa, Homo sapiens
MFRRARLSVKPNVRPGVGARGSTASNPQRGRESPRPPDPATDSASKPAEPTDVPTVDFGGAEPQEKAPRSSTEKTGGDNDVEESSRSSSTVSQRRKRISSTSSLVKSSVSVPSESHPLSTINQEAPQPTATSTKEKQPCSDRYRIYKAQKLREMLKEELRKEKKQWKNKYAINESQRPPDRSKMTMRDFIYYLPDNNPMTSSLEQEKKTEKPSTPVQTREQEGKSTPNAEDNEMEEETDDGPLLVPRVKVAEDGSIILDEESLTVEVLRTKGPCVVEENDPIFERGSTTTYSSFRKNYYSKPWSNKETDMFFLAISMVGTDFSMIGQLFPHRARIEIKNKFKREEKTNGWRIDKAFQEKRPFDFDFFAHLLQKVLAEEEKRKQKSVKNHSLKEKKSTKPRKNVKVKKVACEGVNNDPDESMSSRISDTERSQKDAQTVEEESLTLSREDAEQVALEVDLNQKKRRRKKQDGANELGVNNLLENATVQAGPSKGEKHKNKCQAIRPELKEGECSKEQMLSCTQNIDGIVGFASTEKVEKRTDPILSLSNQQDATSVATESSESSTSDLPSFEVGIRALCEVNNAEGSCIEERNVDLKNNSLEIDQTENVKPMLRGRFQRPKPNLSRAGKKSVLSQGKTESESKNSHSKTSVEKNHVEKDKMNTLDILRMETTERENPEAETVSVLGEKNCLQEGSQLKALRPVQVRGRLQKPKPNAGKAAERKEILISQEEIGANVEKNENESCADRDTPQHMEDQSRKDFEEEDVILQPEKNDSFQNVQPDEPKVLNECLSVQENNKANKLNQVPILRTRFQKPKPNIGRGTGRREISSKEEVLEKILVSGEMAAALRETVRLDTSPKEMVPAEINTKEMQSDLKETGRRAISPREKILDVIDDTIEMETGLKAMGREICLREKTPEVIDATEEIDKDLEEAGRREISPQKNGPEEVKPLGEVETDLKATGNESSPREKTPEVTDATEEIDKNLEETGRRKISPRENGPEEVKPVDEMETDLNATGRESSPREKTPEVIDATEEIDLEETEREVSPQENGLEEVKPLGEMETDLKATGRDSFPRGKTPEVIDAIEEIEIDLEETEREISPQENGLEEVKPLGEMQTDLKATGREISPREKTPEVIDATEEIDKDLEETGRREISPEENGPEEVKPVDEMETDLKTTGREGSSREKTREVIDAAEVIETDLEETEREISPQENGPEEVKPVGKMETDLKEIREEISQREKVLAEFSAIREKEIDLKETGKRDIPIMEKVSGKMAVVEEMEADLKETGKENFRERGSEEICVTEEKVAELKQTGKTDISPRENELEETSTSRQTDTHLMQSGSNDFSAVPSLDIQNISSEVLSMMHTPVEEKRNSEKEVSSHFSHFKISSQTHESDKTEVQGIQSPDVPEQFSDINLSKSLPQEQKPLEIKPAPFVRSRFKRPKPNLARAALKRETTESEKYIYEKKSETKKMETIVMQENNEQTDTLPSQHDEASLMISREKDTLGHRNEEAVILPCTQTERNLSPSNSCEPKEESQSAPVQKNDSVVSVGTNNVNTFQQEMKESVIQTARQVRGRLQRPRPNIRKTGQRQIVDKGEAKGIIKEGRTILPKDETEKKVLTVSNSQIETEIEVPSSAVPEHRMYENQSQVVLVENLHVNKTNETIRHENKPYVPSSAQMTRRKFQKAKPNLGRAHSKKEEPVLEKVTTDQSKEGKPEDHLLQKGASNTQLLLKEKAELLTSLEVSARKDCVGSKESALAKIDAELEEVGPSRRVGEETVGDNSPSSVVEEQYLNKLTSCPQPLNETSYSKIALDGKTTISSTSEYERNRGERRSHKKFKPNVTRGRGSKRVRGKTSKKEPRASKAMLVTLRASQEEDDDADDFESDYEEESYHLAPEEVNKAPVFVPVGLRSPEPVSAQIEETMEELEITVNVPDVGCIAVVEHELPNTDVTTEEMKQEENLSVPFEMTTSEHIQDEPGTNDGSTEAAITLLTMGDLVLQSEISSEQGDVGVCIIPHVHSKDKSHIPSSLDNVNHKIVHECQELSSPVITTSPASFEENKIVLEEQSSREEISLMEKVKENATPTRNTISKVTSNLRIRSRLAKPKPNLEKTLGTNRLDDYQEVSSLCVTKGAEMETQRETEKNASKATELENKNLGPVTTAENKDQSKLACVHGIKGTSISSEVNLTERNENQEESSQEVHMLSVAPVASSETGPCTLGLDRGLGENSVEEPQIKDSKGDSVLTLPVPEVKECTV

SEQ ID NO: 17140 - protein, 1388 aa, Homo sapiens
MFRRARLSVKPNVRPGVGARGSTASNPQRGRESPRPPDPATDSASKPAEPTDVPTVDFGGAEPQEKAPRSSTEKTGGDNDVEESSRSSSTVSQRRKRISSTSSLVKSSVSVPSESHPLSTINQEAPQPTATSTKEKQPCSDRYRIYKAQKLREMLKEELRKEKKQWKNKYAINESQRPPDRSKMTMRDFIYYLPDNNPMTSSLEQEKKTEKPSTPVQTREQEGKSTPNAEDNEMEEETDDGPLLVPRVKVAEDGSIILDEESLTVEVLRTKGPCVVEENDPIFERGSTTTYSSFRKNYYSKPWSNKETDMFFLAISMVGTDFSMIGQLFPHRARIEIKNKFKREEKTNGWRIDKAFQEKRPFDFDFFAHLLQKVLAEEEKRKQKSVKNHSLKEKKSTKPRKNVKVKKVACEGVNNDPDESMSSRISDTERSQKDAQTVEEESLTLSREDAEQVALEVDLNQKKRRRKKQDGANELGVNNLLENATVQAGPSKGEKHKNKCQAIRPELKEGECSKEQMLSCTQNIDGIVGFASTEKVEKRTDPILSLSNQQDATSVATESSESSTSDLPSFEVGIRALCEVNNAEGSCIEERNVDLKNNSLEIDQTENVKPMLRGRFQRPKPNLSRAGKKSVLSQGKTESESKNSHSKTSVEKNHVEKDKMNTLDILRMETTERENPEAETVSVLGEKNCLQEGSQLKALRPVQVRGRLQKPKPNAGKAAERKEILISQEEIGANVEKNENESCADRDTPQHMEDQSRKDFEEEDVILQPEKNDSFQNVQPDEPKVLNECLSVQENNKANKLNQVPILRTRFQKPKPNIGRGTGRREISSKEEVLEKILVSGEMAAALRETVRLDTSPKEMVPAEINTKEMQSDLKETGRRAISPREKILDVIDDTIEMETGLKAMGREICLREKTPEVIDATEEIDKDLEEAGRREISPQKNGPEEVKPLGEVETDLKATGNESSPREKTPEVTDATEEIDKNLEETGRRKISPRENGPEEVKPVDEMETDLNATGRESSPREKTPEVIDATEEIDLEETEREVSPQENGLEEVKPLGEMETDLKATGRDSFPRGKTPEVIDAIEEIEIDLEETEREISPQENGLEEVKPLGEMQTDLKATGREISPREKTPEVIDATEEIDKDLEETGRREISPEENGPEEVKPVDEMETDLKTTGREGSSREKTREVIDAAEVIETDLEETEREISPQENGPEEVKPVGKMETDLKEIREEISQREKVLAEFSAIREKEIDLKETGKRDIPIMEKVSGKMAVVEEMEADLKETGKENFRERGSEEICVTEEKVAELKQTGKTDISPRENELEETSTSRQTDTHLMQSGSNDFSAVPSLDIQVCIFLSFKSFLNAFSEEINNSMIILSLSPTTLKNL

SEQ ID NO: 17141 - protein, 1372 aa, Homo sapiens
MFRRARLSVKPNVRPGVGARGSTASNPQRGRESPRPPDPATDSASKPAEPTDVPTVDFGGAEPQEKAPRSSTEKTGGDNDVEESSRSSSTVSQRRKRISSTSSLVKSSVSVPSESHPLSTINQEAPQPTATSTKEKQPCSDRYRIYKAQKLREMLKEELRKEKKQWKNKYAINESQRPPDRSKMTMRDFIYYLPDNNPMTSSLEQEKKTEKPSTPVQTREQEGKSTPNAEDNEMEEETDDGPLLVPRVKVAEDGSIILDEESLTVEVLRTKGPCVVEENDPIFERGSTTTYSSFRKNYYSKPWSNKETDMFFLAISMVGTDFSMIGQLFPHRARIEIKNKFKREEKTNGWRIDKAFQEKRPFDFDFFAHLLQKVLAEEEKRKQKSVKNHSLKEKKSTKPRKNVKVKKVACEGVNNDPDESMSSRISDTERSQKDAQTVEEESLTLSREDAEQVALEVDLNQKKRRRKKQDGANELGVNNLLENATVQAGPSKGEKHKNKCQAIRPELKEGECSKEQMLSCTQNIDGIVGFASTEKVEKRTDPILSLSNQQDATSVATESSESSTSDLPSFEVGIRALCEVNNAEGSCIEERNVDLKNNSLEIDQTENVKPMLRGRFQRPKPNLSRAGKKSVLSQGKTESESKNSHSKTSVEKNHVEKDKMNTLDILRMETTERENPEAETVSVLGEKNCLQEGSQLKALRPVQVRGRLQKPKPNAGKAAERKEILISQEEIGANVEKNENESCADRDTPQHMEDQSRKDFEEEDVILQPEKNDSFQNVQPDEPKVLNECLSVQENNKANKLNQVPILRTRFQKPKPNIGRGTGRREISSKEEVLEKILVSGEMAAALRETVRLDTSPKEMVPAEINTKEMQSDLKETGRRAISPREKILDVIDDTIEMETGLKAMGREICLREKTPEVIDATEEIDKDLEEAGRREISPQKNGPEEVKPLGEVETDLKATGNESSPREKTPEVTDATEEIDKNLEETGRRKISPRENGPEEVKPVDEMETDLNATGRESSPREKTPEVIDATEEIDLEETEREVSPQENGLEEVKPLGEMETDLKATGRDSFPRGKTPEVIDAIEEIEIDLEETEREISPQENGLEEVKPLGEMQTDLKATGREISPREKTPEVIDATEEIDKDLEETGRREISPEENGPEEVKPVDEMETDLKTTGREGSSREKTREVIDAAEVIETDLEETEREISPQENGPEEVKPVGKMETDLKEIREEISQREKVLAEFSAIREKEIDLKETGKRDIPIMEKVSGKMAVVEEMEADLKETGKENFRERGSEEICVTEEKVAELKQTGKTDISPRENELEETSTSRQTDTHLMQSGSNDFSAVPSLDIQVCIFLSFKSFLNAFFRGNK

SEQ ID NO: 17142 - protein, 778 aa, Homo sapiens
MLRGRFQRPKPNLSRAGKKSVLSQGKTESESKNSHSKTSVEKNHVEKDKMNTLDILRMETTERENPEAETVSVLGEKNCLQEGSQLKALRPVQVRGRLQKPKPNAGKAAERKEILISQEEIGANVEKNENESCADRDTPQHMEDQSRKDFEEEDVILQPEKNDSFQNVQPDEPKVLNECLSVQENNKANKLNQVPILRTRFQKPKPNIGRGTGRREISSKEEVLEKILVSGEMAAALRETVRLDTSPKEMVPAEINTKEMQSDLKETGRRAISPREKILDVIDDTIEMETGLKAMGREICLREKTPEVIDATEEIDKDLEEAGRREISPQKNGPEEVKPLGEVETDLKATGNESSPREKTPEVTDATEEIDKNLEETGRRKISPRENGPEEVKPVDEMETDLNATGRESSPREKTPEVIDATEEIDLEETEREVSPQENGLEEVKPLGEMETDLKATGRDSFPRGKTPEVIDAIEEIEIDLEETEREISPQENGLEEVKPLGEMQTDLKATGREISPREKTPEVIDATEEIDKDLEETGRREISPEENGPEEVKPVDEMETDLKTTGREGSSREKTREVIDAAEVIETDLEETEREISPQENGPEEVKPVGKMETDLKEIREEISQREKVLAEFSAIREKEIDLKETGKRDIPIMEKVSGKMAVVEEMEADLKETGKENFRERGSEEICVTEEKVAELKQTGKTDISPRENELEETSTSRQTDTHLMQSGSNDFSAVPSLDIQVCIFLSFKSFLNAFSEEINNSMIILSLSPTTFKNL

SEQ ID NO: 17143 - protein, 2604 aa, Homo sapiens
MFRRARLSVKPNVRPGVGARGSTASKPAEPTDVPTVDFGGAEPQEKAPRSSTEKTGGDNDVEESSRSSSTVSQRRKRISSTSSLVKSSVSVPSESHPLSTINQEAPQPTATSTKEKQPCSDRYRIYKAQKLREMLKEELRKEKKQWKNKYAINESQRPPDRSKMTMRDFIYYLPDNNPMTSSLEQEKKTEKPSTPVQTREQEGKSTPNAEDNEMEEETDDGPLLVPRVKVAEDGSIILDEESLTVEVLRTKGPCVVEENDPIFERGSTTTYSSFRKNYYSKPWSNKETDMFFLAISMVGTDFSMIGQLFPHRARIEIKNKFKREEKTNGWRIDKAFQEKRPFDFDFFAHLLQKVLAEEEKRKQKSVKNHSLKEKKSTKPRKNVKVKKVACEGVNNDPDESMSSRISDTERSQKDAQTVEEESLTLSREDAEQVALEVDLNQKKRRRKKQDGANELGVNNLLENATVQAGPSKGEKHKNKCQAIRPELKEGECSKEQMLSCTQNIDGIVGFASTEKVEKRTDPILSLSNQQDATSVATESSESSTSDLPSFEVGIRALCEVNNAEGSCIEERNVDLKNNSLEIDQTENVKPMLRGRFQRPKPNLSRAGKKSVLSQGKTESESKNSHSKTSVEKNHVEKDKMNTLDILRMETTERENPEAETVSVLGEKNCLQEGSQLKALRPVQVRGRLQKPKPNAGKAAERKEILISQEEIGANVEKNENESCADRDTPQHMEDQSRKDFEEEDVILQPEKNDSFQNVQPDEPKVLNECLSVQENNKANKLNQVPILRTRFQKPKPNIGRGTGRREISSKEEVLEKILVSGEMAAALRETVRLDTSPKEMVPAEINTKEMQSDLKETGRRAISPREKILDVIDDTIEMETGLKAMGREICLREKTPEVIDATEEIDKDLEEAGRREISPQKNGPEEVKPLGEVETDLKATGNESSPREKTPEVTDATEEIDKNLEETGRRKISPRENGPEEVKPVDEMETDLNATGRESSPREKTPEVIDATEEIDLEETEREVSPQENGLEEVKPLGEMETDLKATGRDSFPRGKTPEVIDAIEEIEIDLEETEREISPQENGLEEVKPLGEMQTDLKATGREISPREKTPEVIDATEEIDKDLEETGRREISPEENGPEEVKPVDEMETDLKTTGREGSSREKTREVIDAAEVIETDLEETEREISPQENGPEEVKPVGKMETDLKEIREEISQREKVLAEFSAIREKEIDLKETGKRDIPIMEKVSGKMAVVEEMEADLKETGKENFRERGSEEICVTEEKVAELKQTGKTDISPRENELEETSTSRQTDTHLMQSGSNDFSAVPSLDIQNISSEVLSMMHTPVEEKRNSEKEVSSHFSHFKISSQTHESDKTEVQGIQSPDVPEQFSDINLSKSLPQEQKPLEIKPAPFVRSRFKRPKPNLARAALKRETTESEKYIYEKKSETKKMETIVMQENNEQTDTLPSQHDEASLMISREKDTLGHRNEEAVILPCTQTERNLSPSNSCEPKEESQSAPVQKNDSVVSVGTNNVNTFQQEMKESVIQTARQVRGRLQRPRPNIRKTGQRQIVDKGEAKGIIKEGRTILPKDETEKKVLTVSNSQIETEIEVPSSAVPEHRMYENQSQVVLVENLHVNKTNETIRHENKPYVPSSAQMTRRKFQKAKPNLGRAHSKKEEPVLEKVTTDQSKEGKPEDHLLQKGASNTQLLLKEKAELLTSLEVSARKDCVGSKESALAKIDAELEEVGPSRRVGEETVGDNSPSSVVEEQYLNKLTSCPQPLNETSYSKIALDGKTTISSTSEYERNRGERRSHKKFKPNVTRGRGSKRVRGKTSKKEPRASKAMLVTLRASQEEDDDADDFESDYEEESYHLAPEEVNKAPVFVPVGLRSPEPVSAQIEETMEELEITVNVPDVGCIAVVEHELPNTDVTTEEMKQEENLSVPFEMTTSEHIQDEPGTNDGSTEAAITLLTMGDLVLQSEISSEQGDVGVCIIPHVHSKDKSHIPSSLDNVNHKIVHECQELSSPVITTSPASFEENKIVLEEQSSREEISLMEKVKENATPTRNTISKVTSNLRIRSRLAKPKPNLEKTLGTNRLDDYQEVSSLCVTKGAEMETQRETEKNASKATELENKNLGPVTTAENKDQSKLACVHGIKGTSISSEVNLTERNENQEESSQEVHMLSVAPVASSETGPCTLGLDRGLGENSVEEPQIKDSKGDSVLTLPVPEYTPTSIPEVQQENIINPQDLTVNLVANVPQDGEDEQAFILTLVEIPANAVEEFTDATAQFMPNPLLPAPILVKSVNTEERGDMSICLPATSVGQDAMGLSISGRDNSKKPPDNLDLVSRKRFQCRLDKNDHIPPAKKRSLTLRDDCQEYTTEVHSKELTNVFEETGESHKGQDIFLTSGSTLTTPEPQRQQVEAAFQSRGSRSPDACMDKNVPQLPQDEMIVSDKEERTDAAPKSQQMDSRTSSSKASLSRPGRRPLGFLSLICSKNSLESDEPMQVHSKKRLKPLIPGLRKKLKRSNPFNESQEKNRESSDLLPSPSVITTQSENISSSATQVSCDQPLLKEGYKSAQKRAPQGEATTVSEYFFNDIFIEVDETE

SEQ ID NO: 17144 - protein, 2552 aa, Homo sapiens
MFRRARLSVKPNVRPGVGARGSTASNPQRGRESPRPPDPATDSASKPAEPTDVPTVDFGGAEPQEKAPRSSTEKTGGDNDVEESSRSSSTVSQRRKRISSTSSLVKSSVSVPSESHPLSTINQEAPQPTATSTKEKQPCSDRYRIYKAQKLREMLKEELRKEKKQWKNKYAINESQRPPDRSKMTMRDFIYYLPDNNPMTSSLEQEKKTEKPSTPVQTREQEGKSTPNAEDNEMEEETDDGPLLVPRVKVAEDGSIILDEESLTVEVLRTKGPCVVEENDPIFERGSTTTYSSFRKNYYSKPWSNKETDMFFLAISMVGTDFSMIGQLFPHRARIEIKNKFKREEKTNGWRIDKAFQEKRPFDFDFFAHLLQKVLAEEEKRKQKSVKNHSLKEKKSTKPRKNVKVKKVACEGVNNDPDESMSSRISDTERSQKDAQTVEEESLTLSREDAEQVALEVDLNQKKRRRKKQDGANELGVNNLLENATVQAGPSKGEKHKNKCQAIRPELKEGECSKEQMLSCTQNIDGIVGFASTEKVEKRTDPILSLSNQQDATSVATESSESSTSDLPSFEVGIRALCEVNNAEGSCIEERNVDLKNNSLEIDQTENVKPMLRGRFQRPKPNLSRAGKKSVLSQGKTESESKNSHSKTSVEKNHVEKDKMNTLDILRMETTERENPEAETVSVLGEKNCLQEGSQLKALRPVQVRGRLQKPKPNAGKAAERKEILISQEEIGANVEKNENESCADRDTPQHMEDQSRKDFEEEDVILQPEKNDSFQNVQPDEPKVLNECLSVQENNKANKLNQVPILRTRFQKPKPNIGRGTGRREISSKEEVLEKILVSGEMAAALRETVRLDTSPKEMVPAEINTKEMQSDLKETGRRAISPREKILDVIDDTIEMETGLKAMGREICLREKTPEVIDATEEIDKDLEEAGRREISPQKNGPEEVKPLGEVETDLKATGNESSPREKTPEVTDATEEIDKNLEETGRRKISPRENGPEEVKPVDEMETDLNATGRESSPREKTPEVIDATEEIDLEETEREVSPQENGLEEVKPLGEMETDLKATGRDSFPRGKTPEVIDAIEEIEIDLEETEREISPQENGLEEVKPLGEMQTDLKATGREISPREKTPEVIDATEEIDKDLEETGRREISPEENGPEEVKPVDEMETDLKTTGREGSSREKTREVIDAAEVIETDLEETEREISPQENGPEEVKPVGKMETDLKEIREEISQREKVLAEFSAIREKEIDLKETGKRDIPIMEKVSGKMAVVEEMEADLKETGKENFRERGSEEICVTEEKVAELKQTGKTDISPRENELEETSTSRQTDTHLMQSGSNDFSAVPSLDIQNISSEVLSMMHTPVEEKRNSEKEVSSHFSHFKISSQTHESDKTEVQGIQSPDVPEQFSDINLSKSLPQEQKPLEIKPAPFVRSRFKRPKPNLARAALKRETTESEKYIYEKKSETKKMETIVMQENNEQTDTLPSQHDEASLMISREKDTLGHRNEEAVILPCTQTERNLSPSNSCEPKEESQSAPVQKNDSVVSVGTNNVNTFQQEMKESVIQTARQVRGRLQRPRPNIRKTGQRQIVDKGEAKGIIKEGRTILPKDETEKKVLTVSNSQIETEIEVPSSAVPEHRMYENQSQVVLVENLHVNKTNETIRHENKPYVPSSAQMTRRKFQKAKPNLGRAHSKKEEPVLEKVTTDQSKEGKPEDHLLQKGASNTQLLLKEKAELLTSLEVSARKDCVGSKESALAKIDAELEEVGPSRRVGEETVGDNSPSSVVEEQYLNKLTSCPQPLNETSYSKIALDGKTTISSTSEYERNRGERRSHKKFKPNVTRGRGSKRVRGKTSKKEPRASKAMLVTLRASQEEDDDADDFESDYEEESYHLAPEEVNKAPVFVPVGLRSPEPVSAQIEETMEELEITVNVPDVGCIAVVEHELPNTDVTTEEMKQEENLSVPFEMTTSEHIQDEPGVCIIPHVHSKDKSHIPSSLDNVNHKIVHECQELSSPVITTSPASFEENKIVLEEQSSREEISLMEKVKENATPTRNTISKVTSNLRIRSRLAKPKPNLEKTLGTNRLDDYQEVSSLCVTKGAEMETQRETEKNASKATELENKNLGPVTTAENKDQSKLACVHGIKGTSISSEVNLTERNENQEESSQEVHMLSVAPVASSETGPCTLGLDRGLGENSVEEPQIKDSKGDSVLTLPVPEYTPTSIPEVQQENIINPQDLTVNLVANVPQDGEDEQAFILTLVEIPANAVEEFTDATAQFMPNPLLPAPILVKSVNTEERGDMSICLPATSVGQDAMGLSISGRDNSKKPPDNLDLVSRKRFQCRLDKNDHIPPAKKRSLTLRDDCQEYTTEVHSKELTNVFEETGESHKGQDIFLTSGSTLTTPEPQRQQVEAAFQSRGSRSPDACMDKNVPQLPQDEMIVSDKEERTDAAPKSQQMDSRTSSSKASLSRPGRRPLGFLSLICSKNSLESDEPMQVHSKKRLKPLIPGLRKKLKRSNPFNESQEKNRESSDLLPSPSVITTQSENISSSATQRPF

SEQ ID NO: 17145 - protein, 463 aa, Homo sapiens
MLVTLRASQEEDDDADDFESDYEEESYHLAPEEVNKAPVFVPVGLRSPEPVSAQIEETMEELEITVNVPDVGCIAVVEHELPNTDVTTEEMKQEENLSVPFEMTTSEHIQDEPGTNDGSTEAAITLLTMGDLVLQSEISSEQGDGVCIIPHVHSKDKSHIPSSLDNVNHKIVHECQELSSPVITTSPASFEENKIVLEEQSSREEISLMEKVKENATPTRNTISKVTSNLRIRSRLAKPKPNLEKTLGTNRLDDYQEVSSLCVTKGAEMETQRETEKNASKATELENKNLGPVTTAENKDQSKLACVHGIKGTSISSEVNLTERNENQEESSQEVHMLSVAPVASSETGPCTLGLDRGLGENSVEEPQIKDSKGDSVLTLPVPEYTPTSIPEVQQENIINPQDLTVFVYQQLQLVKMPWVYLFLEEIILKSRLIIWILYLGRDFNAGLIKMTTFLLPKNVHSL

SEQ ID NO: 17146 - protein, 501 aa, Homo sapiens
MAQALPWLLLWMGAGVLPAHGTQHGIRLPLRSGLGGAPLGLRLPRETDEEPEEPGRRGSFVEMVDNLRGKSGQGYYVEMTVGSPPQTLNILVDTGSSNFAVGAAPHPFLHRYYQRQLSSTYRDLRKGVYVPYTQGKWEGELGTDLVSIPHGPNVTVRANIAAITESDKFFINGSNWEGILGLAYAEIARPDDSLEPFFDSLVKQTHVPNLFSLQLCGAGFPLNQSEVLASVGGSMIIGGIDHSLYTGSLWYTPIRREWYYEVIIVRVEINGQDLKMDCKEYNYDKSIVDSGTTNLRLPKKVFEAAVKSIKAASSTEKFPDGFWLGEQLVCWQAGTTPWNIFPVISLYLMGEVTNQSFRITILPQQYLRPVEDVATSQDDCYKFAISQSSTGTVMGAVIMEGFYVVFDRARKRIGFAVSACHVHDEFRTAAVEGPFVTLDMEDCGYNIPQTDESTLMTIAYVMAAICALFMLPLCLMVCQWRCLRCLRQQHDDFADDISLLK

SEQ ID NO: 17147 - protein, 476 aa, Homo sapiens
MAQALPWLLLWMGAGVLPAHGTQHGIRLPLRSGLGGAPLGLRLPRETDEEPEEPGRRGSFVEMVDNLRGKSGQGYYVEMTVGSPPQTLNILVDTGSSNFAVGAAPHPFLHRYYQRQLSSTYRDLRKGVYVPYTQGKWEGELGTDLVSIPHGPNVTVRANIAAITESDKFFINGSNWEGILGLAYAEIARLCGAGFPLNQSEVLASVGGSMIIGGIDHSLYTGSLWYTPIRREWYYEVIIVRVEINGQDLKMDCKEYNYDKSIVDSGTTNLRLPKKVFEAAVKSIKAASSTEKFPDGFWLGEQLVCWQAGTTPWNIFPVISLYLMGEVTNQSFRITILPQQYLRPVEDVATSQDDCYKFAISQSSTGTVMGAVIMEGFYVVFDRARKRIGFAVSACHVHDEFRTAAVEGPFVTLDMEDCGYNIPQTDESTLMTIAYVMAAICALFMLPLCLMVCQWRCLRCLRQQHDDFADDISLLK

SEQ ID NO: 17148 - protein, 457 aa, Homo sapiens
MAQALPWLLLWMGAGVLPAHGTQHGIRLPLRSGLGGAPLGLRLPRETDEEPEEPGRRGSFVEMVDNLRGKSGQGYYVEMTVGSPPQTLNILVDTGSSNFAVGAAPHPFLHRYYQRQLSSTYRDLRKGVYVPYTQGKWEGELGTDLPDDSLEPFFDSLVKQTHVPNLFSLQLCGAGFPLNQSEVLASVGGSMIIGGIDHSLYTGSLWYTPIRREWYYEVIIVRVEINGQDLKMDCKEYNYDKSIVDSGTTNLRLPKKVFEAAVKSIKAASSTEKFPDGFWLGEQLVCWQAGTTPWNIFPVISLYLMGEVTNQSFRITILPQQYLRPVEDVATSQDDCYKFAISQSSTGTVMGAVIMEGFYVVFDRARKRIGFAVSACHVHDEFRTAAVEGPFVTLDMEDCGYNIPQTDESTLMTIAYVMAAICALFMLPLCLMVCQWRCLRCLRQQHDDFADDISLLK

SEQ ID NO: 17149 - protein, 432 aa, Homo sapiens
MAQALPWLLLWMGAGVLPAHGTQHGIRLPLRSGLGGAPLGLRLPRETDEEPEEPGRRGSFVEMVDNLRGKSGQGYYVEMTVGSPPQTLNILVDTGSSNFAVGAAPHPFLHRYYQRQLSSTYRDLRKGVYVPYTQGKWEGELGTDLLCGAGFPLNQSEVLASVGGSMIIGGIDHSLYTGSLWYTPIRREWYYEVIIVRVEINGQDLKMDCKEYNYDKSIVDSGTTNLRLPKKVFEAAVKSIKAASSTEKFPDGFWLGEQLVCWQAGTTPWNIFPVISLYLMGEVTNQSFRITILPQQYLRPVEDVATSQDDCYKFAISQSSTGTVMGAVIMEGFYVVFDRARKRIGFAVSACHVHDEFRTAAVEGPFVTLDMEDCGYNIPQTDESTLMTIAYVMAAICALFMLPLCLMVCQWRCLRCLRQQHDDFADDISLLK

SEQ ID NO: 17150 - protein, 401 aa, Homo sapiens
MVPFIYLQAHFTLCSGWSSTYRDLRKGVYVPYTQGKWEGELGTDLVSIPHGPNVTVRANIAAITESDKFFINGSNWEGILGLAYAEIARPDDSLEPFFDSLVKQTHVPNLFSLQLCGAGFPLNQSEVLASVGGSMIIGGIDHSLYTGSLWYTPIRREWYYEVIIVRVEINGQDLKMDCKEYNYDKSIVDSGTTNLRLPKKVFEAAVKSIKAASSTEKFPDGFWLGEQLVCWQAGTTPWNIFPVISLYLMGEVTNQSFRITILPQQYLRPVEDVATSQDDCYKFAISQSSTGTVMGAVIMEGFYVVFDRARKRIGFAVSACHVHDEFRTAAVEGPFVTLDMEDCGYNIPQTDESTLMTIAYVMAAICALFMLPLCLMVCQWRCLRCLRQQHDDFADDISLLK

SEQ ID NO: 17151 - protein, 376 aa, Homo sapiens
MVPFIYLQAHFTLCSGWSSTYRDLRKGVYVPYTQGKWEGELGTDLVSIPHGPNVTVRANIAAITESDKFFINGSNWEGILGLAYAEIARLCGAGFPLNQSEVLASVGGSMIIGGIDHSLYTGSLWYTPIRREWYYEVIIVRVEINGQDLKMDCKEYNYDKSIVDSGTTNLRLPKKVFEAAVKSIKAASSTEKFPDGFWLGEQLVCWQAGTTPWNIFPVISLYLMGEVTNQSFRITILPQQYLRPVEDVATSQDDCYKFAISQSSTGTVMGAVIMEGFYVVFDRARKRIGFAVSACHVHDEFRTAAVEGPFVTLDMEDCGYNIPQTDESTLMTIAYVMAAICALFMLPLCLMVCQWRCLRCLRQQHDDFADDISLLK

SEQ ID NO: 17152 - protein, 137 aa, Homo sapiens
MLSGRLVLGLVSMAGRVCLCQGSAGSGAIGPVEAAIRTKLEEALSPEVLELRNESGGHAVPPGSETHFRVAVVSSRFEGLSPLQRHRLVHAALAEELGGPVHALAIQARTPAQWRENSQLDTSPPCLGGNKKTLGTP

SEQ ID NO: 17153 - protein, 246 aa, Homo sapiens
MPVQPPSKDTEEMEAEGDSAAEMNGEEEESEEERSGSQTESEEESSEMDDEDYERRRSECVSEMLDLEKQFSELKEKLFRERLSQLRLRLEEVGAERAPEYTEPLGGLQRSLKIRIQVAGIYKGFCLDVIRNKYECELQGAKQHLESEKLLLYDTLQGELQERIQRLEEDRQSLDLSSEWWDDKLHARGSSRSWDSLPPSKRKKAPLVSGPYIVYMLQEIDILEDWTAIKKARAAVSPQKRKSDGP

SEQ ID NO: 17154 - protein, 518 aa, Homo sapiens
MGALARALLLPLLAQWLLRAAPELAPAPFTLPLRVAAATNRVVAPTPGPGTPAERHADGLALALEPALASPAGAANFLAMVDNLQGDSGRGYYLEMLIGTPPQKLQILVDTGSSNFAVAGTPHSYIDTYFDTERSSTYRSKGFDVTVKYTQGSWTGFVGEDLVTIPKGFNTSFLVNIATIFESENFFLPGIKWNGILGLAYATLAKPSSSLETFFDSLVTQANIPNVFSMQMCGAGLPVAGSGTNGGSLVLGGIEPSLYKGDIWYTPIKEEWYYQIEILKLEIGGQSLNLDCREYNADKAIVDSGTTLLRLPQKVFDAVVEAVARASLIPEFSDGFWTGSQLACWTNSETPWSYFPKISIYLRDENSSRSFRITILPQLYIQPMMGAGLNYECYRFGISPSTNALVIGATVMEGFYVIFDRAQKRVGFAASPCAEIAGAAVSEISGPFSTEDVASNCVPAQSLSEPILWIVSYALMSVCGAILLVLIVLLLLPFRCQRRPRDPEVVNDESSLVRHRWK

SEQ ID NO: 17155 - protein, 468 aa, Homo sapiens
MGALARALLLPLLAQWLLRAAPELAPAPFTLPLRVAAATNRVVAPTPGPGTPAERHADGLALALEPALASPAGAANFLAMVDNLQGDSGRGYYLEMLIGTPPQKLQILVDTGSSNFAVAGTPHSYIDTYFDTERSSTYRSKGFDVTVKYTQGSWTGFVGEDLVTIPKGFNTSFLVNIATIFESENFFLPGIKWNGILGLAYATLAKPSSSLETFFDSLVTQANIPNVFSMQMCGAGLPVAGSGTNGGSLVLGGIEPSLYKGDIWYTPIKEEWYYQIEILKLEIGGQSLNLDCREYNADKAIVDSGTTLLRLPQKVFDAVVEAVARASLLYIQPMMGAGLNYECYRFGISPSTNALVIGATVMEGFYVIFDRAQKRVGFAASPCAEIAGAAVSEISGPFSTEDVASNCVPAQSLSEPILWIVSYALMSVCGAILLVLIVLLLLPFRCQRRPRDPEVVNDESSLVRHRWK

SEQ ID NO: 17156 - protein, 396 aa, Homo sapiens
MGALARALLLPLLAQWLLRAAPELAPAPFTLPLRVAAATNRVVAPTPGPGTPAERHADGLALALEPALASPAGAANFLAMVDNLQGDSGRGYYLEMLIGTPPQKLQILVDTGSSNFAVAGTPHSYIDTYFDTERSSTYRSKGFDVTVKYTQGSWTGFVGEDLVTIPKGFNTSFLVNIATIFESENFFLPGIKWNGILGLAYATLAKPSSSLETFFDSLVTQANIPNVFSMQMCGAGLPVAGSGTNGGSLVLGGIEPSLYKGDIWYTPIKEEWYYQIEILKLEIGGQSLNLDCREYNADKAIVDSGTTLLRLPQKVFDAVVEAVARASLIPEFSDGFWTGSQLACWTNSETPWSYFPKISIYLRDENSSRSFRITILPQKLQVLQCLKFPGLSQQRM

SEQ ID NO: 17157 - protein, 439 aa, Homo sapiens
MVDNLQGDSGRGYYLEMLIGTPPQKLQILVDTGSSNFAVAGTPHSYIDTYFDTERSSTYRSKGFDVTVKYTQGSWTGFVGEDLVTIPKGFNTSFLVNIATIFESENFFLPGIKWNGILGLAYATLAKPSSSLETFFDSLVTQANIPNVFSMQMCGAGLPVAGSGTNGGSLVLGGIEPSLYKGDIWYTPIKEEWYYQIEILKLEIGGQSLNLDCREYNADKAIVDSGTTLLRLPQKVFDAVVEAVARASLIPEFSDGFWTGSQLACWTNSETPWSYFPKISIYLRDENSSRSFRITILPQLYIQPMMGAGLNYECYRFGISPSTNALVIGATVMEGFYVIFDRAQKRVGFAASPCAEIAGAAVSEISGPFSTEDVASNCVPAQSLSEPILWIVSYALMSVCGAILLVLIVLLLLPFRCQRRPRDPEVVNDESSLVRHRWK

SEQ ID NO: 17158 - protein, 423 aa, Homo sapiens
MLIGTPPQKLQILVDTGSSNFAVAGTPHSYIDTYFDTERSSTYRSKGFDVTVKYTQGSWTGFVGEDLVTIPKGFNTSFLVNIATIFESENFFLPGIKWNGILGLAYATLAKPSSSLETFFDSLVTQANIPNVFSMQMCGAGLPVAGSGTNGGSLVLGGIEPSLYKGDIWYTPIKEEWYYQIEILKLEIGGQSLNLDCREYNADKAIVDSGTTLLRLPQKVFDAVVEAVARASLIPEFSDGFWTGSQLACWTNSETPWSYFPKISIYLRDENSSRSFRITILPQLYIQPMMGAGLNYECYRFGISPSTNALVIGATVMEGFYVIFDRAQKRVGFAASPCAEIAGAAVSEISGPFSTEDVASNCVPAQSLSEPILWIVSYALMSVCGAILLVLIVLLLLPFRCQRRPRDPEVVNDESSLVRHRWK

SEQ ID NO: 17159 - protein, 668 aa, Homo sapiens
MTKRKKLRTSGEGLCPPKPLKNPRLGDFYGDPQSSMLGCLHHPEEPEGKLGPVPSTQQHGEEPGKAVSSSPDEETGSPCRLLRQPEKEPAPLPPSQNSFGRFVPQFAKSRKTVTRKEEMKDEDRGSGAFSLETIAESSAQSPGCQLLVETLGVPLQEATELGDPTQADSARPEQSSQSPVQAVPGSGDSQPDDPPDRGTGLSASQRASQDHLSEQGADDSKPETDRVPGDGGQKEHLPSIDSEGEKPDRGAPQEGGAQRTAGAGLPGGPQEEGDGVPCTPASAPTSGPAPGLGPASWCLEPGSVAQGSPDPQQTPSRMGREGEGTHSSLGCSSLGMVVIADLSTDPTELEERALEVAGPDGQASAISPASPRRKAADGGHRRALPGCTSLTGETTGESGEAGQDGKPPGDVLVGPTASLALAPGSGESMMGAGDSGHASPDTGPCVNQKQEPGPAQEEAELGGQNLERDLEGFRVSPQASVVLEHREIADDPLQEPGAQQGIPDTTSELAGQRDHLPHSADQGTWADSLAVELDFLLDSQIQDALDASDFEAPPEQLFPSGNKPGPCWPGPSSHANGDPVAVAKAQPRTFVGIQASEASRMEDATNVVRGLIVELSNLNRLIMGTHRDLEAFKRLNYRKTKLGGKAPLPYPSKGPGNIPRGDPPWREL

SEQ ID NO: 17160 - protein, 637 aa, Homo sapiens
MTKRKKLRTSGEGLCPPKPLKNPRLGDFYGDPQSSMLGCLHHPEEPEGKLGPVPSTQQHGEEPGKAVSSSPDEETGSPCRLLRQPEKEPAPLPPSQNSFGRFVPQFAKSRKTVTRKEEMKDEDRGSGAFSLETIAESSAQSPGCQLLVETLGVPLQEATELGDPTQADSARPEQSSQSPVQAVPGSGDSQPDDPPDRGTGLSASQRASQDHLSEQGADDSKPETDRVPGDGGQKEHLPSIDSEGEKPDRGAPQEGGAQRTAGAGLPGGPQEEGDGVPCTPASAPTSGPAPGLGPASWCLEPGSVAQGSPDPQQTPSRMGREGEGTHSSLGCSSLGMVVIADLSTDPTELEERALEVAGPDGQASAISPASPRRKAADGGHRRALPGCTSLTGETTGESGEAGQDGKPPGDVLVGPTASLALAPGSGESMMGAGDSGHASPDTGPCVNQKQEPGPAQEEAELGGQNLERDLEGFRVSPQASVVLEHREIADDPLQEPGAQQGIPDTTSELAGQRDHLPHSADQGTWADSLAVELDFLLDSQIQDALDASDFEAPPEQLFPSGNKPGPCWPGPSSHANGDPVAVAKAQPSRLIMGTHRDLEAFKRLNYRKTKLGGKAPLPYPSKGPGNIPRGDPPWREL

SEQ ID NO: 17161 - protein, 509 aa, Homo sapiens
MTVTYTARVANARFGGFSQLLLLWRGSIYKLLWRELLCFLGFYMALSAAYRFVLTEGQKRYFEKLVIYCDQYASLIPVSFVLGFYVTLVVNRWWSQYLCMPLPDALMCVVAGTVHGRDDRGRLYRRTLMRYAGLSAVLILRSVSTAVFKRFPTIDHVVEAGFMTREERKKFENLNSSYNKYWVPCVWFSNLAAQARREGRIRDNSALKLLLEELNVFRGKCGMLFHYDWISVPLVYTQVVTIALYSYFLACLIGRQFLDPAQGYKDHDLDLCVPIFTLLQFFFYAGWLKVAEQLINPFGEDDDDFETNFLIDRNFQVSMLAVDEMYDDLAVLEKDLYWDAAEARAPYTAATVFQLRQPSFQGSTFDITLAKEDMQFQRLDGLDGPMGEAPGDFLQRLLPAGAGMVAGGPLGRRLSFLLRKNSCVSEASTGASCSCAVVPEGAAPECSCGDPLLDPGLPEPEAPPPAGPEPLTLIPGPVEPFSIVTMPGPRGPAPPWLPSPIGEEEENLA

SEQ ID NO: 17162 - protein, 431 aa, Homo sapiens
MHVRSLRAAAPHSFVALWAPLFLLRSALADFSLDNEVHSSFIHRRLRSQERREMQREILSILGLPHRPRPHLQGKHNSAPMFMLDLYNAMAVEEGGGPGGQGFSYPYKAVFSTQGPPLASLQDSHFLTDADMVMSFVNLVEHDKEFFHPRYHHREFRFDLSKIPEGEAVTAAEFRIYKDYIRERFDNETFRISVYQVLQEHLGRESDLFLLDSRTLWASEEGWLVFDITATSNHWVVNPRHNLGLQLSVETLDGQSINPKLAGLIGRHGPQNKQPFMVAFFKATEVHFRSIRSTGSKQRSQNRSKTPKNQEALRMANVAENSSSDQRQACKKHELYVSFRDLGWQDWIIAPEGYAAYYCEGECAFPLNSYMNATNHAIVQTLVHFINPETVPKPCCAPTQLNAISVLYFDDSSNVILKKYRNMVVRACGCH

SEQ ID NO: 17163 - protein, 543 aa, Homo sapiens
MGDWNLLGGILEEVHSHSTIVGKIWLTILFIFRMLVLRVAAEDVWDDEQSAFACNTRQPGCNNICYDDAFPISLIRFWVLQIIFVSSPSLVYMGHALYRLRAFEKDRQRKKSHLRAQMENPDLDLEEQQRIDRELRRLEEQKRIHKVPLKGCLLRTYVLHILTRSVLEVGFMIGQYILYGFQMHPLYKCTQPPCPNAVDCFVSRPTEKTIFMLFMHSIAAISLLLNILEIFHLGIRKIMRTLYKKSSSEGIEDETGPPFHLKKYSVAQQCMICSSLPERISPLQANNQQQVIRVNVPKSKTMWQIPQPRQLEVDPSNGKKDWSEKDQHSGQLHVHSPCPWAGSAGNQHLGQQSDHSSFGLQNTMSQSWLGTTTAPRNCPSFAVGTWEQSQDPEPSGEPLTDLHSHCRDSEGSMRESGVWIDRSRPGSRKASFLSRLLSEKRHLHSDSGSSGSRNSSCLDFPHWENSPSPLPSVTGHRTSMVRQAALPIMELSQELFHSGCFLFPFFLPGVCMYVCVDREADGGGDYLWRDKIIHSIHSVKFNS

SEQ ID NO: 17164 - protein, 239 aa, Homo sapiens
MAHAGRTGYDNREIVMKYIHYKLSQRGYEWDAGDVGAAPPGAAPAPGIFSSQPGHTPHPAASRDPVARTSPLQTPAAPGAAAGPALSPVPPVVHLTLRQAGDDFSRRYRRDFAEMSSQLHLTPFTARGRFATVVEELFRDGVNWGRIVAFFEFGGVMCVESVNREMSPLVDNIALWMTEYLNRHLHTWIQDNGGWDAFVELYGPSMRPLFDFSWLSLKTLLSLALVGACITLGAYLGHK

SEQ ID NO: 17165 - protein, 205 aa, Homo sapiens
MAHAGRTGYDNREIVMKYIHYKLSQRGYEWDAGDVGAAPPGAAPAPGIFSSQPGHTPHPAASRDPVARTSPLQTPAAPGAAAGPALSPVPPVVHLTLRQAGDDFSRRYRRDFAEMSSQLHLTPFTARGRFATVVEELFRDGVNWGRIVAFFEFGGVMCVESVNREMSPLVDNIALWMTEYLNRHLHTWIQDNGGWVGALGDVSLG

SEQ ID NO: 17166 - protein, 202 aa, Homo sapiens
MSGRSVRAETRSRAKDDIKKVMAAIEKVRKWEKKWVTVGDTSLRIFKWVPVTDSKEKEKSKSNSSAAREPNGFPSDASANSSLLLEFQDENSNQSSVSDVYQLKVDSSTNSSPSPQQSESLSPAHTSDFRTDDSQPPTLGQEILEEPSLPSSEVADEPPTLTKEEPVPLETQVVEEEEDSGAPPLKRFCVDQPTVPQTASES

SEQ ID NO: 17167 - protein, 142 aa, Homo sapiens
MPGPWLCPEFLLRKMTTLSCCLCSVWFSDENSNQSSVSDVYQLKVDSSTNSSPSPQQSESLSPAHTSDFRTDDSQPPTLGQEILEEPSLPSSEVADEPPTLTKEEPVPLETQVVEEEEDSGAPPLKRFCVDQPTVPQTASES

SEQ ID NO: 17168 - protein, 163 aa, Homo sapiens
MSGRSVRAETRSRAKDDIKKVMAAIEKVRKWEKKWVTVGDTSLRIFKWVPVTDSKEKEKSKSNSSAAREPNGFPSDASANSSLLLEFQDENSNQSSVSDVYQLKVDSSTNSSPSPQQSESLSPAHTSDFRTDDSQPPTLGQEILEEPSLPSSEVADEPPTLTF

SEQ ID NO: 17169 - protein, 145 aa, Homo sapiens
MSGRSVRAETRSRAKDDIKKVMAAIEKVRKWEKKWVTVGDTSLRIFKWVPVTDSKEKEKSKSNSSAAREPNGFPSDASANSSLLLEFQEPSLPSSEVADEPPTLTKEEPVPLETQVVEEEEDSGAPPLKRFCVDQPTVPQTASES

SEQ ID NO: 17170 - protein, 106 aa, Homo sapiens
MMATGTPESQARFGQSVKGLLTEKVTTCGTDVIALTKQVLKGSRSSELLGQAARNMVLQEDAILHSEDSLRKMAIITTHLQYQQEAIQKNVEQSSDLQDQLNHLLK

SEQ ID NO: 17171 - protein, 466 aa, Homo sapiens
MAFVLILVLSFYELVSGQWQVTGPGKFVQALVGEDAVFSCSLFPETSAEAMEVRFFRNQFHAVVHLYRDGEDWESKQMPQYRGRTEFVKDSIAGGRVSLRLKNITPSDIGLYGCWFSSQIYDEEATWELRVAALGSLPLISIVGYVDGGIQLLCLSSGWFPQPTAKWKGPQGQDLSSDSRANADGYSLYDVEISIIVQENAGSILCSIHLAEQSHEVESKVLIGETFFQPSPWRLASILLGLLCGALCGVVMGMIIVFFKSKGKIQAELDWRRKHGQAELRDARKHAVEVTLDPETAHPKLCVSDLKTVTHRKAPQEVPHSEKRFTRKSVVASQGFQAGKHYWEVDVGQNVGWYVGVCRDDVDRGKNNVTLSPNNGYWVLRLTTEHLYFTFNPHFISLPPSTPPTRVGVFLDYEGGTISFFNTNDQSLIYTLLTCQFEGLLRPYIQHAMYDEEKGTPIFICPVSWG

SEQ ID NO: 17172 - protein, 432 aa, Homo sapiens
MAFVLILVLSFYELVSGQWQVTGPGKFVQALVGEDAVFSCSLFPETSAEAMEVRFFRNQFHAVVHLYRDGEDWESKQMPQYRGRTEFVKDSIAGGRVSLRLKNITPSDIGLYGCWFSSQIYDEEATWELRVAALGSLPLISIVGYVDGGIQLLCLSSFQPSPWRLASILLGLLCGALCGVVMGMIIVFFKSKGKIQAELGMCHVLSLPHMVLPGPSLIHSLSLWTTLAAGWTGSTDWRRKHGQAELRDARKHAVEVTLDPETAHPKLCVSDLKTVTHRKAPQEVPHSEKRFTRKSVVASQGFQAGKHYWEVDVGQNVGWYVGVCRDDVDRGKNNVTLSPNNGYWVLRLTTEHLYFTFNPHFISLPPSTPPTRVGVFLDYEGGTISFFNTNDQSLIYTLLTCQFEGLLRPYIQHAMYDEEKGTPIFICPVSWG

SEQ ID NO: 17173 - protein, 419 aa, Homo sapiens
MPLSDFILALKDNPYFGAGFGLVGVGTALALARKGVQLGLVAFRRHYMITLEVPARDRSYAWLLSWLTRHSTRTQHLSVETSYLQHESGRISTKFEFVPSPGNHFIWYRGKWIRVERSREMQMIDLQTGTPWESVTFTALGTDRKVFFNILEEARELALQQEEGKTVMYTAVGSEWRPFGYPRRRRPLNSVVLQQGLADRIVRDVQEFIDNPKWYTDRGIPYRRGYLLYGPPGCGKSSFITALAGELEHSICLLSLTDSSLSDDRLNHLLSVAPQQSLVLLEDVDAAFLSRDLAVENPVKYQGLGRLTFSGLLNALDGVASTEARIVFMTTNHVDRLDPALIRPGRVDLKEYVGYCSHWQLTQMFQRFYPGQAPSLAENFAEHVLRATNQISPAQVQGYFMLYKNDPVGAIHNAESLRR

SEQ ID NO: 17174 - protein, 334 aa, Homo sapiens
MGRPAGLFPPLCPFLGFRPEACWERHMQIERAPSVPPFLRWAGYRPGPVRRRGKVELIKFVRVQWRRPQVEWRRRRWGPGPGASMAGSEELGLREDTLRVLAAFLRRGEAAGSPVPTPPRSPAQEEPTDFLSRLRRCLPCSLGRGAAPSESPRPCSLPIRPCYGLEPGPATPDFYALVAQRLEQLVQEQLKSPPSPELQGPPSTEKEAILRRLVALLEEEAEVINQKLASDPALRSKLVRLSSDSFARLVELFCSRDDSSRPSRACPGPPPPSPEPLARLALAMELSRRVAGLGGTLAGLSVEHVHSFTPWIQAHGGWEGILAVSPVDLNLPLD

SEQ ID NO: 17175 - protein, 176 aa, Homo sapiens
MGRPAGLFPPLCPFLGFRPEACWERHMQIERAPSVPPFLRWAGYRPGPVRRRGKVELIKFVRVQWRRPQVEWRRRRWGPGPGASMAGSEELGLREDTLRVLAAFLRRGEAAGSPVPTPPRPSYSRLLCFGGPAAGTAGPRAAEISAQPRITGSPIDREGSHTAEAGGPAGGGGRSH

SEQ ID NO: 17176 - protein, 333 aa, Homo sapiens
MGRPAGLFPPLCPFLGFRPEACWERHMQIERAPSVPPFLRWAGYRPGPVRRRGKVELIKFVRVQWRRPQVEWRRRRWGPGPGASMAGSEELGLREDTLRVLAAFLRRGEAAGSPVPTPPSPAQEEPTDFLSRLRRCLPCSLGRGAAPSESPRPCSLPIRPCYGLEPGPATPDFYALVAQRLEQLVQEQLKSPPSPELQGPPSTEKEAILRRLVALLEEEAEVINQKLASDPALRSKLVRLSSDSFARLVELFCSRDDSSRPSRACPGPPPPSPEPLARLALAMELSRRVAGLGGTLAGLSVEHVHSFTPWIQAHGGWEGILAVSPVDLNLPLD

SEQ ID NO: 17177 - protein, 580 aa, Homo sapiens
MAQEVSEYLSQNPRVAAWVEALRCDGETDKHWRHRRDFLLRNAGDLAPAGGAASASTDEAADAESGTRNRQLQQLISFSMAWANHVFLGCRYPQKVMDKILSMAEGIKVTDAPTYTTRDELVAKVKKRGISSSNEGVEEPSKKRVIEGKNSSAVEQDHAKTSAKTERASAQQENSSTCIGSAIKSESGNSARSSGISSQNSSTSDGDRSVSSQSSSSVSSQVTTAGSGKASEAEAPDKHGSASFVSLLKSSVNSHMTQSTDSRQQSGSPKKSALEGSSASASQSSSEIEVPLLGSSGSSEVELPLLSSKPSSETASSGLTSKTSSEASVSSSVAKNSSSSGTSLLTPKSSSSTNTSLLTSKSTSQVAASLLASKSSSQTSGSLVSKSTSLASVSQLASKSSSQTSTSQLPSKSTSQSSESSVKFSCKLTNEDVKQKQPFFNRLYKTVAWKLVAVGGFSPNVNHGELLNAAIEALKATLDVFFVPLKELADLPQNKSSQESIVCELRCKSVYLGTGCGKSKENAKAVASREALKLFLKKKVVVKICKRKYRGSEIEDLVLLDEESRPVNLPPALKHPQELL

SEQ ID NO: 17178 - protein, 141 aa, Homo sapiens
MGFQKFSPFLALSILVLLQAGSLHAAPFRSALESSPADPATLSEDEARLLLAALVQDYVQMKASELEQEQEREGSSLDSPRSKRCGNLSTCMLGTYTQDFNKFHTFPQTAIGVGAPGKKRDMSSDLERDHRPHVSMPQNAN

SEQ ID NO: 17179 - protein, 141 aa, Homo sapiens
MGFQKFSPFLALSILVLLQAGSLHAAPFRSALESSPADPATLSEDEARLLLAALVQDYVQMKASELEQEQEREGSSLDSPRSKRCGNLSTCMLGTYTQDFNKFHTFPQTAIGVGAPGKKRDMSSDLERDHRPHNHCPEESL

SEQ ID NO: 17180 - protein, 293 aa, Homo sapiens
MRVDSSADPTMSQEQGPGSSTPPSSPTLLDALLQNLYDFGGTEGETEQKKIIKKRENKKRDVMASAALAAEPSPLPGSLIRGQRKSASSFFKELREERHCAPSGTPTGPEILAAAVPPSSLKNNREQVEVVEFHSNKKRKLTPDHNKNTKQANPSVLERDVDTQEFNLEKARLEVHRFGITGYGKGKERILEQERAIMLGAKPPKKSYVNYKVLQEQIKEKKAAKEEEKRLAQETDIFKKKKRKGQEDRKSKKKSAPSILSNGRIGQVGKFKNGTLILSPVDIKKINSSRVAK

SEQ ID NO: 17181 - protein, 294 aa, Homo sapiens
MRVDSSADPTMSQEQGPGSSTPPSSPTLLDALLQNLYDFGGTEGETEQKKIIKKRENKKRDVMASAALAAEPSPLPGSLIRGQRKSASSFFKELREERHCAPSGTPTGPEILAAAVPPSSLKNNREQVEVVEFHSNKKRKLTPDHNKNTKQANPSVLERDVDTQEFNLEKARLEVHRFGITGYGKGKERILEQERAIMLGAKPPKKSYVNYKVLQEQIKEKKAAKEEEKRLAQETDIFKKKKRKGQEDRRKSKKKSAPSILSNGRIGQVGKFKNGTLILSPVDIKKINSSRVAK

SEQ ID NO: 17182 - protein, 292 aa, Homo sapiens
MRVDSSADPTMSQEQGPGSSTPPSSPTLLDALLQNLYDFGGTEGETEQKKIIKKRENKKRDVMASAALAAEPSPLPGSLIRGQRKSASSFFKELREERHCAPSGTPTGPEILAAAVPPSSLKNNREQVEVVEFHSNKKRKLTPDHNKNTKANPSVLERDVDTQEFNLEKARLEVHRFGITGYGKGKERILEQERAIMLGAKPPKKSYVNYKVLQEQIKEKKAAKEEEKRLAQETDIFKKKKRKGQEDRKSKKKSAPSILSNGRIGQVGKFKNGTLILSPVDIKKINSSRVAK

SEQ ID NO: 17183 - protein, 166 aa, Homo sapiens
MRVDSSADPTMSQEQGPGSSTPPSSPTLLDALLQNLYDFGGTEGETEQKKIIKKRENKKRDVMASAALAAEPSPLPGSLIRGQRKSASSFFKELREERHCAPSGTPTGPEILAAAVPPSSLKNNREQVEVVEFHSNKKRKLTPDHNKNTKVMSWLAYIYVVNPLVL

SEQ ID NO: 17184 - protein, 335 aa, Homo sapiens
MWATLPLLCAGAWLLGVPVCGAAELCVNSLEKFHFKSWMSKHRKTYSTEEYHHRLQTFASNWRKINAHNNGNHTFKMALNQFSDMSFAEIKHKYLWSEPQNCSATKSNYLRGTGPYPPSVDWRKKGNFVSPVKNQGACGSCWTFSTTGALESAIAIATGKMLSLAEQQLVDCAQDFNNHGCQGGLPSQAFEYILYNKGIMGEDTYPYQGKDGYCKFQPGKAIGFVKDVANITIYDEEAMVEAVALYNPVSFAFEVTQDFMMYRTGIYSSTSCHKTPDKVNHAVLAVGYGEKNGIPYWIVKNSWGPQWGMNGYFLIERGKNMCGLAACASYPIPLV

SEQ ID NO: 17185 - protein, 584 aa, Homo sapiens
MGNQMSVPQRVEDQENEPEAETYQDNASALNGVPVVVSTHTVQHLEEVDLGISVKTDNVATSSPETTEISAVADANGKNLGKEAKPEAPAAKSRFFLMLSRPVPGRTGDQAADSSLGSVKLDVSSNKAPANKDPSESWTLPVAAGPGQDTDKTPGHAPAQDKVLSAARDPTLLPPETGGAGGEAPSKPKDSSFFDKFFKLDKGQEKVPGDSQQEAKRAEHQDKVDEVPGLSGQSDDVPAGKDIVDGKEKEGQELGTADCSVPGDPEGLETAKDDSQAAAIAENNNSIMSFFKTLVSPNKAETKKDPEDTGAEKSPTTSADLKSDKANFTSQETQGAGKNSKGCNPSGHTQSVTTPEPAKEGTKEKSGPTSLPLGKLFWKKSVKEDSVPTGAEENVVCESPVEIIKSKEVESALQTVDLNEGDAAPEPTEAKLKREESKPRTSLMAFLRQMSVKGDGGITHSEEINGKDSSCQTSDSTEKTITPPEPEPTGAPQKGKEGSSKDKKSAAEMNKQKSNKQEAKEPAQCTEQATVDTNSLQNGDKLQKRPEKRQQSLGGFFKGLGPKRMLDAQVQTDPVSIGPVGKSK

SEQ ID NO: 17186 - protein, 614 aa, Homo sapiens
MGNQMSVPQRVEDQENEPEAETYQDNASALNGVPVVVSTHTVQHLEEVDLGISVKTDNVATSSPETTEISAVADANGKNLGKEAKPEAPAAKSRFFLMLSRPVPGRTGDQAADSSLGSVKLDVSSNKAPANKDPSESWTLPVAAGPGQDTDKTPGHAPAQDKVLSAARDPTLLPPETGGAGGEAPSKPKDSSFFDKFFKLDKGQEKVPGDSQQEAKRAEHQDKVDEVPGLSGQSDDVPAGKDIVDGKEKEGQELGTADCSVPGDPEGLETAKDDSQAAAIAENNNSIMSFFKTLVSPNKAETKKDPEDTASKAESVCDGQAGQKTSEIQARGTKKKHLDSPRLGLAFRKFFRHKGAEKSPTTSADLKSDKANFTSQETQGAGKNSKGCNPSGHTQSVTTPEPAKEGTKEKSGPTSLPLGKLFWKKVVCESPVEIIKSKEVESALQTVDLNEGDAAPEPTEAKLKREESKPRTSLMAFLRQMTSDSTEKTITPPEPEPTGAPQKGKEGSSKDKKSAAEMNKQKSNKQEAKEPAQCTEQATVDTNSLQNGDKLQKRPEKRQQSLGGFFKGLGPKRMLDAQVQTDPVSIGPVGKSKYTGKCVFSHVKKKWPFQEWSY

SEQ ID NO: 17187 - protein, 163 aa, Homo sapiens
MMCTAKKCGIRFQPPAIILIYESEIKGKIRQRIMPVRNFSKFSDCTRAAEQLKNNPRHKSYLEQVSLRQLEKLFSFLRGYLSGQSLAETMEQIQRETTIDPEEDLNKLDDKELAKRKSIMDELFEKNQKKKDDPNFVYDIEVEFPQDDQLQSCGWDTESADEF

SEQ ID NO: 17188 - protein, 783 aa, Homo sapiens
MGDEKDSWKVKTLDEILQEKKRRKEQEEKAEIKRLKNSDDRDSKRDSLEEGELRDHCMEITIRNSPYRREDSMEDRGEEDDSLAIKPPQQMSRKEKVHHRKDEKRKEKWKHARVKEREHERRKRHREEQDKARREWERQKRREMAREHSRRERDRLEQLERKRERERKMREQQKEQREQKERERRAEERRKEREARREVSAHHRTMREDYSDKVKASHWSRSPPRPPRERFELGDGRKPGEARPAPAQKPAQLKEEKMEERDLLSDLQDISDSERKTSSAESSSAESGSGSEEEEEEEEEEEEEGSTSEESEEEEEEEEEEEEETGSNSEEASEQSAEEVSEEEMSEDEERENENHLLVVPESRFDRDSGESEEAEEEVGEGTPQSSALTEGDYVPDSPALLPIELKQELPKYLPALQGCRSVEEFQCLNRIEEGTYGVVYRAKDKKTDEIVALKRLKMEKEKEGFPITSLREINTILKAQHPNIVTVREIVVGSNMDKIYIVMNYVEHDLKSLMETMKQPFLPGEVKTLMIQLLRGVKHLHDNWILHRDLKTSNLLLSHAGILKVGDFGLAREYGSPLKAYTPVVVTQWYRAPELLLGAKEYSTAVDMWSVGCIFGELLTQKPLFPGNSEIDQINKVFKELGTPSEKIWPGYSELPVVKKMTFSEHPYNNLRKRFGALLSDQGFDLMNKFLTYFPGRRISAEDGLKHEYFRETPLPIDPSMFPTWPAKSEQQRVKRGTSPRPPEGGLGYSQLGDDDLKETGFHLTTTNQGASAAGPGFSLKF

SEQ ID NO: 17189 - protein, 780 aa, Homo sapiens
MGDEKDSWKVKTLDEILQEKKRRKEQEEKAEIKRLKNSDDRDSKRDSLEEGELRDHCMEITIRNSPYRREDSMEDRGEEDDSLAIKPPQQMSRKEKVHHRKDEKRKEKCRHHSHSAEGGKHARVKEREHERRKRHREEQDKARREWERQKRREMAREHSRRERDRLEQLERKRERERKMREQQKEQREQKERERRAEERRKEREARREVSAHHRTMREDYSDKVKASHWSRSPPRPPRERFELGDGRKPVKEEKMEERDLLSDLQDISDSERKTSSAESSSAESGSGSEEEEEEEEEEEEEGSTSEESEEEEEEEEEEEEETGSNSEEASEQSAEEVSEEEMSEDEERENENHLLVVPESRFDRDSGESEEAEEEVGEGTPQSSALTEGDYVPDSPALLPIELKQELPKYLPALQGCRSVEEFQCLNRIEEGTYGVVYRAKDKKTDEIVALKRLKMEKEKEGFPITSLREINTILKAQHPNIVTVREIVVGSNMDKIYIVMNYVEHDLKSLMETMKQPFLPGEVKTLMIQLLRGVKHLHDNWILHRDLKTSNLLLSHAGILKVGDFGLAREYGSPLKAYTPVVVTQWYRAPELLLGAKEYSTAVDMWSVGCIFGELLTQKPLFPGNSEIDQINKVFKELGTPSEKIWPGYSELPVVKKMTFSEHPYNNLRKRFGALLSDQGFDLMNKFLTYFPGRRISAEDGLKHEYFRETPLPIDPSMFPTWPAKSEQQRVKRGTSPRPPEGGLGYSQLGDDDLKETGFHLTTTNQGASAAGPGFSLKF

SEQ ID NO: 17190 - protein, 779 aa, Homo sapiens
MGDEKDSWKVKTLDEILQEKKRRKEQEEKAEIKRLKNSDDRDSKRDSLEEGELRDHCMEITIRNSPYRREDSMEDRGEEDDSLAIKPPQQMSRKEKVHHRKDEKRKEKWKHARVKEREHERRKRHREEQDKARREWERQKRREMAREHSRRERGNDGFCLFRDRLEQLERKRERERKMREQQKEQREQKERERRAEERRKEREARREVSAHHRTMREDYSDKVKASHWSRSPPRPPRERFELGDGRKPVKEEKMEERDLLSDLQDISDSERKTSSAESSSAESGSGSEEEEEEEEEEEEEGSTSEESEEEEEEEEEEEEETGSNSEEASEQSAEEVSEEEMSEDEERENENHLLVVPESRFDRDSGESEEAEEEVGEGTPQSSALTEGDYVPDSPALLPIELKQELPKYLPALQGCRSVEEFQCLNRIEEGTYGVVYRAKDKKTDEIVALKRLKMEKEKEGFPITSLREINTILKAQHPNIVTVREIVVGSNMDKIYIVMNYVEHDLKSLMETMKQPFLPGEVKTLMIQLLRGVKHLHDNWILHRDLKTSNLLLSHAGILKVGDFGLAREYGSPLKAYTPVVVTQWYRAPELLLGAKEYSTAVDMWSVGCIFGELLTQKPLFPGNSEIDQINKVFKELGTPSEKIWPGYSELPVVKKMTFSEHPYNNLRKRFGALLSDQGFDLMNKFLTYFPGRRISAEDGLKHEYFRETPLPIDPSMFPTWPAKSEQQRVKRGTSPRPPEGGLGYSQLGDDDLKETGFHLTTTNQGASAAGPGFSLKF

SEQ ID NO: 17191 - protein, 770 aa, Homo sapiens
MGDEKDSWKVKTLDEILQEKKRRKEQEEKAEIKRLKNSDDRDSKRDSLEEGELRDHCMEITIRNSPYRREDSMEDRGEEDDSLAIKPPQQMSRKEKVHHRKDEKRKEKWKHARVKEREHERRKRHREEQDKARREWERQKRREMAREHSRRERDRLEQLERKRERERKMREQQKEQREQKERERRAEERRKEREARREVSAHHRTMREDYSDKVKASHWSRSPPRPPRERFELGDGRKPVKEEKMEERDLLSDLQDISDSERKTSSAESSSAESGSGSEEEEEEEEEEEEEGSTSEESEEEEEEEEEEEEETGSNSEEASEQSAEEVSEEEMSEDEERENENHLLVVPESRFDRDSGESEEAEEEVGEGTPQSSALTEGDYVPDSPALLPIELKQELPKYLPALQGCRSVEEFQCLNRIEEGTYGVVYRAKDKKTDEIVALKRLKMEKEKEGFPITSLREINTILKAQHPNIVTVREIVVGSNMDKIYIVMNYVEHDLKSLMETMKQPFLPGEVKTLMIQLLRGVKHLHDNWILHRDLKTSNLLLSHAGILKVGDFGLAREYGSPLKAYTPVVVTQWYRAPELLLGAKEYSTAVDMWSVGCIFGELLTQKPLFPGNSEIDQINKVFKELGTPSEKIWPGYSELPVVKKMTFSEHPYNNLRKRFGALLSDQGFDLMNKFLTYFPGRRISAEDGLKHEYFRETPLPIDPSMFPTWPAKSEQQRVKRGTSPRPPEGGLGYSQLGDDDLKETGFHLTTTNQGASAAGPGFSLKF

SEQ ID NO: 17192 - protein, 397 aa, Homo sapiens
MKNEKMKTTSWLFQSHGSTEIPGRVKKQRKKWGCRSVEEFQCLNRIEEGTYGVVYRAKDKKTDEIVALKRLKMEKEKEGFPITSLREINTILKAQHPNIVTVREIVVGSNMDKIYIVMNYVEHDLKSLMETMKQPFLPGEVKTLMIQLLRGVKHLHDNWILHRDLKTSNLLLSHAGILKVGDFGLAREYGSPLKAYTPVVVTQWYRAPELLLGAKEYSTAVDMWSVGCIFGELLTQKPLFPGNSEIDQINKVFKELGTPSEKIWPGYSELPVVKKMTFSEHPYNNLRKRFGALLSDQGFDLMNKFLTYFPGRRISAEDGLKHEYFRETPLPIDPSMFPTWPAKSEQQRVKRGTSPRPPEGGLGYSQLGDDDLKETGFHLTTTNQGASAAGPGFSLKF

SEQ ID NO: 17193 - protein, 167 aa, Homo sapiens
MGKTEEKGNGKGAFQERKGPLGAVRKEAGAGAQDAGAAEGAAVKKMTFSEHPYNNLRKRFGALLSDQGFDLMNKFLTYFPGRRISAEDGLKHEYFRETPLPIDPSMFPTWPAKSEQQRVKRGTSPRPPEGGLGYSQLGDDDLKETGFHLTTTNQGASAAGPGFSLKF

SEQ ID NO: 17194 - protein, 531 aa, Homo sapiens
MEITIRNSPYRREDSMEDRGEEDDSLAIKPPQQMSRKEKVHHRKDEKRKEKWKHARVKEREHERRKRHREEQDKARREWERQKRREMAREHSRRERGNDGFCLFRDRLEQLERKRERERKMREQQKEQREQKERERRAEERRKEREARREVSAHHRTMREDYSDKVKASHWSRSPPRPPRERFELGDGRKPVKEEKMEERDLLSDLQDISDSERKTSSAESSSAESGSGSEEEEEEEEEEEEEGSTSEESEEEEEEEEEEEEETGSNSEEASEQSAEEVSEEEMSEDEERENENHLLVVPESRFDRDSGESEEAEEEVGEGTPQSSALTEGDYVPDSPALLPIELKQELPKYLPALQGCRSVEEFQCLNRIEEGTYGVVYRAKDKKTDEIVALKRLKMEKEKEGFPITSLREINTILKAQHPNIVTVREIVVGSNMDKIYIVMNYVEHDLKSLMETMKQPFLPGEVKTLMIQLLRGVKHLHDNWILHRDLKTSNLLLSHAGILKVSPPPSGPSQGDPPGPTHSRPSVVAGG

SEQ ID NO: 17195 - protein, 439 aa, Homo sapiens
MSEDEERENENHLLVVPESRFDRDSGESEEAEEEVGEGTPQSSALTEGDYVPDSPALLPIELKQELPKYLPALQGCRSVEEFQCLNRIEEGTYGVVYRAKDKKTDEIVALKRLKMEKEKEGFPITSLREINTILKAQHPNIVTVREIVVGSNMDKIYIVMNYVEHDLKSLMETMKQPFLPGEVKTLMIQLLRGVKHLHDNWILHRDLKTSNLLLSHAGILKVGDFGLAREYGSPLKAYTPVVVTQWYRAPELLLGAKEYSTAVDMWSVGCIFGELLTQKPLFPGNSEIDQINKVFKELGTPSEKIWPGYSELPVVKKMTFSEHPYNNLRKRFGALLSDQGFDLMNKFLTYFPGRRISAEDGLKHEYFRETPLPIDPSMFPTWPAKSEQQRVKRGTSPRPPEGGLGYSQLGDDDLKETGFHLTTTNQGASAAGPGFSLKF

SEQ ID NO: 17196 - protein, 80 aa, Homo sapiens
MGRAMVARLGLGLLLLALLLPTQIYSSETTTGTSSNSSQSTSNSGLAPNPTNATTKAAGGALQSTASLFVVSLSLLHLYS

SEQ ID NO: 17197 - protein, 129 aa, Homo sapiens
MVGRFCPESPPGFVRVAATSAVSLDPPSGEPRPGCGYPGPRSAASRVYGCTAPARETGGWAWETLAGAGAKKIYSSETTTGTSSNSSQSTSNSGLAPNPTNATTKAAGGALQSTASLFVVSLSLLHLYS

SEQ ID NO: 17198 - protein, 821 aa, Homo sapiens
MAGSDAEWVTIANNLLFKCHIHLRIHELQDCDANVFIALYQSILGEKVPDLIVIPRSQEDDAHNVQAVIDSLALDYLQVSLSHITGENIVKGDKESIKNLLEIFDGLLEYLTERISETSHEKSETEQYFKESDRGERLEEPESTKESKSSWKRVSFGRCSLSSEMLGPSWDGDEAESTGEIIRLGDTAHTFSLRSNGAQCPNEMLSKKALASPSSKSHEDMLYPPSVLSKSRTSFVEDTETLSVSGIPNARKLGEPIRAAIPLHPPYHPSEPRAPCPIGKEYLHSSHCSPAVNSTGEHTEFSGDLDDGLFLISKLPKGSKWEVYPAQVQGPRTRKPPKGKRNENRATASSCNSPFPQRPRKRLTEQELHDVSEKLSQRLSELDWMLKSALGDRIKEKTDHKEENTGNEEVEDGTEETLSQHSDGIVEYGPKKSRPGLSMRRKPPYRSHSLSPSPVNKHKQFHLERKRQRKPRETDVRQFQAQAFTEAFERELRRHKVQENIGPLRIHEKEEETEKIYRGEAVRKGTPECSQPWKIYSRKTTTQSLRGGLPKPNKAVPMKVSEHSLLPLMLEQFPFLYVSGPTLSKMWKQQIAQVEQLKKEACRENRSKKKLQDEIEEALRRHDLLTTLVKKEYEHNKRLQDFKDCIRRQRLTQSKIKENRQQIVRARKYYDDYRVQLCAKMMRMRTREEMIFKKLFEEGLNIQKQRLRDLRNYAKEKRDEQRRRHQDELDSMENYYKDQFSLLAEAISQEHQELKAREKSQAQTLHKVKRELRSKMEKEIQQLQDMITQNDDDVFFRELEAERFRSRLQLASFQYSKSPSL

SEQ ID NO: 17199 - protein, 657 aa, Homo sapiens
MLGPSWDGDEAESTGEIIRLGDTAHTFSLRSNGAQCPNEMLSKKALASPSSKSHEDMLYPPSVLSKSRTSFVEDTETLSVSGIPNARKLGEPIRAAIPLHPPYHPSEPRAPCPIGKEYLHSSHCSPAVNSTGEHTEFSGDLDDGLFLISKLPKGSKWEVYPAQVQGPRTRKPPKGKRNENRATASSCNSPFPQRPRKRLTEQELHDVSEKLSQRLSELDWMLKSALGDRIKEKTDHKEENTGNEEVEDGTEETLSQHSDGIVEYGPKKSRPGLSMRRKPPYRSHSLSPSPVNKHKQFHLERKRQRKPRETDVRQFQAQAFTEAFERELRRHKVQENIGPLRIHEKEEETEKIYRGEAVRKGTPECSQPWKIYSRKTTTQSLRGGLPKPNKAVPMKVSEHSLLPLMLEQFPFLYVSGPTLSKMWKQQIAQVEQLKKEACRENRSKKKLQDEIEEALRRHDLLTTLVKKEYEHNKRLQDFKDCIRRQRLTQSKIKENRQQIVRARKYYDDYRVQLCAKMMRMRTREEMIFKKLFEEGLNIQKQRLRDLRNYAKEKRDEQRRRHQDELDSMENYYKDQFSLLAEAISQEHQELKAREKSQAQTLHKVKRELRSKMEKEIQQLQDMITQNDDDVFFRELEAERFRSRLQLASFQYSKSPSL

SEQ ID NO: 17200 - protein, 519 aa, Homo sapiens
MEWKLERTAPRRVRTEEEMLWESIMRVLSKDLKQKRSQDSANVLDSVNATYSDFKSNFAKRLSAEVPVASSPITTRWQQSQTRALSSDSFGEEQSTTYLPEASGSVLKTPPEKETLTLGSRKEQLKTPSKGISETSNSALHFCKAPHAMDRDWKESVASKGQKCLKQLFVTQNVVQQANGKMQLCEQSECVWKGCKDGVRDESFHLKSSGDINDSILQPEVKIHITGLRNDYYLNILDWSFQNLVAIALGSAVYIWNGENHNGIENIDLSLTCNYISSVSWIKEGTCLAVGTSEGEVQLWDVVTKKRLRNMLGHLSVVGALSWNHFILSSGSRLGRVYHHDVRVAQHHVGTLRHKQAVCALKWSPDGRLLSSGCSDGLLTIWPHDPGASAQGQPLKVITQSTAVKAMDWCPWQSGVLAIGGGMKDGRLHILDINAGKSIQTPSTNSQICSLIWLPKTKEIATGQGTPKNDVTVWTCPTVSRSGGFFGHRGRVLHLSLSPDQTRVFSAAADGTASVWNCY

SEQ ID NO: 17201 - protein, 515 aa, Homo sapiens
MEWKLERTAPRRVRTEEEMLWESIMRVLSKDLKQKRSQDSANVLDSVNATYSDFKSNFAKRLSAEVPVASSPITTRWQQSQTRALSSDSFGEEQSTTYLPEASGSVLKTPPEKETLTLGSRKEQLKTPSKGISETSNSALHFCKAPHAMDRDWKESVASKGQKCLKQLFVTQNVVQQANGKMQLCEQSECVWKGCKDGVRDESFHLKSSGDINDSILQPEVKIHITGLRNDYYLNILDWSFQNLVAIALGSAVYIWNGENHNGIENIDLSLTCNYISSVSWIKEGTCLAVGTSEGEVQLWDVVTKKRLRNMLGHLSVVGALSWNHFILSSGSRLGRVYHHDVRVAQHHVGTLRHKQAVCALKWSPDGRLLSSGCSDGLLTIWPHDPGASAQGQPLKVITQSTAVKAMDWCPWQSGVLAIGGGMKDGRLHILDINAGKSIQTPSTNSQICSLIWLPKTKEIATGQGTPKNDVTVWTCPTVSRSGHRGRVLHLSLSPDQTRVFSAAADGTASVWNCY

SEQ ID NO: 17202 - protein, 477 aa, Homo sapiens
MEWKLERTAPRRVRTEEEMLWESIMRVLSKDLKQKRSQDSANVLDSVNATYSDFKSNFAKRLSAEVPVASSPITTRWQQSQTRALSSDSFGEEQSTTYLPEASGSVLKTPPEKETLTLGSRKEQLKTPSKGISETSNSALHFCKAPHAMDRDWKESVASKGQKCLKQLFVTQNVVQQANGKMQLCEQSECVWKGCKDGVRDESFHLKSSGDINDSILQPEVKIHITGLRNDYYLNILDWSFQNLVAIALGSAVYIWNGENHNGIENIDLSLTCNYISSVSWIKEGTCLAVGTSEGEVQLWDVVTKKRLRNMLGHLSVVGALSWNHFILSSGSRLGRVYHHDVRVAQHHVGTLRHKQAVCALKWSPDGRLLSSGCSDGLLTIWPHDPGASAQGQPLKVITQSTAVKICSLIWLPKTKEIATGQGTPKNDVTVWTCPTVSRSGGFFGHRGRVLHLSLSPDQTRVFSAAADGTASVWNCY

SEQ ID NO: 17203 - protein, 372 aa, Homo sapiens
MEWKLERTAPRRVRTEEEMLWESIMRVLSKDLKQKRSQDSANVLDSVNATYSDFKSNFAKRLSAEVPVASSPITTRWQQSQTRALSSDSFGEEQSTTYLPEASGSVLKTPPEKETLTLGSRKEQLKTPSKGISETSNSALHFCKAPHAMDRDWKESVASKGQKCLKQLFVTQNVVQQANGKMQLCEQSECVWKGCKDGVRDESFHLKSSGDINDSILQPEVKIHITGLRNDYYLNILDWSFQNLVAIALGSAVYIWNGENHNGIENIDLSLTCNYISSVSWIKEGTCLAVGTSEGEVQLWDVVTKKRLRNMLGHLSVVGALSWNHFILSRLEFSGVISAHCNLHLPSSWDYRRPPPCLVGQDWGVFIITMFG

SEQ ID NO: 17204 - protein, 192 aa, Homo sapiens
MEWKLERTAPRRVRTEEEMLWVLDSVNATYSDFKSNFAKRLSAEVPVASSPITTRWQQSQTRALSSDSFGEEQSTTYLPEASGSVLKTPPEKETLTLGSRKEQLKTPSKGISETSNSALHFCKAPHAMDRDWKESVASKGQKCLKQLFVTQNVVQQANGKMQLCEQSECVWKDHFSGSMKKRFEQEDVGGKD

SEQ ID NO: 17205 - protein, 212 aa, Homo sapiens
MKPPSSIQTSEFDSSDEEPIEDEQTPIHISWLSLSRVNCSQFLGLCALPGCKFKDVRRNVQKDTEELKSCGIQDIFVFCTRGELSKYRVPNLLDLYQQCGIITHHHPIADGGTPDIASCCEIMEELTTCLKNYRKTLIHCYGGLGRSCLVAACLLLYLSDTISPEQAIDSLRDLRGSGAIQTIKQYNYLHEFRDKLAAHLSSRDSQSRSVSR

SEQ ID NO: 17206 - protein, 172 aa, Homo sapiens
MKPPSSIQTSCKFKDVRRNVQKDTEELKSCGIQDIFVFCTRGELSKYRVPNLLDLYQQCGIITHHHPIADGGTPDIASCCEIMEELTTCLKNYRKTLIHCYGGLGRSCLVAACLLLYLSDTISPEQAIDSLRDLRGSGAIQTIKQYNYLHEFRDKLAAHLSSRDSQSRSVSR

SEQ ID NO: 17207 - protein, 253 aa, Homo sapiens
MAASGESGTSGGGGSTEEAFMTFYSEVKQIEKRDSVLTSKNQIERLTRPGSSYFNLNPFEVLQIDPEVTDEEIKKRFRQLSILVHPDKNQDDADRAQKAFEAVDKAYKLLLDQEQKKRALDVIQAGKEYVEHTVKERKKQLKKEGKPTIVEEDDPELFKQAVYKQTMKLFAELEIKRKEREAKEMHERKRQREEEIEAQEKAKREREWQKNFEESRDGRVDSWRNFQANTKGKKEKKNRTFLRPPKVKMEQRE

SEQ ID NO: 17208 - protein, 313 aa, Homo sapiens
MYVSYLLDKDVSMYPSSVRHSGGLNLAPQNFVSPPQYPDYGGYHVAAAAAAAANLDSAQSPGPSWPAAYGAPLREDWNGYAPGGAAAAANAVAHGLNGGSPAAAMGYSSPADYHPHHHPHHHPHHPAAAPSCASGLLQTLNPGPPGPAATAAAEQLSPGGQRRNLCEWMRKPAQQSLGSQVKTRTKDKYRVVYTDHQRLELEKEFHYSRYITIRRKAELAATLGLSERQVKIWFQNRRAKERKINKKKLQQQQQQQPPQPPPPPPQPPQPQPGPLRSVPEPLSPVSSLQASVPGSVPGVLGPTGGVLNPTVTQ

SEQ ID NO: 17209 - protein, 188 aa, Homo sapiens
MMHPVASSNPAFCGPGKPSCLNEDAMRAADQFDIYSSQQSKYSHTVNHKPMVCQRQDPLNETHLQTTSGRSIEIKDELKKKKNLNRSGKRGRPSGTTKSAGYRTSTGRPLGTTKAAGFKTSPGRPLGTTKAAGYKVSPGRPPGSIKALSRLADLGYGCGTAAFPYPMMHGRAVHGVEETSSEVKPPNE

SEQ ID NO: 17210 - protein, 155 aa, Homo sapiens
MMHPVASSNPAFCGPGKPSCLNEDAMRAADQFDIYSSQQSKYSHTVNHKPMVCQRQDPLNETHLQTTSGRSIEIKDELKKKKNLNRSGKRGRPSGTTKSAGYRTSTGRPLGTTKAAGFKTSPGRPLGTTKAAGYKVSPGRPPGKKQQAFRCSSDA

SEQ ID NO: 17211 - protein, 390 aa, Homo sapiens
MGATTMDQKSLWAGVVVLLLLQGGSAYKLVCYFTNWSQDRQEPGKFTPENIDPFLCSHLIYSFASIENNKVIIKDKSEVMLYQTINSLKTKNPKLKILLSIGGYLFGSKGFHPMVDSSTSRLEFINSIILFLRNHNFDGLDVSWIYPDQKENTHFTVLIHELAEAFQKDFTKSTKERLLLTAGVSAGRQMIDNSYQVEKLAKDLDFINLLSFDFHGSWEKPLITGHNSPLSKGWQDRGPSSYYNVEYAVGYWIHKGMPSEKVVMGIPTYGHSFTLASAETTVGAPASGPGAAGPITESSGFLAYYEICQFLKGAKITRLQDQQVPYAVKGNQWVGYDDVKSMETKVQFLKNLNLGGAMIWSIDMDDFTGKSCNQGPYPLVQAVKRSLGSL

SEQ ID NO: 17212 - protein, 311 aa, Homo sapiens
MLYQTINSLKTKNPKLKILLSIGGYLFGSKGFHPMVDSSTSRLEFINSIILFLRNHNFDGLDVSWIYPDQKENTHFTVLIHELAEAFQKDFTKSTKERLLLTAGVSAGRQMIDNSYQVEKLAKDLDFINLLSFDFHGSWEKPLITGHNSPLSKGWQDRGPSSYYNVEYAVGYWIHKGMPSEKVVMGIPTYGHSFTLASAETTVGAPASGPGAAGPITESSGFLAYYEICQFLKGAKITRLQDQQVPYAVKGNQWVGYDDVKSMETKVQFLKNLNLGGAMIWSIDMDDFTGKSCNQGPYPLVQAVKRSLGSL

SEQ ID NO: 17213 - protein, 380 aa, Homo sapiens
MGATTMDQKSLWAGSAYKLVCYFTNWSQDRQEPGKFTPENIDPFLCSHLIYSFASIENNKVIIKDKSEVMLYQTINSLKTKNPKLKILLSIGGYLFGSKGFHPMVDSSTSRLEFINSIILFLRNHNFDGLDVSWIYPDQKENTHFTVLIHELAEAFQKDFTKSTKERLLLTAGVSAGRQMIDNSYQVEKLAKDLDFINLLSFDFHGSWEKPLITGHNSPLSKGWQDRGPSSYYNVEYAVGYWIHKGMPSEKVVMGIPTYGHSFTLASAETTVGAPASGPGAAGPITESSGFLAYYEICQFLKGAKITRLQDQQVPYAVKGNQWVGYDDVKSMETKVQFLKNLNLGGAMIWSIDMDDFTGKSCNQGPYPLVQAVKRSLGSL

SEQ ID NO: 17214 - protein, 229 aa, Homo sapiens
MGDPNSRKKQALNRLRAQLRKKKESLADQFDFKMYIAFVFKEKKKKSALFEVSEVIPVMTNNYEENILKGVRDSSYSLESSLELLQKDVVQLHAPRYQSMRRDVIGCTQEMDFILWPRNDIEKIVCLLFSRWKESDEPFRPVQAKFEFHHGDYEKQFLHVLSRKDKTGIVVNNPNQSVFLFIDRQHLQTPKNKATIFKLCSICLYLPQEQLTHWAVGTIEDHLRPYMPE

SEQ ID NO: 17215 - protein, 200 aa, Homo sapiens
MSENLSDPVSPVVRKKKSALFEVSEVIPVMTNNYEENILKGVRDSSYSLESSLELLQKDVVQLHAPRYQSMRRDVIGCTQEMDFILWPRNDIEKIVCLLFSRWKESDEPFRPVQAKFEFHHGDYEKQFLHVLSRKDKTGIVVNNPNQSVFLFIDRQHLQTPKNKATIFKLCSICLYLPQEQLTHWAVGTIEDHLRPYMPE

SEQ ID NO: 17216 - protein, 165 aa, Homo sapiens
MEMFQGLLLLLLLSMGGTWASKEPLRPRCRPINATLAVEKEGCPVCITVNTTICAGYCPTMTRVLQGVLPALPQVVCNYRDVRFESIRLPGCPRGVNPVVSYAVALSCQCALCRRSTTDCGGPKDHPLTCDDPRFQDSSSSKAPPPSLPSPSRLPGPSDTPILPQ

SEQ ID NO: 17217 - protein, 181 aa, Homo sapiens
MGRPGLGAAVSDPGEAVSLSQGLLLLLLLSMGGTWASKEPLRPRCRPINATLAVEKEGCPVCITVNTTICAGYCPTMTRVLQGVLPALPQVVCNYRDVRFESIRLPGCPRGVNPVVSYAVALSCQCALCRRSTTDCGGPKDHPLTCDDPRFQDSSSSKAPPPSLPSPSRLPGPSDTPILPQ

SEQ ID NO: 17218 - protein, 151 aa, Homo sapiens
MRMAPTESTEGRRLWPGPREGGSGKETTSEKLSNLPRPHSYSPKRADAESFRGVPAAFKKCREVFRACWGSRELLFLFKAISEAGPAQNSCGITLEKAGGLEDTGSHWLSWARCKVLYINGFTDPWKDAQAWILIVSCKKGKGTPEREGRN

SEQ ID NO: 17219 - protein, 159 aa, Homo sapiens
MTQPTRPSVTCDQGSSTIGGTAAQATTSSSATSGSNYQRDRLGRRPEIGVGGQPQICFPRPRSAQQPVLFSLMNSSEAAMKKTLPKSHLSRVIIHDNRITQRIYEMEVSALEKTKKKISHYYEHLKKKFMTEQLRKLGRWREESVNSNRYLTFGIPPPV

SEQ ID NO: 17220 - protein, 113 aa, Homo sapiens
MADPEELQVSSPPPPPPSSPSSSDASAASSPGGPVSLGWPVPSRSSGPTVDQLEEVELQIGDAAFSLTKLLEATSAVSAQVEELAFKCTENARFLKTWRDLLKEGYDSLKPDD

SEQ ID NO: 17221 - protein, 85 aa, Homo sapiens
MPSVTQRLRDPDINPCLSESDASTRCLDENNYDRERCSTYFLRYKNCRRFWNSIVMQRRKNGVKPFMPTAAERDEILRAVGNMPY

SEQ ID NO: 17222 - protein, 97 aa, Homo sapiens
MHQTRTGKKTVRMPSVTQRLRDPDINPCLSESDASTRCLDENNYDRERCSTYFLRYKNCRRFWNSIVMQRRKNGVKPFMPTAAERDEILRAVGNMPY

SEQ ID NO: 17223 - protein, 68 aa, Homo sapiens
MHQTRTGKKTVRMPSVTQRLRDPDINPCLSILFYLLNDASLISVRNLMLPPDVWMKITMTGKGVPLTS

SEQ ID NO: 17224 - protein, 110 aa, Homo sapiens
MKCEETHAPNSNWVYVMLPSKKTVRMPSVTQRLRDPDINPCLSESDASTRCLDENNYDRERCSTYFLRYKNCRRFWNSIVMQRRKNGVKPFMPTAAERDEILRAVGNMPY

SEQ ID NO: 17225 - protein, 56 aa, Homo sapiens
MPSVTQRLRDPDINPCLSILFYLLNDASLISVRNLMLPPDVWMKITMTGKGVPLTS

SEQ ID NO: 17226 - protein, 941 aa, Homo sapiens
MWTEEAGATAEAQESGIRNKSSSSSQIPVVGVVTEDDEAQDVFKPMDLNRVIKLLEETDKDGLEEKQLKFVKKLVQCYQNGLPLRDLAQIFKILNLCSGKIKNQPRFIESAYDIIKLCGLPFLKKKVSDEITYAEDTANSIALLGDLMKIPSSELRIQICKCIVDFYHAEPPKKHIPGYQQASSSYKIQMAEVGGLAKTMVQSMTLLENQLVEKLWVLKVLQHLSTSEVNCTIMMKAQAASGICTHLNDPDPSGQLLFRSSEILWNLLEKSSKEEVIQQLSNLECLLALKEVFKNLFMRGFSHYDRQLRNDILVITTIIAQNPEAPMIECGFTKDLILFATFNEVKSQNLLVKGLKLSNSYEDFELKKLLFNVIVILCKDLPTVQLLIDGKVILALFTYVKKPEKQKIIDWSAAQHEELQLHAIATLSSVAPLLIEEYMSCQGNARVLAFLEWCESEDPFFSHGNSFHGTGGRGNKFAQMRYSLRLLRAVVYLEDETVNKDLCEKGTIQQMIGIFKNIISKPNEKEEAIVLEIQSDILLILSGLCENHIQRKEIFGTEGVDIVLHVMKTDPRKLQSGLGYNVLLFSTLDSIWCCILGCYPSEDYFLEKEGIFLLLDLLALNQKKFCNLILGIMVEFCDNPKTAAHVNAWQGKKDQTAASLLIKLWRKEEKELGVKRDKNGKIIDTKKPLFTSFQEEQKIIPLPANCPSIAVMDVSENIRAKIYAILGKLDFENLPGLSAEDFVTLCIIHRYLDFKIGEIWNEIYEEIKLEKLRPVTTDKKALEAITTASENIGKMVASLQSDIIESQACQDMQNEQKVYAKIQATHKQRELANKSWEDFLARTSNAKTLKKAKSLQEKAIEASRYHKRPQNAIFHQTHIKGLNTTVPSGGVVTVESTPARLVGGPLVDTDIALKKLPIRGGALQRVKAVKIVDAPKKSIPT

SEQ ID NO: 17227 - protein, 895 aa, Homo sapiens
MWTEEAGATAEAQESGIRNKSSSSSQIPVVGVVTEDDEAQDVFKPMDLNRVIKLLEETDKDGLEEKQLKFVKKLVQCYQNGLPLRDLAQIFKILNLCSGKIKNQPRFIESAYDIIKLCGLPFLKKKVSDEITYAEDTANSIALLGDLMKIPSSELRIQICKCIVDFYHAEPPKKHIPGYQQASSSYKIQMAEVGGLAKTMVQSMTLLENQLVEKLWVLKVLQHLSTSEVNCTIMMKAQAASGICTHLNDPDPSGQLLFRSSEILWNLLEKSSKEEVIQQLSNLECLLALKEVFKNLFMRGFSHYDRQLRNDILVITTIIAQNPEAPMIECGFTKDLILFATFNEVKSQNLLVKGLKLSNSYEDFELKKLLFNVIVILCKDLPTVQLLIDGKVILALFTYVKKPEKQKIIDWSAAQHEELQLHAIATLSSVAPLLIEEYMSCQGNARVLAFLEWCESEDPFFSHGNSFHGTGGRGNKFAQMRYSLRLLRAVVYLEDETVNKDLCEKGTIQQMIGIFKNIISKPNEKEEAIVLEIQSDILLILSGLCENHIQRKEIFGTEGVDIVLHVMKTDPRKLQSGLGYNVLLFSTLDSIWCCILGCYPSEDYFLEKEGIFLLLDLLALNQKKFCNLILGIMVEFCDNPKTAAHVNAWQGKKDQTAASLLIKLWRKEEKELGVKRDKNGKIIDFENLPGLSAEDFVTLCIIHRYLDFKIGEIWNEIYEEIKLEKLRPVTTDKKALEAITTASENIGKMVASLQSDIIESQACQDMQNEQKVYAKIQATHKQRELANKSWEDFLARTSNAKTLKKAKSLQEKAIEASRYHKRPQNAIFHQTHIKGLNTTVPSGGVVTVESTPARLVGGPLVDTDIALKKLPIRGGALQRVKAVKIVDAPKKSIPT

SEQ ID NO: 17228 - protein, 229 aa, Homo sapiens
MWTEEAGATAEAQESGIRNKSSSSSQIPVVGVVTEDDEAQDVFKPMDLNRVIKLLEETDKDGLEEKQLKFVKKLVQCYQNGLPLRDLAQIFKILNLCSGKIKNQPRFIESAYDIIKLCGLPFLKKKVSDEITYAEDTANSIALLGDLMKIPSSELRIQICKCIVDFYHAEPPKKHIPGYQQASSSYKIQMAEVGGLAKTMVQSMTLLENQLVEKLWVLKVLQHLSTSGL

SEQ ID NO: 17229 - protein, 227 aa, Homo sapiens
MWTEEAGATAEAQESGIRNKSSSSSQIPVVGVVTEDDEAQDVFKPMDLNRVIKLLEETDKDGLEEKQLKFVKKLVQCYQNGLPLRDLAQIFKILNLCSGKIKNQPRFIESAYDIIKLLPFLKKKVSDEITYAEDTANSIALLGDLMKIPSSELRIQICKCIVDFYHAEPPKKHIPGYQQASSSYKIQMAEVGGLAKTMVQSMTLLENQLVEKLWVLKVLQHLSTSGL

SEQ ID NO: 17230 - protein, 923 aa, Homo sapiens
MWTEEAGATAEAQESGIRNKSSSSSQIPVVGVVTEDDEAQDVFKPMDLNRVIKLLEETDKDGLEEKQLKFVKKLVQCYQNGLPLRDLAQIFKILNLCSGKIKNQPRFIESAYDIIKLCGLPFLKKKVSDEITYAEDTANSIALLGDLMKIPSSELRIQICYQQASSSYKIQMAEVGGLAKTMVQSMTLLENQLVEKLWVLKVLQHLSTSEVNCTIMMKAQAASGICTHLNDPDPSGQLLFRSSEILWNLLEKSSKEEVIQQLSNLECLLALKEVFKNLFMRGFSHYDRQLRNDILVITTIIAQNPEAPMIECGFTKDLILFATFNEVKSQNLLVKGLKLSNSYEDFELKKLLFNVIVILCKDLPTVQLLIDGKVILALFTYVKKPEKQKIIDWSAAQHEELQLHAIATLSSVAPLLIEEYMSCQGNARVLAFLEWCESEDPFFSHGNSFHGTGGRGNKFAQMRYSLRLLRAVVYLEDETVNKDLCEKGTIQQMIGIFKNIISKPNEKEEAIVLEIQSDILLILSGLCENHIQRKEIFGTEGVDIVLHVMKTDPRKLQSGLGYNVLLFSTLDSIWCCILGCYPSEDYFLEKEGIFLLLDLLALNQKKFCNLILGIMVEFCDNPKTAAHVNAWQGKKDQTAASLLIKLWRKEEKELGVKRDKNGKIIDTKKPLFTSFQEEQKIIPLPANCPSIAVMDVSENIRAKIYAILGKLDFENLPGLSAEDFVTLCIIHRYLDFKIGEIWNEIYEEIKLEKLRPVTTDKKALEAITTASENIGKMVASLQSDIIESQACQDMQNEQKVYAKIQATHKQRELANKSWEDFLARTSNAKTLKKAKSLQEKAIEASRYHKRPQNAIFHQTHIKGLNTTVPSGGVVTVESTPARLVGGPLVDTDIALKKLPIRGGALQRVKAVKIVDAPKKSIPT

SEQ ID NO: 17231 - protein, 247 aa, Homo sapiens
MGTSSTDSQQAGHRRCSTSNTSAENLTCLSLPGSPGKTAPLPGPAQAGAGQPLPKGCAAVKAEVGIPAPHTSQEVRIHIRRLLSWAAPGACGLRSTPCALPQALPQARPCPGRWFFPGCSLPTGGAQTILSLWTWRHFLNWALQQREENSGRARRVPPVPRTAPVSKGEGSHPPQNSNGEKVKTITPDVGLHQSLTSDPTVAVLRAKRAPEAHPPRSCSGSLTARVCHMGVCQGQGDTEDGRMTLMG

SEQ ID NO: 17232 - protein, 272 aa, Homo sapiens; identical to SEQ ID NO: 11492

SEQ ID NO: 17233 - protein, 599 aa, Homo sapiens
MGPKRRQLTFREKSRIIQEVEENPDLRKGEIARRFNIPPSTLSTILKNKRAILASERKYGVASTCRKTNKLSPYDKLEGLLIAWFQQIRAAGLPVKGIILKEKALRIAEELGMDDFTASNGWLDRFRRRHGVVSCSGVARARARNAAPRTPAAPASPAAVPSEGSGGSTTGWRAREEQPPSVAEGYASQDVFSATETSLWYDFLPDQAAGLCGGDGRPRQATQRLSVLLCANADGSEKLPPLVAGKSAKPRAGQAGLPCDYTANSKGGVTTQALAKYLKALDTRMAAESRRVLLLAGRLAAQSLDTSGLRHVQLAFFPPGTVHPLERGVVQQVKGHYRQAMLLKAMAALEGQDPSGLQLGLTEALHFVAAAWQAVEPSDIAACFREAGFGGGPNATITTSLKSEGEEEEEEEEEEEEEEGEGEEEEEEGEEEEEEGGEGEELGEEEEVEEEGDVDSDEEEEEDEESSSEGLEAEDWAQGVVEAGGSFGAYGAQEEAQCPTLHFLEGGEDSDSDSEEEDDEEEDDEDEDDDDDEEDGDEVPVPSFGEAMAYFAMVKRYLTSFPIDDRVQSHILHLEHDLVHVTRKNHARQAGVRGLGHQS

SEQ ID NO: 17234 - protein, 247 aa, Homo sapiens
MEEQPQMQDADEPADSGGEGRAGGPPQVAGAQAACSEDRMTLLLRLRAQTKQQLLEYKSMVDASEEKTPEQIMQEKQIEAKIEDLENEIEEVKVAFEIKKLALDRMRLSTALKKNLEKISRQSSVLMDNMKHLLELNKLIMKSQQESWDLEEKLLDIRKKRLQLKQASESKLLEIQTEKNKQKIDLDSMENSERIKIIRQNLQMEIKITTVIQHVFQNLILGSKVNWAEDPALKEIVLQLEKNVDMM

SEQ ID NO: 17235 - protein, 269 aa, Homo sapiens
MIRTLLLSTLVAGALSCGVSTYAPDMSRMLGGEEARPNSWPWQVSLQYSSNGQWYHTCGGSLIANSWVLTAAHCISSSGIYRVMLGQHNLYVAESGSLAVSVSKIVVHKDWNSDQVSKGNDIALLKLANPVSLTDKIQLACLPPAGTILPNNYPCYVTGWGRLQTNGALPDDLKQGQLLVVDYATCSSSGWWGSTVKTNMICAGGDGVICTCNGDSGGPLNCQASDGRWEVHGIGSLTSVLGCNYYYKPSIFTRVSNYNDWINSVIANN

SEQ ID NO: 17236 - protein, 248 aa, Homo sapiens
MGPVRLGILLFLFLAVHEAWAGMLKEEDDDTERLPSKCEVCKLLSTELQAELSRTGRSREVLELGQVLDTGKRKRHVPYSVSETRLEEALENLCERILDYSVHAERKGSLRYAKGQSQTMATLKGLVQKGVKVDLGIPLELWDEPSVEVTYLKKQCETMLEEFEDIVGDWYFHHQEQPLQNFLCEGHVLPAAETACLQETWTGKEITDGEEKTEGEEEQEEEEEEEEEEGGDKMTKTGSHPKLDREDL

SEQ ID NO: 17237 - protein, 133 aa, Homo sapiens
MSTEGPSLASSPAISPLAFLSAPVTPGTLAEATDPLPMLIALACIFLLLATCLLFMTLCKPAALDPSRRRAHECMPHHPGSPSEPQLRLWKRLGSLRLSLHSFRHGRPTVPRQPLPGPEDNRSHCDYMESTKM

SEQ ID NO: 17238 - protein, 331 aa, Homo sapiens
MLSPERLALPDYEYLAQRHVLTYMEDAVCQLLENREDISQYGIARFFTEYFNSVCQGTHILFREFSFVQATPHNRVSFLRAFWRCFRTVGKNGDLLTMKEYHCLLQLLCPDFPLELTQKAARIVLMDDAMDCLMSFSDFLFAFQIQFYYSEFLDSVAAIYEDLLSGKNPNTVIVPTSSSGQHRQRPALGGAGTLEGVEASLFYQCLENLCDRHKYSCPPPALVKEALSNVQRLTFYGFLMALSKHRGINQALGALPDKGDLMHDPAMDEELERLLAQVPGLVNSVTASPEASCLPSRTPPRVGSPWRPLHHSRKVDGESDGSTEETDESET

SEQ ID NO: 17239 - protein, 337 aa, Homo sapiens
MLSPERLALPDYEYLAQRHVLTYMEDAVCQLLENREDISQYGIARFFTEYFNSVCQGTHILFREFSFVQATPHNRVSFLRAFWRCFRTVGKNGDLLTMKEYHCLLQLLCPDFPLELTQKAARIVLMDDAMDCLMSFSDFLFAFQIQFYYSEFLDSVAAIYEDLLSGKNPNTVIVPTSSSGQHRQRPALGGAGTLEGVEASLFYQCLENLCDRHKYSCPPPALVKEALSNVQRLTFYGFLMALSKHRGINQALGALPDKGDLMHDPAMDEELERLLLPFFRLAQVPGLVNSVTASPEASCLPSRTPPRVGSPWRPLHHSRKVDGESDGSTEETDESET

SEQ ID NO: 17240 - protein, 274 aa, Homo sapiens
MLSPERLALPDYEYLAQRHVLTYMEDAVCQLLENREDISQYGIARFFTEYFNSVCQGTHILFREFSFVQATPHNRVSFLRAFWRCFRTVGKNGDLLTMKEYHCLLQLLCPDFPLELTQKAARIVLMDDAMDCLMSFSDFLFAFQIQFYYSEFLDSVAAIYEDLLSGKNPNTVIVPTSSSGQHRQRPALGGAGTLEGVEASLFYQCLENLCDRHKYSCPPPALVKEALSNVQRLTFYGFLMALSKHRGINQALGALPDKGDLMHDPAMDEELERL

SEQ ID NO: 17241 - protein, 326 aa, Homo sapiens
MLSPERLALPDYEYLAQRHVLTYMEDAVCQLLENREDISQYGIARFFTEYFNSVCQGTHILFREFSFVQATPHNRVSFLRAFWRCFRTVGKNGDLLTMKEYHCLLQLLCPDFPLELTQKAARIVLMDDAMDCLMSFSDFLFAFQIQFYYSEFLDSVAAIYEDLLSGKNPNTVIVPTSSSGQHRQRPALGGAGTLEGVEASLFYQCLENLCDRHKYSCPPPALVKEALSNVQRLTFYGFLMALSKHRGINQALGALPDKGDLMHDPAMDEELERLVVRSKLHRTSRQHRAKEPGAFGFQRREKQEALERVSSASVPTPYHYRWEPRE

SEQ ID NO: 17242 - protein, 130 aa, Homo sapiens
MRMYSSDAHERPPSPSLGTTPPHPLPPTGSPRPRQDSAAGNSEEREPRGLRRASGVGSSCKRPTVCMGRQQGLPFCTVCGYRCSSPERTRGRCAVGKVRVAGGGGAPGGGAGMRCCGCRERNINKELELF

SEQ ID NO: 17243 - protein, 147 aa, Homo sapiens
MTEGLFISCSAVRVKPNRRAGLRRRSPAFLLSANQKTRLFALGSSPRCGPRANGEEASSCAWVSRAPRAACARAKPASRAPEGPVSRKTRGGEAALASARPATDCLRSGLAVERRRKPNSRPAPGVGSLPGSRPQDPQGAAGRRLSP

SEQ ID NO: 17244 - protein, 217 aa, Homo sapiens
MALVQALVPREREPKLSILQMDRGDPQHSSHWCPEREKVKLLTLKPRETSKNILINFYRAFNLDKDVFIHQANHPLTVPSSVVMGDNGHTLAEDDKRPCFRVLPCYLERVSSGISISWISAPLPVGAMKHQLLCDLMDLITLSFWLAGQCMSLKATNMQHCKCSIATSDWAIELDRTDYKTLPSEYSILALLQVFAGKNCMDRVLLHVDVNYLKSLP

SEQ ID NO: 17245 - protein, 123 aa, Homo sapiens
MGAPGGKINRPRTELKKKLFKRRRVLNRERRLRHRVVGAVIDQGLITRHHLKKRASSARANITLSGKKRRKLLQQIRLAQKEKTAMEVEAPSKPARTSEPQLKRQKKTKAPQDVEMKDLEDES

SEQ ID NO: 17246 - protein, 511 aa, Homo sapiens
MATVQEKAAALNLSALHSPAHRPPGFSVAQKPFGATYVWSSIINTLQTQVEVKKRRHRLKRHNDCFVGSEAVDVIFSHLIQNKYFGDVDIPRAKVVRVCQALMDYKVFEAVPTKVFGKDKKPTFEDSSCSLYRFTTIPNQDSQLGKENKLYSPARYADALFKSSDIRSASLEDLWENLSLKPANSPHVNISATLSPQVINEVWQEETIGRLLQLVDLPLLDSLLKQQEAVPKIPQPKRQSTMVNSSNYLDRGILKAYSDSQEDEWLSAAIDCLEYLPDQMVVEISRSFPEQPDRTDLVKELLFDAIGRYYSSREPLLNHLSDVHNGIAELLVNGKTEIALEATQLLLKLLDFQNREEFRRLLYFMAVAANPSEFKLQKESDNRMVVKRIFSKAIVDNKNLSKGKTDLLVLFLMDHQKDVFKIPGTLHKIVSVKLMAIQNGRDPNRDAGYIYCQRIDQRDYSNNTEKTTKDELLNLLKTLDEDSKLSAKEKKKLLGQFYKCHPDIFIEHFGD

SEQ ID NO: 17247 - protein, 502 aa, Homo sapiens
MRGLCEFYWQEFGIKGFSVAQKPFGATYVWSSIINTLQTQVEVKKRRHRLKRHNDCFVGSEAVDVIFSHLIQNKYFGDVDIPRAKVVRVCQALMDYKVFEAVPTKVFGKDKKPTFEDSSCSLYRFTTIPNQDSQLGKENKLYSPARYADALFKSSDIRSASLEDLWENLSLKPANSPHVNISATLSPQVINEVWQEETIGRLLQLVDLPLLDSLLKQQEAVPKIPQPKRQSTMVNSSNYLDRGILKAYSDSQEDEWLSAAIDCLEYLPDQMVVEISRSFPEQPDRTDLVKELLFDAIGRYYSSREPLLNHLSDVHNGIAELLVNGKTEIALEATQLLLKLLDFQNREEFRRLLYFMAVAANPSEFKLQKESDNRMVVKRIFSKAIVDNKNLSKGKTDLLVLFLMDHQKDVFKIPGTLHKIVSVKLMAIQNGRDPNRDAGYIYCQRIDQRDYSNNTEKTTKDELLNLLKTLDEDSKLSAKEKKKLLGQFYKCHPDIFIEHFGD

SEQ ID NO: 17248 - protein, 78 aa, Homo sapiens
MSEVLPYGDEKLSPYGDGGDVGQIFSCRLQDTNNFFGAGQNKRPPKLGQIGRSKRVVIEDDRIDDVLKNMTDKAPPGV

SEQ ID NO: 17249 - protein, 126 aa, Homo sapiens
MTGEEAVVVTAVVAPKAGREEEQPPPPAGLGCGARGEPGRGPLEHGQQWKKFLYCEPHKRIKEVLEEERHIKRDECHIKNPAAVALEGIWSIKRNLPVGGLKPGLPSRNSLLPQAKYYSRHGGLRR

SEQ ID NO: 17250 - protein, 200 aa, Homo sapiens
MAFTEHSPLTPHRRDLCSRSIWLARKIRSDLTALTESYVKHQGLNKNINLDSADGMPVASTDQWSELTEAERLQENLQAYRTFHVLLARLLEDQQVHFTPTEGDFHQAIHTLLLQVAAFAYQIEELMILLEYKIPRNEADGMPINVGDGGLFEKKLWGLKVLQELSQWTVRSIHDLRFISSHQTGIPARGSHYIANNKKM

SEQ ID NO: 17251 - protein, 919 aa, Homo sapiens
MASATAAAARRGLGRALPLFWRGYQTERGVYGYRPRKPESREPQGALERPPVDHGLARLVTVYCEHGHKAAKINPLFTGQALLENVPEIQALVQTLQGPFHTAGLLNMGKEEASLEEVLVYLNQIYCGQISIETSQLQSQDEKDWFAKRFEELQKETFTTEERKHLSKLMLESQEFDHFLATKFSTVKRYGGEGAESMMGFFHELLKMSAYSGITDVIIGMPHRGRLNLLTGLLQFPPELMFRKMRGLSEFPENFSATGDVLSHLTSSVDLYFGAHHPLHVTMLPNPSHLEAVNPVAVGKTRGRQQSRQDGDYSPDNSAQPGDRVICLQVHGDASFCGQGIVPETFTLSNLPHFRIGGSVHLIVNNQLGYTTPAERGRSSLYCSDIGKLVGCAIIHVNGDSPEEVVRATRLAFEYQRQFRKDVIIDLLCYRQWGHNELDEPFYTNPIMYKIIRARKSIPDTYAEHLIAGGLMTQEEVSEIKSSYYAKLNDHLNNMAHYRPPALNLQAHWQGLAQPEAQITTWSTGVPLDLLRFVGMKSVEVPRELQMHSHLLKTHVQSRMEKMMDGIKLDWATAEALALGSLLAQGFNVRLSGQDVGRGTFSQRHAIVVCQETDDTYIPLNHMDPNQKGFLEVSNSPLSEEAVLGFEYGMSIESPKLLPLWEAQFGDFFNGAQIIFDTFISGGEAKWLLQSGIVILLPHGYDGAGPDHSSCRIERFLQMCDSAEEGVDGDTVNMFVVHPTTPAQYFHLLRRQMVRNFRKPLIVASPKMLLRLPAAVSTLQEMAPGTTFNPVIGDSSVDPKKVKTLVFCSGKHFYSLVKQRESLGAKKHDFAIIRVEELCPFPLDSLQQEMSKYKHVKDHIWSQEEPQNMGPWSFVSPRFEKQLACKLRLVGRPPLPVPAVGIGTVHLHQHEDILAKTFA

SEQ ID NO: 17252 - protein, 1018 aa, Homo sapiens
MKMWLLVSHLVIISITTCLAEFTWYRRYGHGVSEEDKGFGPIFEEQPINTIYPEESLEGKVSLNCRARASPFPVYKWRMNNGDVDLTSDRYSMVGGNLVINNPDKQKDAGIYYCLASNNYGMVRSTEATLSFGYLDPFPPEERPEVRVKEGKGMVLLCDPPYHFPDDLSYRWLLNEFPVFITMDKRRFVSQTNGNLYIANVEASDKGNYSCFVSSPSITKSVFSKFIPLIPIPERTTKPYPADIVVQFKDVYALMGQNVTLECFALGNPVPDIRWRKVLEPMPSTAEISTSGAVLKIFNIQLEDEGIYECEAENIRGKDKHQARIYVQAFPEWVEHINDTEVDIGSDLYWPCVATGKPIPTIRWLKNGYAYHKGELRLYDVTFENAGMYQCIAENTYGAIYANAELKILALAPTFEMNPMKKKILAAKGGRVIIECKPKAAPKPKFSWSKGTEWLVNSSRILIWEDGSLEINNITRNDGGIYTCFAENNRGKANSTGTLVITDPTRIILAPINADITVGENATMQCAASFDPALDLTFVWSFNGYVIDFNKENIHYQRNFMLDSNGELLIRNAQLKHAGRYTCTAQTIVDNSSASADLVVRGPPGPPGGLRIEDIRATSVALTWSRGSDNHSPISKYTIQTKTILSDDWKDAKTDPPIIEGNMEAARAVDLIPWMEYEFRVVATNTLGRGEPSIPSNRIKTDGAAPNVAPSDVGGGGGRNRELTITWAPLSREYHYGNNFGYIVAFKPFDGEEWKKVTVTNPDTGRYVHKDETMSPSTAFQVKVKAFNNKGDGPYSLVAVINSAQDAPSEAPTEVGVKVLSSSEISVHWEHVLEKIVESYQIRYWAAHDKEEAANRVQVTSQEYSARLENLLPDTQYFIEVGACNSAGCGPPSDMIEAFTKKAPPSQPPRIISSVRSGSRYIITWDHVVALSNESTVTGYKVLYRPDGQHDGKLYSTHKHSIEVPIPRDGEYVVEVRAHSDGGDGVVSQVKISGAPTLSPSLLGLLLPAFGILVYLEF

SEQ ID NO: 17253 - protein, 1007 aa, Homo sapiens
MKMWLLVSHLVIISITTCLAVSEEDKGFGPIFEEQPINTIYPEESLEGKVSLNCRARASPFPVYKWRMNNGDVDLTSDRYSMVGGNLVINNPDKQKDAGIYYCLASNNYGMVRSTEATLSFGYLDPFPPEERPEVRVKEGKGMVLLCDPPYHFPDDLSYRWLLNEFPVFITMDKRRFVSQTNGNLYIANVEASDKGNYSCFVSSPSITKSVFSKFIPLIPIPERTTKPYPADIVVQFKDVYALMGQNVTLECFALGNPVPDIRWRKVLEPMPSTAEISTSGAVLKIFNIQLEDEGIYECEAENIRGKDKHQARIYVQAFPEWVEHINDTEVDIGSDLYWPCVATGKPIPTIRWLKNGYAYHKGELRLYDVTFENAGMYQCIAENTYGAIYANAELKILALAPTFEMNPMKKKILAAKGGRVIIECKPKAAPKPKFSWSKGTEWLVNSSRILIWEDGSLEINNITRNDGGIYTCFAENNRGKANSTGTLVITDPTRIILAPINADITVGENATMQCAASFDPALDLTFVWSFNGYVIDFNKENIHYQRNFMLDSNGELLIRNAQLKHAGRYTCTAQTIVDNSSASADLVVRGPPGPPGGLRIEDIRATSVALTWSRGSDNHSPISKYTIQTKTILSDDWKDAKTDPPIIEGNMEAARAVDLIPWMEYEFRVVATNTLGRGEPSIPSNRIKTDGAAPNVAPSDVGGGGGRNRELTITWAPLSREYHYGNNFGYIVAFKPFDGEEWKKVTVTNPDTGRYVHKDETMSPSTAFQVKVKAFNNKGDGPYSLVAVINSAQDAPSEAPTEVGVKVLSSSEISVHWEHVLEKIVESYQIRYWAAHDKEEAANRVQVTSQEYSARLENLLPDTQYFIEVGACNSAGCGPPSDMIEAFTKKAPPSQPPRIISSVRSGSRYIITWDHVVALSNESTVTGYKVLYRPDGQHDGKLYSTHKHSIEVPIPRDGEYVVEVRAHSDGGDGVVSQVKISGAPTLSPSLLGLLLPAFGILVYLEF

SEQ ID NO: 17254 - protein, 627 aa, Homo sapiens
MKMWLLVSHLVIISITTCLAEFTWYRRYGHGVSEEDKGFGPIFEEQPINTIYPEESLEGKVSLNCRARASPFPVYKWRMNNGDVDLTSDRYSMVGGNLVINNPDKQKDAGIYYCLASNNYGMVRSTEATLSFGYLDPFPPEERPEVRVKEGKGMVLLCDPPYHFPDDLSYRWLLNEFPVFITMDKRRFVSQTNGNLYIANVEASDKGNYSCFVSSPSITKSVFSKFIPLIPIPERTTKPYPADIVVQFKDVYALMGQNVTLECFALGNPVPDIRWRKVLEPMPSTAEISTSGAVLKIFNIQLEDEGIYECEAENIRGKDKHQARIYVQAFPEWVEHINDTEVDIGSDLYWPCVATGKPIPTIRWLKNGYAYHKGELRLYDVTFENAGMYQCIAENTYGAIYANAELKILALAPTFEMNPMKKKILAAKGGRVIIECKPKAAPKPKFSWSKGTEWLVNSSRILIWEDGSLEINNITRNDGGIYTCFAENNRGKANSTGTLVITDPTRIILAPINADITVGENATMQCAASFDPALDLTFVWSFNGYVIDFNKENIHYQRNFMLDSNGELLIRNAQLKHAGRYTCTAQTIVDNSSASADLVVRGKNRKGGEKNMVDSFLPVCASLPPTW

SEQ ID NO: 17255 - protein, 1040 aa, Homo sapiens
MGTATRRKPHLLLVAAVALVSSSAWSSALGSQTTFGPVFEDQPLSVLFPEESTEEQVLLACRARASPPATYRWKMNGTEMKLEPGSRHQLVGGNLVIMNPTKAQDAGVYQCLASNPVGTVVSREAILRFGFLQEFSKEERDPVKAHEGWGVMLPCNPPAHYPGLSYRWLLNEFPNFIPTDGRHFVSQTTGNLYIARTNASDLGNYSCLATSHMDFSTKSVFSKFAQLNLAAEDTRLFAPSIKARFPAETYALVGQQVTLECFAFGNPVPRIKWRKVDGSLSPQWTTAEPTLQIPSVSFEDEGTYECEAENSKGRDTVQGRIIVQAQPEWLKVISDTEADIGSNLRWGCAAAGKPRPTVRWLRNGEPLASQNRVEVLAGDLRFSKLSLEDSGMYQCVAENKHGTIYASAELAVQALAPDFRLNPVRRLIPAARGGEILIPCQPRAAPKAVVLWSKGTEILVNSSRVTVTPDGTLIIRNISRSDEGKYTCFAENFMGKANSTGILSVRDATKITLAPSSADINLGDNLTLQCHASHDPTMDLTFTWTLDDFPIDFDKPGGHYRRTNVKETIGDLTILNAQLRHGGKYTCMAQTVVDSASKEATVLVRGPPGPPGGVVVRDIGDTTIQLSWSRGFDNHSPIAKYTLQARTPPAGKWKQVRTNPANIEGNAETAQVLGLTPWMDYEFRVIASNILGTGEPSGPSSKIRTREAAPSVAPSGLSGGGGAPGELIVNWTPMSREYQNGDGFGYLLSFRRQGSTHWQTARVPGADAQYFVYSNESVRPYTPFEVKIRSYNRRGDGPESLTALVYSAEEEPRVAPTKVWAKGVSSSEMNVTWEPVQQDMNGILLGYEIRYWKAGDKEAAADRVRTAGLDTSARVSGLHPNTKYHVTVRAYNRAGTGPASPSANATTMKPPPRRPPGNISWTFSSSSLSIKWDPVVPFRNESAVTGYKMLYQNDLHLTPTLHLTGKNWIEIPVPEDIGHALVQIRTTGPGGDGIPAEVHIVRNGGTSMMVENMAVRPAPHPGTVISHSVAMLILIGSLEL

SEQ ID NO: 17256 - protein, 1041 aa, Homo sapiens
MATPAGLERWVQDELHSVLGLSERHVAQFLIGTAQRCTSAEEFVQRLRDTDTLDLSGPARDFALRLWNKVPRKAVVEKPARAAEREARALLEKNRSYRLLEDSEESSEETVSRAGSSLQKKRKKRKHLRKKREEEEEEEASEKGKKKTGGSKQQTEKPESEDEWERTERERLQDLEERDAFAERVRQRDKDRTRNVLERSDKKAYEEAQKRLKMAEEDRKAMVPELRKKSRREYLAKREREKLEDLEAELADEEFLFGDVELSRHERQELKYKRRVRDLAREYRAAGEQEKLEATNRYHMPKETRGQPARAVDLVEEESGAPGEEQRRWEEARLGAASLKFGARDAASQEPKYQLVLEEEETIEFVRATQLQGDEEPSAPPTSTQAQQKESIQAVRRSLPVFPFREELLAAIANHQVLIIEGETGSGKTTQIPQYLFEEGYTNKGMKIACTQPRRVAAMSVAARVAREMGVKLGNEVGYSIRFEDCTSERTVLRYMTDGMLLREFLSEPDLASYSVVMVDEAHERTLHTDILFGLIKDVARFRPELKVLVASATMDTARFSTFFDDAPVFRIPGRRFPVDIFYTKAPEADYLEACVVSVLQIHVTQPPGDILVFLTGQEEIEAACEMLQDRCRRLGSKIRELLVLPIYANLPSDMQARIFQPTPPGARKVVVATNIAETSLTIEGIIYVLDPGFCKQKSYNPRTGMESLTVTPCSKASANQRAGRAGRVAAGKCFRLYTAWAYQHELEETTVPEIQRTSLGNVVLLLKSLGIHDLMHFDFLDPPPYETLLLALEQLYALGALNHLGELTTSGRKMAELPVDPMLSKMILASEKYSCSEEILTVAAMLSVNNSIFYRPKDKVVHADNARVNFFLPGGDHLVLLNVYTQWAESGYSSQWCYENFVQFRSMRRARDVREQLEGLLERVEVGLSSCQGDYIRVRKAITAGYFYHTARLTRSGYRTVKQQQTVFIHPNSSLFEQQPRWLLYHELVLTTKEFMRQVLEIESSWLLEVAPHYYKAKELEDPHAKKMPKKIGKTREELG

SEQ ID NO: 17257 - protein, 506 aa, Homo sapiens
MEDHQHVPIDIQTSKLLDWLVDRRHCSLKWQSLVLTIREKINAAIQDMPESEEIAQLLSGSYIHYFHCLRILDLLKGTEASTKNIFGRYSSQRMKDWQEIIALYEKDNTYLVELSSLLVRNVNYEIPSLKKQIAKCQQLQQEYSRKEEECQAGAAEMREQFYHSCKQYGITGENVRGELLALVKDLPSQLAEIGAAAQQSLGEAIDVYQASVGFVCESPTEQVLPMLRFVQKRGNSTVYEWRTGTEPSVVERPHLEELPEQVAEDAIDWGDFGVEAVSEGTDSGISAEAAGIDWGIFPESDSKDPGGDGIDWGDDAVALQITVLEAGTQAPEGVARGPDALTLLEYTETRNQFLDELMELEIFLAQRAVELSEEADVLSVSQFQLAPAILQGQTKEKMVTMVSVLEDLIGKLTSLQLQHLFMILASPRYVDRVTEFLQQKLKQSQLLALKKELMVQKQQEALEEQAALEPKLDLLLEKTKELQKLIEADISKRYSGRPVNLMGTSL

SEQ ID NO: 17258 - protein, 419 aa, Homo sapiens
MCVHPGACLPHVGVSWAEFPGHFSVELSSLLVRNVNYEIPSLKKQIAKCQQLQQEYSRKEEECQAGAAEMREQFYHSCKQYGITGENVRGELLALVKDLPSQLAEIGAAAQQSLGEAIDVYQASVGFVCESPTEQVLPMLRFVQKRGNSTVYEWRTGTEPSVVERPHLEELPEQVAEDAIDWGDFGVEAVSEGTDSGISAEAAGIDWGIFPESDSKDPGGDGIDWGDDAVALQITVLEAGTQAPEGVARGPDALTLLEYTETRNQFLDELMELEIFLAQRAVELSEEADVLSVSQFQLAPAILQGQTKEKMVTMVSVLEDLIGKLTSLQLQHLFMILASPRYVDRVTEFLQQKLKQSQLLALKKELMVQKQQEALEEQAALEPKLDLLLEKTKELQKLIEADISKRYSGRPVNLMGTSL

SEQ ID NO: 17259 - protein, 281 aa, Homo sapiens
MLRFVQKRGNSTVYEWRTGTEPSVVERPHLEELPEQVAEDAIDWGDFGVEAVSEGTDSGISAEAAGIDWGIFPESDSKDPGGDGIDWGDDAVALQITVLEAGTQAPEGVARGPDALTLLEYTETRNQFLDELMELEIFLAQRAVELSEEADVLSVSQFQLAPAILQGQTKEKMVTMVSVLEDLIGKLTSLQLQHLFMILASPRYVDRVTEFLQQKLKQSQLLALKKELMVQKQQEALEEQAALEPKLDLLLEKTKELQKLIEADISKRYSGRPVNLMGTSL

SEQ ID NO: 17260 - protein, 531 aa, Homo sapiens
MRRQSMTSATRDLHTALDGKATQGGKKDHQHVPIDIQTSKLLDWLVDRRHCSLKWQSLVLTIREKINAAIQDMPESEEIAQLLSGSYIHYFHCLRILDLLKGTEASTKNIFGRYSSQRMKDWQEIIALYEKDNTYLVELSSLLVRNVNYEIPSLKKQIAKCQQLQQEYSRKEEECQAGAAEMREQFYHSCKQYGITGENVRGELLALVKDLPSQLAEIGAAAQQSLGEAIDVYQASVGFVCESPTEQVLPMLRFVQKRGNSTVYEWRTGTEPSVVERPHLEELPEQVAEDAIDWGDFGVEAVSEGTDSGISAEAAGIDWGIFPESDSKDPGGDGIDWGDDAVALQITVLEAGTQAPEGVARGPDALTLLEYTETRNQFLDELMELEIFLAQRAVELSEEADVLSVSQFQLAPAILQGQTKEKMVTMVSVLEDLIGKLTSLQLQHLFMILASPRYVDRVTEFLQQKLKQSQLLALKKELMVQKQQEALEEQAALEPKLDLLLEKTKELQKLIEADISKRYSGRPVNLMGTSL

SEQ ID NO: 17261 - protein, 903 aa, Homo sapiens
MATSADSPSSPLGAEDLLSDSSEPPGLNQVSSEVTSQLYASLRLSRQAEATARAQLYLPSTSPPHEGLDGFAQELSRSLSVGLEKNLKKKDGSKHIFEMESVRGQLQTMLQTSRDTAYRDPLIPGAGSERREEDSFDSDSTATLLNTRPLQDLSPSSSAQALEELFPRYTSLRPGPPLNPPDFQGLRDALDSEHTRRKHCERHIQSLQTRVLELQQQLAVAVAADRKKDTMIEQLDKTLARVVEGWNRHEAERTEVLRGLQEEHQAAELTRSKQQETVTRLEQSLSEAMEALNREQESARLQQRERETLEEERQALTLRLEAEQQRCCVLQEERDAARAGQLSEHRELETLRAALEEERQTWAQQEHQLKEHYQALQEESQAQLEREKEKSQREAQAAWETQHQLALVQSEVRRLEGELDTARRERDALQLEMSLVQARYESQRIQLESELAVQLEQRVTERLAQAQESSLRQAASLREHHRKQLQDLSGQHQQELASQLAQFKVEMAEREERQQQVAEDYELRLAREQARVCELQSGNQQLEEQRVELVERLQAMLQAHWDEANQLLSTTLPPPNPPAPPAGPSSPGPQEPEKEERRVWTMPPMAVALKPVLQQSREARDELPGAPPVLCSSSSDLSLLLGPSFQSQHSFQPLEPKPDLTSSTAGAFSALGAFHPDHRAERPFPEEDPGPDGEGLLKQGLPPAQLEGLKNFLHQLLETVPQNNENPSVDLLPPKSGPLTVPSWEEAPQVPRIPPPVHKTKVPLAMASSLFRVPEPPSSHSQGSGPSSGSPERGGDGLTFPRQLMEVSQLLRLYQARGWGALPAEDLLLYLKRLEHSGTDGRGDNVPRRNTDSRLGEIPRKEIPSQAVPRRLATAPKTEKPPARKKSGHPAPSSMRSRGGVWR

SEQ ID NO: 17262 - protein, 925 aa, Homo sapiens
MATSADSPSSPLGAEDLLSDSSEPPGLNQVSSEVTSQLYASLRLSRQAEATARAQLYLPSTSPPHEGLDGFAQELSRSLSVGLEKNLKKKDGSKHIFEMESVRGQLQTMLQTSRDTAYRDPLIPGAGSERREEDSFDSDSTATLLNTRPLQDLSPSSSAQALEELFPRYTSLRPGPPLNPPDFQGLRDALDSEHTRRKHCERHIQSLQTRVLELQQQLAVAVAADRKKDTMIEQLDKTLARVVEGWNRHEAERTEVLRGLQEEHQAAELTRSKQQETVTRLEQSLSEAMEALNREQESARLQQRERETLEEERQALTLRLEAEQQRCCVLQEERDAARAGQLSEHRELETLRAALEEERQTWAQQEHQLKEHYQALQEESQAQLEREKEKSQREAQAAWETQHQLALVQSEVRRLEGELDTARRERDALQLEMSLVQARYESQRIQLESELAVQLEQRVTERLAQAQESSLRQAASLREHHRKQLQDLSGQHQQELASQLAQFKVEMAEREERQQQVAEDYELRLAREQARVCELQSGNQQLEEQRVELVERLQAMLQAHWDEANQLLSTTLPPPNPPAPPAGPSSPGPQEPEKEERRVWTMPPMAVALKPVLQQSREARDELPGAPPVLCSSSSDLSLLLGPSFQSQHSFQPLEPKPDLTSSTAGAFSALGAFHPDHRAERPFPEEDPGPDGEGLLKQGLPPAQLEGLKNFLHQLLETVPQNNENPSVDLLPPKSGPLTVPSWEEAPQVPRIPPPVHKTKVPLAMASSLFRVPEPPSSHSQGSGPSSGSPERGGDGLTFPRQLMEVSQLLRLYQARGWGALPAEDLLLYLKRLEHSGYKPGRKEEGFSGWKLDYGEWSGTDGRGDNVPRRNTDSRLGEIPRKEIPSQAVPRRLATAPKTEKPPARKKSGHPAPSSMRSRGGVWR

SEQ ID NO: 17263 - protein, 904 aa, Homo sapiens
MATSADSPSSPLGAEDLLSDSSEPPGLNQVSSEVTSQLYASLRLSRQAEATARAQLYLPSTSPPHEGLDGFAQELSRSLSVGLEKNLKKKDGSKHIFEMESVRGQLQTMLQTSRDTAYRDPLIPGAGSERREEDSFDSDSTATLLNTRPLQDLSPSSSAQALEELFPRYTSLRPGPPLNPPDFQGLRDALDSEHTRRKHCERHIQSLQTRVLELQQQLAVAVAADRKKDTMIEQLDKTLARVVEGWNRHEAERTEVLRGLQEEHQAAELTRSKQQETVTRLEQSLSEAMEALNREQESARLQQRERETLEEERQALTLRLEAEQQRCCVLQEERDAARAGQLSEHRELETLRAALEEERQTWAQQEHQLKEHYQALQEESQAQLEREKEKSQREAQAAWETQHQLALVQSEVRRLEGELDTARRERDALQLEMSLVQARYESQRIQLESELAVQLEQRVTERLAQAQESSLRQAASLREHHRKQLQDLSGQHQQELASQLAQFKVEMAEREERQQQVAEDYELRLAREQARVCELQSGNQQLEEQRVELVERLQAMLQAHWDEANQLLSTTLPPPNPPAPPAGPSSPGPQEPEKEERRVWTMPPMAVALKPVLQQSREARDELPGAPPVLCSSSSDLSLLLGPSFQSQHSFQPLEPKPDLTSSTAGAFSALGAFHPDHRAERPFPEEDPGPDGEGLLKQGLPPAQLEGLKNFLHQLLETVPQNNENPSVDLLPPKSGPLTVPSWEEAPQVPRIPPPVHKTKVPLAMASSLFRVPEPPSSHSQGSGPSSGSPERGGDGLTFPRQLMEVSQLLRLYQARGWGALPAEDLLLYLKRLEHSGRTDGRGDNVPRRNTDSRLGEIPRKEIPSQAVPRRLATAPKTEKPPARKKSGHPAPSSMRSRGGVWR

SEQ ID NO: 17264 - protein, 554 aa, Homo sapiens
MATSADSPSSPLGAEDLLSDSSEPPGLNQVSSEVTSQLYASLRLSRQAEATARAQLYLPSTSPPHEGLDGFAQELSRSLSVGLEKNLKKKDGSKHIFEMESVRGQLQTMLQTSRDTAYRDPLIPGAGSERREEDSFDSDSTATLLNTRPLQDLSPSSSAQALEELFPRYTSLRPGPPLNPPDFQGLRDALDSEHTRRKHCERHIQSLQTRVLELQQQLAVAVAADRKKDTMIEQLDKTLARVVEGWNRHEAERTEVLRGLQEEHQAAELTRSKQQETVTRLEQSLSEAMEALNREQESARLQQRERETLEEERQALTLRLEAEQQRCCVLQEERDAARAGQLSEHRELETLRAALEEERQTWAQQEHQLKEHYQALQEESQAQLEREKEKSQREAQAAWETQHQLALVQSEVRRLEGELDTARRERDALQLEMSLVQARYESQRIQLESELAVQLEQRVTERLAQAQESSLRQAASLREHHRKQLQDLSGQHQQELASQLAQFKVEMAEREERQQQVAEDYELRLLLLDPPAPGLRSPRRRRGGSGLCLPWPWP

SEQ ID NO: 17265 - protein, 864 aa, Homo sapiens
MATSADSPSSPLGAEDLLSDSSEPPGLNQVSSEVTSQLYASLRLSRQAEATARAQLYLPSTSPPHEGLDGFAQELSRSLSVGLEKNLKKKDGSKHIFEMESVRGQLQTMLQTSRDTAYRDPLIPGAGSERREEDSFDSDSTATLLNTRPLQDLSPSSSAQALEELFPRYTSLRPGPPLNPPDFQGLRDALDSEHTRRKHCERHIQSLQTRVLELQQQLAVAVAADRKKDTMIEQLDKTLARVVEGWNRHEAERTEVLRGLQEEHQAAELTRSKQQETVTRLEQSLSEAMEALNREQESARLQQRERETLEEERQALTLRLEAEQQRCCVLQEERDAARAGQLSEHRELETLRAALEEERQTWAQQEHQLKEHYQALQEESQAQLEREKEKSQREAQAAWETQHQLALVQSEVRRLEGELDTARRERDALQLEMSLVQARYESQRIQLESELAVQLEQRVTERLAQAQESSLRQAASLREHHRKQLQDLSGQHQQELASQLAQFKVEMAEREERQQQVAEDYELRLAREQARVCELQSGNQQLEEQRVELVERLQAMLQAHWDEANQLLSTTLPPPNPPAPPAGPSSPGPQEPEKEERRVWTMPPMAVALKPVLQQSREARDELPGAPPVLCSSSSDLSLLLGPSFQSQHSFQPLEPKPDLTSSTAGAFSALGAFHPDHRAERPFPEEDPGPDGEGLLKQGLPPAQLEGLKNFLHQLLETVPQNNENPSVDLLPPKSGPLTVPSWEEAPQVPRIPPPVHKTKVPLAMASSLFRVPEPPSSHSQGSGPSSGSPERGGDGLTFPRQLMEVSQLLRLYQARGWGALPAEDLLLYLKRLEHSGYKPGRKEEGFSGWKLDYGEWSGCVLH

SEQ ID NO: 17266 - protein, 437 aa, Homo sapiens
MLQGPRALASAAGQTPKVVPAMSPTELWPSGLSSPQLCPATATYYTPLYPQTAPPAAAPGTCLDATPHGPEGQVVRCLPAGRLPAKRKLDLEGIGRPVVPEFPTPKGKCIRVDGLPSPKTPKSPGEKTRYDTSLGLLTKKFIYLLSESEDGVLDLNWAAEVLDVQKRRIYDITNVLEGIQLIRKKAKNNIQWVGRGMFEDPTRPGKQQQLGQELKELMNTEQALDQLIQSCSLSFKHLTEDKANKRLAYVTYQDIRAVGNFKEQTVIAVKAPPQTRLEVPDRTEDNLQIYLKSTQGPIEVYLCPEEVQEPDSPSEEPLPSTSTLCPSPDSAQPSSSTDPSIMEPTASSVPAPAPTPQQAPPPPSLVPLEATDSLLELPHPLLQQTEDQFLSPTLACSSPLISFSPSLDQDDYLWGLEAGEGISDLFDSYDLGDLLIN

SEQ ID NO: 17267 - protein, 465 aa, Homo sapiens
MRKGIQPALEQYLVTAGGGEGAAVVAAAAAASMDKRALLASPGFAAAAAAAAAPGAYIQILTTNTSTTSCSSSLQSGAVAAGPLLPSAPGAEQTAGSLLYTTPHGPSSRAGLLQQPPALGRGGSGGGGGPPAKRRLELGESGHQYLSDGLKTPKGKGRAALRSPDSPKTPKSPSEKTRYDTSLGLLTKKFIQLLSQSPDGVLDLNKAAEVLKVQKRRIYDITNVLEGIHLIKKKSKNNVQWMGCSLSEDGGMLAQCQGLSKEVTELSQEEKKLDELIQSCTLDLKLLTEDSENQRLAYVTYQDIRKISGLKDQTVIVVKAPPETRLEVPDSIESLQIHLASTQGPIEVYLCPEETETHSPMKTNNQDHNGNIPKPASKDLASTNSGHSDCSVSMGNLSPLASPANLLQQTEDQIPSNLEGPFVNLLPPLLQEDYLLSLGEEEGISDLFDAYDLEKLPLVEDFMCS

SEQ ID NO: 17268 - protein, 334 aa, Homo sapiens
MPLQQQAKRRLELGESGHQYLSDGLKTPKGKGRAALRSPDSPKKKTRYDTSLGLLTKKFIQLLSQSPDGVLDLNKAAEVLKVQKRRIYDITNVLEGIHLIKKKSKNNVQWMGCSLSEDGGMLAQCQGLSKEVTELSQEEKKLDELIQSCTLDLKLLTEDSENQRLAYVTYQDIRKISGLKDQTVIVVKAPPETRLEVPDSIESLQIHLASTQGPIEVYLCPEETETHSPMKTNNQDHNGNIPKPASKDLASTNSGHSDCSVSMGNLSPLASPANLLQQTEDQIPSNLEGPFVNLLPPLLQEDYLLSLGEEEGISDLFDAYDLEKLPLVEDFMCS

SEQ ID NO: 17269 - protein, 205 aa, Homo sapiens
MGTAGAMQLCWVILGFLLFRGHNSQPTMTQTSSSQGGLGGLSLTTEPVSSNPGYIPSSEANRPSHLSSTGTPGAGVPSSGRDGGTSRDTFQTVPPNSTTMSLSMREDATILPSPTSETVLTVAAFGVISFIVILVVVVIILVGVVSLRFKCRKSKESEDPQKPGSSGLSESCSTANGEKDSITLISMKNINMNNGKQSLSAEKVL

SEQ ID NO: 17270 - protein, 413 aa, Homo sapiens
MAEAGPQAPPPPGTPSRHEKSLGLLTTKFVSLLQEAKDGVLDLKLAADTLAVRQKRRIYDITNVLEGIGLIEKKSKNSIQWKGVGPGCNTREIADKLIELKAEIEELQQREQELDQHKVWVQQSIRNVTEDVQNSCLAYVTHEDICRCFAGDTLLAIRAPSGTSLEVPIPEGLNGQKKYQIHLKSVSGPIEVLLVNKEAWSSPPVAVPVPPPEDLLQSPSAVSTPPPLPKPALAQSQEASRPNSPQLTPTAVPGSAEVQGMAGPAAEITVSGGPGTDSKDSGELSSLPLGPTTLDTRPLQSSALLDSSSSSSSSSSSSSNSNSSSSSGPNPSTSFEPIKADPTGVLELPKELSEIFDPTRECMSSELLEELMSSEVFAPLLRLSPPPGDHDYIYNLDESEGVCDLFDVPVLNL

SEQ ID NO: 17271 - protein, 431 aa, Homo sapiens
MSWVQATLLARGLCRAWGGTCGAALTGTSISQVPRRLPRGLHCSAAAHSSEQSLVPSPPEPRQRPTKALVPFEDLFGQAPGGERDKASFLQTVQKFAEHSVRKRGHIDFIYLALRKMREYGVERDLAVYNQLLNIFPKEVFRPRNIIQRIFVHYPRQQECGIAVLEQMENHGVMPNKETEFLLIQIFGRKSYPMLKLVRLKLWFPRFMNVNPFPVPRDLPQDPVELAMFGLRHMEPDLSARVTIYQVPLPKDSTGAADPPQPHIVGIQSPDQQAALARHNPARPVFVEGPFSLWLRNKCVYYHILRADLLPPEEREVEETPEEWNLYYPMQLDLEYVRSGWDNYEFDINEVEEGPVFAMCMAGAHDQATMAKWIQGLQETNPTLAQIPVVFRLAGSTRELQTSSAGLEEPPLPEDHQEEDDNLQRQQQGQS

SEQ ID NO: 17272 - protein, 296 aa, Homo sapiens
MSWVQATLLARGLCRAWGGTCGAALTGTSISQVPRRLPRGLHCSAAAHSSEQSLVPSPPEPRQRPTKALVPFEDLFGQAPGGERDKASFLQTVQKFAEHSVRKRGHIDFIYLALRKMREYGVERDLAVYNQLLNIFPKEVFRPRNIIQRIFVHYPRQQECGIAVLEQMENHGVMPNKETEFLLIQIFGRKSYPMLKLVRLKLWFPRFMNVNPFPVPRDLPQDPVELAMFGLRHMEPDLSARVTIYQVPLPKDSTGAADPPQPHIVGSGRDAGGVEPLLPDAAGPGVCEEWLGQLRV

SEQ ID NO: 17273 - protein, 217 aa, Homo sapiens
MSWVQATLLARGLCRAWGGTCGAALTGTSISQVPLPKDSTGAADPPQPHIVGIQSPDQQAALARHNPARPVFVEGPFSLWLRNKCVYYHILRADLLPPEEREVEETPEEWNLYYPMQLDLEYVRSGWDNYEFDINEVEEGPVFAMCMAGAHDQATMAKWIQGLQETNPTLAQIPVVFRLAGSTRELQTSSAGLEEPPLPEDHQEEDDNLQRQQQGQS

SEQ ID NO: 17274 - protein, 296 aa, Homo sapiens
MSWVQATLLARGLCRAWGGTCGAALTGTSISQVPRRLPRGLHCSAAAHSSEQSLVPSPPEPRQRPTKALVPFEDLFGQAPGGERDKASFLQTVQKFAEHSVRKRGHIDFIYLALRKMREYGVERDLAVYNQLLNIFPKEVFRPRNIIQRIFVHYPRQQECGIAVLEQMENHGVMPNKETEFLLIQIFGRKSYPMLKLVRLKLWFPRFMNVNPFPVPRDLPQDPVELAMFGLRHMEPDLSARVTIYQVPLPKDSTGAADPPQPHIVELTCCPRRRGKWKRRRRSGTSTTRCSWTWSM

SEQ ID NO: 17275 - protein, 346 aa, Homo sapiens
MAAAEPASSGQQAPAGQGQGQRPPPQPPQAQAPQPPPPPQLGGAGGGSSRHEKSLGLLTTKFVSLLQEAKDGVLDLKAAADTLAVRQKRRIYDITNVLEGIDLIEKKSKNSIQWKGVGAGCNTKEVIDRLRYLKAEIEDLELKERELDQQKLWLQQSIKNVMDDSINNRFSYVTHEDICNCFNGDTLLAIQAPSGTQLEVPIPEMGQNGQKKYQINLKSHSGPIHVLLINKESSSSKPVVFPVPPPDDLTQPSSQSLTPVTPQKSSMATQNLPEQHVSERSQALQQTSATDISSAGSISGDIIDELMSSDVFPLLRLSPTPADDYNFNLDDNEGVCDLFDVQILNY

SEQ ID NO: 17276 - protein, 345 aa, Homo sapiens
MAAAEPASSGQQAPAGQGQGQRPPPQPPQAQAPQPPPPPQLGGAGGGSSRHEKSLGLLTTKFVSLLQEAKDGVLDLKAAADTLAVRQKRRIYDITNVLEGIDLIEKKSKNSIQWKGVGAGCNTKEVIDRLRYLKAEIEDLELKERELDQQKLWLQQSIKNVMDDSINNRFSYVTHEDICNCFNGDTLLAIQAPSGTQLEVPIPEMGQNGQKKYQINLKSHSGPIHVLLINKESSSSKPVVFPVPPPDDLTQPSSQSLTPVTPQKSSMATQNLPEQHVSERSQALQQTSATDISSGSISGDIIDELMSSDVFPLLRLSPTPADDYNFNLDDNEGVCDLFDVQILNY

SEQ ID NO: 17277 - protein, 185 aa, Homo sapiens
MDDSINNRFSYVTHEDICNCFNGDTLLAIQAPSGTQLEVPIPEMGQNGQKKYQINLKSHSGPIHVLLINKESSSSKPVVFPVPPPDDLTQPSSQSLTPVTPQKSSMATQNLPEQHVSERSQALQQTSATDISSAGSISGDIIDELMSSDVFPLLRLSPTPADDYNFNLDDNEGVCDLFDVQILNY

SEQ ID NO: 17278 - protein, 281 aa, Homo sapiens
MSQQRPARKLPSLLLDPTEETVRRRCRDPINVEGLLPSKIRINLEDNVQYVSMRKALKVKRPRFDVSLVYLTRKFMDLVRSAPGGILDLNKVATKLGVRKRRVYDITNVLDGIDLVEKKSKNHIRWIGSDLSNFGAVPQQKKLQEELSDLSAMEDALDELIKDCAQQLFELTDDKENERLAYVTYQDIHSIQAFHEQIVIAVKAPAETRLDVPAPREDSITVHIRSTNGPIDVYLCEVEQGQTSNKRSEGVGTSSSESTHPEGPEEEENPQQSEELLEVSN

SEQ ID NO: 17279 - protein, 206 aa, Homo sapiens
MDLVRSAPGGILDLNKVATKLGVRKRRVYDITNVLDGIDLVEKKSKNHIRWIGSDLSNFGAVPQQKKLQEELSDLSAMEDALDELIKDCAQQLFELTDDKENERLAYVTYQDIHSIQAFHEQIVIAVKAPAETRLDVPAPREDSITVHIRSTNGPIDVYLCEVEQGQTSNKRSEGVGTSSSESTHPEGPEEEENPQQSEELLEVSN

SEQ ID NO: 17280 - protein, 249 aa, Homo sapiens
MNPSPSKIRINLEDNVQYVSMRKALKVKRPRFDVSLVYLTRKFMDLVRSAPGGILDLNKVATKLGVRKRRVYDITNVLDGIDLVEKKSKNHIRWIGSDLSNFGAVPQQKKLQEELSDLSAMEDALDELIKDCAQQLFELTDDKENERLAYVTYQDIHSIQAFHEQIVIAVKAPAETRLDVPAPREDSITVHIRSTNGPIDVYLCEVEQGQTSNKRSEGVGTSSSESTHPEGPEEEENPQQSEELLEVSN

SEQ ID NO: 17281 - protein, 904 aa, Homo sapiens
MESFHTRFSAWTPFSNKSLNRQLFQERVALISHWFDLWTNKQRQEFLFAIFLRCTKSQLRFVQDWFSERMQVAKVDFSTVLPRFISLYIFSFLSPKDLCAAAQVSWPWKFLTEQDCLWMPKCVKFGWFLPYTPTDNEYGAWKRHYIACVSHLDWLTPREAAATYGTLNEPKTEDEELLERQREKCLRKRIWEKIALRKKELFKVRPPWVSGTCCSSVLKPRCQPRLSQTVRERVGLHEALEKQLVLTSLETLPKRSNISGSHSYPLLSKKNWHGVHKNDDRSSYALRPHFMLISSRIPAYEMVMESVKAGVVSVVYEHSVTLESLLYLIEKALDGQKAQSIGIFSDGDSREINLLQGYKIGVKNLLRPEVRDFWEKLGSYVATEEEGGHVDFFVPLGASEAGIEVLSQLSQLTGTFFTAPTGIATGSYQHILSDWLGSQWGKAPSSIYFCESKLQTWSSFTDFLEETLKTVRKQLYPFFKELQKSISGRMIGQFMFDTMGMTNILNNQDTAQALADGLMELSKEDSERNVVEDNSWDTKSRLSKNDLNFEALINLERILQKDSAEKRARVVRELLQSERKYVQILEIVRDVYVAPLKAALSSNRAILSAANIQIIFCDILQILSLNRQFLDNLRDRLQEWGPAHCVGEIVTKFGSQLNTYTNFFNNYPVILKTIEKCREMIPAFRTFLKRHDKTIVTKMLSLPELLLYPSRRFEEYLNLLYAVRLHTPAEHVDRGDLTTAIDQIKKYKGYIDQMKQNITMKDHLSDIQRIIWGCPTLSEVNRYLIRVQDVAQLHCCDEEISFSLRLYEHIHDLSLFLFNDALLVSSRGTSHTPFERTSKTTYQFIASVALHRLLIENIPDSKYVKNAFILQGPKYKWICATEIEDDKFLWLSVLRNAIKSSMEK

SEQ ID NO: 17282 - protein, 911 aa, Homo sapiens
MEVNCLTLKDLISPRQPRLDFAVEDGENAQKENIFVDRSRMAPKTPIKNEPIDLSKQKKFTPERNPITPVKFVDRQQAEPWTPTANLKMLISAASPDIRDREKKKGLFRPIENKDDAFTDSLQLDVVGDSAVDEFEKQRPSRKQKSLGLLCQKFLARYPSYPLSTEKTTISLDEVAVSLGVERRRIYDIVNVLESLHLVSRVAKNQYGWHGRHSLPKTLRNLQRLGEEQKYEEQMAYLQQKELDLIDYKFGERKKDGDPDSQEQQLLDFSEPDCPSSSANSRKDKSLRIMSQKFVMLFLVSKTKIVTLDVAAKILIEESQDAPDHSKFKTKVRRLYDIANVLTSLALIKKVHVTEERGRKPAFKWIGPVDFSSSDEELVDVSASVLPELKRETYGQIQVCAKQKLARHGSFNTVQASERIQRKVNSEPSSPYREEQGSGGYSLEIGSLAAVYRQKIEDNSQGKAFASKRVVPPSSSLDPVAPFPVLSVDPEYCVNPLAHPVFSVAQTDLQAFSMQNGLNGQVDVSLASAASAVESLKPALLAGQPLVYVPSASLFMLYGSLQEGPASGSGSERDDRSSEAPATVELSSAPSAQKRLCEERKPQEEDEPATKRQSREYEDGPLSLVMPKKPSDSTDLASPKTMGNRASIPLKDIHVNGQLPAAEEISGKATANSLVSSEWGNPSRNTDVEKPSKENESTKEPSLLQYLCVQSPAGLNGFNVLLSGSQTPPTVGPSSGQLPSFSVPCMVLPSPPLGPFPVLYSPAMPGPVSSTLGALPNTGPVNFSLPGLGSIAQLLVGPTAVVNPKSSTLPSADPQLQSQPSLNLSPVMSRSHSVVQQPESPVYVGHPVSVVKLHQSPVPVTPKSIQRTHRETFFKTPGSLGDPVLKRRERNQSRNTSSAQRRLEIPSGGAD

SEQ ID NO: 17283 - protein, 728 aa, Homo sapiens
MEVNCLTLKDLISPRQPRLDFAVEDGENAQKENIFVDRSRMAPKTPIKNEPIDLSKQKKFTPERNPITPVKFVDRQQAEPWTPTANLKMLISAASPDIRDREKKKGLFRPIENKDDAFTDSLQLDVVGDSAVDEFEKQRPSRKQKSLGLLCQKFLARYPSYPLSTEKTTISLDEVAVSLGVERRRIYDIVNVLESLHLVSRVAKNQYGWHGRHSLPKTLRNLQRLGEEQKYEEQMAYLQQKELDLIDYKFGERKKDGDPDSQEQQLLDFSEPDCPSSSANSRKDKSLRIMSQKFVMLFLVSKTKIVTLDVAAKILIEESQDAPDHSKFKTKVRRLYDIANVLTSLALIKKVHVTEERGRKPAFKWIGPVDFSSSDEELVDVSASVLPELKRETYGQIQVCAKQKLARHGSFNTVQASERIQRKVNSEPSSPYREEQGSGGYSLEIGSLAAVYRQKIEDNSQGKAFASKRVVPPSSSLDPVAPFPVLSVDPEYCVNPLAHPVFSVAQTDLQAFSMQNGLNGQVDVSLASAASAVESLKPALLAGQPLVYVPSASLFMLYGSLQEGPASGSGSERDDRSSEAPATVELSSAPSAQKRLCEERKPQEEDEPATKRQSREYEDGPLSLVMPKKPSDSTDLASPKTMGNRASIPLKDIHVNGQLPAAEEISGKATANSLVSSEWGNPSRNTDVEKPSKENESTKEPSLLQYLCVQSPAVTSSSDPQEHPTHTS

SEQ ID NO: 17284 - protein, 895 aa, Homo sapiens
MEVNCLTLKDLISPRQPRLDFAVEDGENAQKENIFVDRSRMAPKTPIKNEPIDLSKQKKFTPERNPITPVKFVDRQQAEPWTPTANLKMLISAASPDIRDREKKKGLFRPIENKDDAFTDSLQLDVVGDSAVDEFEKQRPSRKQKSLGLLCQKFLARYPSYPLSTEKTTISLDEVAVSLGVERRRIYDIVNVLESLHLVSRVAKNQYGWHGRHSLPKTLRNLQRLGEEQKYEEQMAYLQQKELDLIDYKFGERKKDGDPDSQEQQLLDFSEPDCPSSSANSRKDKSLRIMSQKFVMLFLVSKTKIVTLDVAAKILIEESQDAPDHSKFKTKVRRLYDIANVLTSLALIKKVHVTEERGRKPAFKWIGPVDFSSSDEELVDVSASVLPELKRETYGQIQVCAKQKLARHGSFNTVQASERIQRKVNSEPSSPYREEQGSGGYSLEIGSLAAVYRQKIEDNSQGKAFASKRVVPPSSSLDPVAPFPVLSVDPEYCVNPLAHPVFSVAQTDLQAFSMQNGLNGQVDVSLASAASAVESLKPALLAGQPLVYVPSASLFMLYGSLQEGPASGSGSERDDRSSEAPATVELSSAPSAQKRLCEERKPQEEDEPATKRQSREYEDGPLSLVMPKKPSDSTDLASPKTMGNRASIPLKDIHVNGQLPAAEEISGKATANSLVSSEWGNPSRNTDVEKPSKENESTKEPSLLQYLCVQSPAGLNGFNVLLSGSQTPPTVGPSSGQLPSFSVPCMVLPSPPLGPFPVLYSPAMPGPVSSTLGSIAQLLVGPTAVVNPKSSTLPSADPQLQSQPSLNLSPVMSRSHSVVQQPESPVYVGHPVSVVKLHQSPVPVTPKSIQRTHRETFFKTPGSLGDPVLKRRERNQSRNTSSAQRRLEIPSGGAD

SEQ ID NO: 17285 - protein, 914 aa, Homo sapiens
MAENSVLTSTTGRTSLADSSIFDSKVTEISKENLLIGSTSYVEEEMPQIETRVILVQEAGKQEELIKALKTIKIMEVPVIKIKESCPGKSDEKLIKSVINMDIKVGFVKMESVEEFEGLDSPEFENVFVVTDFQDSVFNDLYKADCRVIGPPVVLNCSQKGEPLPFSCRPLYCTSMMNLVLCFTGFRKKEELVRLVTLVHHMGGVIRKDFNSKVTHLVANCTQGEKFRVAVSLGTPIMKPEWIYKAWERRNEQDFYAAVDDFRNEFKVPPFQDCILSFLGFSDEEKTNMEEMTEMQGGKYLPLGDERCTHLVVEENIVKDLPFEPSKKLYVVKQEWFWGSIQMDARAGETMYLYEKANTPELKKSVSMLSLNTPNSNRKRRRLKETLAQLSRETDVSPFPPRKRPSAEHSLSIGSLLDISNTPESSINYGDTPKSCTKSSKSSTPVPSKQSARWQVAKELYQTESNYVNILATIIQLFQVPLEEEGQRGGPILAPEEIKTIFGSIPDIFDVHTKIKDDLEDLIVNWDESKSIGDIFLKYSKDLVKTYPPFVNFFEMSKETIIKCEKQKPRFHAFLKINQAKPECGRQSLVELLIRPVQRLPSVALLLNDLKKHTADENPDKSTLEKAIGSLKEVMTHINEDKRKTEAQKQIFDVVYEVDGCPANLLSSHRSLVQRVETISLGEHPCDRGEQVTLFLFNDCLEIARKRHKVIGTFRSPHGQTRPPASLKHIHLMPLSQIKKVLDIRETEDCHNAFALLVRPPTEQANVLLSFQMTSDELPKENWLKMLCRHVANTICKADAENLIYTADPESFEVNTKDMDSTLSRASRAIKKTSKKVTRAFSFSKTPKRALRRALMTSHGSVEGRSPSSNDKHVMSRLSSTSSLAGIPSPSLVSLPSFFERRSHTLSRSTTHLI

SEQ ID NO: 17286 - protein, 882 aa, Homo sapiens
MAENSVLTSTTGRTSLADSSIFDSKVTEISKENLLIGSTSYVEEMPQIETRVILVQEAGKQEELIKALKDIKVGFVKMESVEEFEGLDSPEFENVFVVTDFQDSVFNDLYKADCRVIGPPVVLNCSQKGEPLPFSCRPLYCTSMMNLVLCFTGFRKKEELVRLVTLVHHMGGVIRKDFNSKVTHLVANCTQGEKFRVAVSLGTPIMKPEWIYKAWERRNEQDFYAAVDDFRNEFKVPPFQDCILSFLGFSDEEKTNMEEMTEMQGGKYLPLGDERCTHLVVEENIVKDLPFEPSKKLYVVKQEWFWGSIQMDARAGETMYLYEKANTPELKKSVSMLSLNTPNSNRKRRRLKETLAQLSRETDVSPFPPRKRPSAEHSLSIGSLLDISNTPESSINYGDTPKSCTKSSKSSTPVPSKQSARWQVAKELYQTESNYVNILATIIQLFQVPLEEEGQRGGPILAPEEIKTIFGSIPDIFDVHTKIKDDLEDLIVNWDESKSIGDIFLKYSKDLVKTYPPFVNFFEMSKETIIKCEKQKPRFHAFLKINQAKPECGRQSLVELLIRPVQRLPSVALLLNDLKKHTADENPDKSTLEKAIGSLKEVMTHINEDKRKTEAQKQIFDVVYEVDGCPANLLSSHRSLVQRVETISLGEHPCDRGEQVTLFLFNDCLEIARKRHKVIGTFRSPHGQTRPPASLKHIHLMPLSQIKKVLDIRETEDCHNAFALLVRPPTEQANVLLSFQMTSDELPKENWLKMLCRHVANTICKADAENLIYTADPESFEVNTKDMDSTLSRASRAIKKTSKKVTRAFSFSKTPKRALRRALMTSHGSVEGRSPSSNDKHVMSRLSSTSSLAGIPSPSLVSLPSFFERRSHTLSRSTTHLI

SEQ ID NO: 17287 - protein, 958 aa, Homo sapiens
MAENSVLTSTTGRTSLADSSIFDSKVTEISKENLLIGSTSYVEEEMPQIETRVILVQEAGKQEELIKALKTIKIMEVPVIKIKESCPGKSDEKLIKSVINMDIKVGFVKMESVEEFEGLDSPEFENVFVVTDFQDSVFNDLYKADCRVIGPPVVLNCSQKGEPLPFSCRPLYCTSMMNLVLCFTGFRKKEELVRLVTLVHHMGGVIRKDFNSKVTHLVANCTQGEKFRVAVSLGTPIMKPEWIYKAWERRNEQDFYAAVDDFRNEFKVPPFQDCILSFLGFSDEEKTNMEEMTEMQGGKYLPLGDERCTHLVVEENIVKDLPFEPSKKLYVVKQEWFWGSIQMDARAGETMYLYEKANTPELKKSVSMLSLNTPNSNRKRRRLKETLAQLSRETDVSPFPPRKRPSAEHSLSIGSLLDISNTPESSINYGDTPKSCTKSSKSSTPVPSKQSARWQVAKELYQTESNYVNILATIIQLFQVPLEEEGQRGGPILAPEEIKTIFGSIPDIFDVHTKIKDDLEDLIVNWDESKSIGDIFLKYSKDLVKTYPPFVNFFEMSKETIIKCEKQKPRFHAFLKINQAKPECGRQSLVELLIRPVQRLPSVALLLNDLKKHTADENPDKSTLEKAIGSLKEVMTHINEDKRKTEAQKQIFDVVYEVDGCPANLLSSHRSLVQRVETISLGEHPCDRGEQVTLFLFNDCLEIARKRHKVIGTFRSPHGQTRPPASLKHIHLMPLSQIKKVLDIRETEDCHNAFALLVRPPTEQANVLLSFQMTSDELPKENWLKMLCRHVANTICKADAENLIYTADPESFEVNTKDMDSTLSRASRAIKKTSKKVTRAFSFSKTPKRALRRALMTSHGSVEGRSPSSNDKHVMSRLSSTSSLAITHSVSTSNVIGFTKHVYVQRLNSTGGRSQYSWFQSVRHSAFRASFSEILEGNTDFSNFKKVLSKSSLTFVKN

SEQ ID NO: 17288 - protein, 883 aa, Homo sapiens
MAENSVLTSTTGRTSLADSSIFDSKVTEISKENLLIGSTSYVEEEMPQIETRVILVQEAGKQEELIKALKDIKVGFVKMESVEEFEGLDSPEFENVFVVTDFQDSVFNDLYKADCRVIGPPVVLNCSQKGEPLPFSCRPLYCTSMMNLVLCFTGFRKKEELVRLVTLVHHMGGVIRKDFNSKVTHLVANCTQGEKFRVAVSLGTPIMKPEWIYKAWERRNEQDFYAAVDDFRNEFKVPPFQDCILSFLGFSDEEKTNMEEMTEMQGGKYLPLGDERCTHLVVEENIVKDLPFEPSKKLYVVKQEWFWGSIQMDARAGETMYLYEKANTPELKKSVSMLSLNTPNSNRKRRRLKETLAQLSRETDVSPFPPRKRPSAEHSLSIGSLLDISNTPESSINYGDTPKSCTKSSKSSTPVPSKQSARWQVAKELYQTESNYVNILATIIQLFQVPLEEEGQRGGPILAPEEIKTIFGSIPDIFDVHTKIKDDLEDLIVNWDESKSIGDIFLKYSKDLVKTYPPFVNFFEMSKETIIKCEKQKPRFHAFLKINQAKPECGRQSLVELLIRPVQRLPSVALLLNDLKKHTADENPDKSTLEKAIGSLKEVMTHINEDKRKTEAQKQIFDVVYEVDGCPANLLSSHRSLVQRVETISLGEHPCDRGEQVTLFLFNDCLEIARKRHKVIGTFRSPHGQTRPPASLKHIHLMPLSQIKKVLDIRETEDCHNAFALLVRPPTEQANVLLSFQMTSDELPKENWLKMLCRHVANTICKADAENLIYTADPESFEVNTKDMDSTLSRASRAIKKTSKKVTRAFSFSKTPKRALRRALMTSHGSVEGRSPSSNDKHVMSRLSSTSSLAGIPSPSLVSLPSFFERRSHTLSRSTTHLI

SEQ ID NO: 17289 - protein, 867 aa, Homo sapiens
MENEKENLFCEPHKRGLMKTPLKESTTANIVLAEIQPDFGPLTTPTKPKEGSQGEPWTPTANLKMLISAVSPEIRNRDQKRGLFDNRSGLPEAKDCIHEHLSGDEFEKSQPSRKEKSLGLLCHKFLARYPNYPNPAVNNDICLDEVAEELNVERRRIYDIVNVLESLHMVSRLAKNRYTWHGRHNLNKTLGTLKSIGEENKYAEQIMMIKKKEYEQEFDFIKSYSIEDHIIKSNTGPNGHPDMCFVELPGVEFRAASVNSRKDKSLRVMSQKFVMLFLVSTPQIVSLEVAAKILIGEDHVEDLDKSKFKTKIRRLYDIANVLSSLDLIKKVHVTEERGRKPAFKWTGPEISPNTSGSSPVIHFTPSDLEVRRSSKENCAKNLFSTRGKPNFTRHPSLIKLVKSIESDRRKINSAPSSPIKTNKAESSQNSAPFPSKMAQLAAICKMQLEEQSSESRQKVKVQLARSGPCKPVAPLDPPVNAEMELTAPSLIQPLGMVPLIPSPLSSAVPLILPQAPSGPSYAIYLQPTQAHQSVTPPQGLSPTVCTTHSSKATGSKDSTDATTEKAANDTSKASASTRPGSLLPAPERQGAKSRTREPAGERGSKRASMLEDSGSKKKFKEDLKGLENVSATLFPSGYLIPLTQCSSLGAESILSGKENSSALSPNHRIYSSPIAGVIPVTSSELTAVNFPSFHVTPLKLMVSPTSVAAVPVGNSPALASSHPVPIQNPSSAIVNFTLQHLGLISPNVQLSASPGSGIVPVSPRIESVNVAPENAGTQQGRATNYDSPVPGQSQPNGQSVAVTGAQQPVPVTPKGSQLVAESFFRTPGGPTKPTSSSCMDFEGANKTSLGTLFVPQRKLEVSTEDVH

SEQ ID NO: 17290 - protein, 675 aa, Homo sapiens
MAAAKVALTKRADPAELRTIFLKYASIEKNGEFFMSPNDFVTRYLNIFGESQPNPKTVELLSGVVDQTKDGLISFQEFVAFESVLCAPDALFMVAFQLFDKAGKGEVTFEDVKQVFGQTTIHQHIPFNWDSEFVQLHFGKERKRHLTYAEFTQFLLEIQLEHAKQAFVQRDNARTGRVTAIDFRDIMVTIRPHVLTPFVEECLVAAAGGTTSHQVSFSYFNGFNSLLNNMELIRKIYSTLAGTRKDVEVTKEEFVLAAQKFGQVTPMEVDILFQLADLYEPRGRMTLADIERIAPLEEGTLPFNLAEAQRQKASGDSARPVLLQVAESAYRFGLGSVAGAVGATAVYPIDLVKTRMQNQRSTGSFVGELMYKNSFDCFKKVLRYEGFFGLYRGLLPQLLGVAPEKAIKLTVNDFVRDKFMHKDGSVPLAAEILAGGCAGGSQVIFTNPLEIVKIRLQVAGEITTGPRVSALSVVRDLGFFGIYKGAKACFLRDIPFSAIYFPCYAHVKASFANEDGQVSPGSLLLAGAIAGMPAASLVTPADVIKTRLQVAARAGQTTYSGVIDCFRKILREEGPKALWKGAGARVFRSSPQFGVTLLTYELLQRWFYIDFGGVKPMGSEPVPKSRINLPAPNPDHVGGYKLAVATFAGIENKFGLYLPLFKPSVSTSKAIGGGP

SEQ ID NO: 17291 - protein, 676 aa, Homo sapiens
MAAAKVALTKRADPAELRTIFLKYASIEKNGEFFMSPNDFVTRYLNIFGESQPNPKTVELLSGVVDQTKDGLISFQEFVAFESVLCAPDALFMVAFQLFDKAGKGEVTFEDVKQVFGQTTIHQHIPFNWDSEFVQLHFGKERKRHLTYAEFTQFLLEIQLEHAKQAFVQRDNARTGRVTAIDFRDIMVTIRPHVLTPFVEECLVAAAGGTTSHQVSFSYFNGFNSLLNNMELIRKIYSTLAGTRKDVEVTKEEFVLAAQKFGQVTPMEVDILFQLADLYEPRGRMTLADIERIAPLEEGTLPFNLAEAQRQQKASGDSARPVLLQVAESAYRFGLGSVAGAVGATAVYPIDLVKTRMQNQRSTGSFVGELMYKNSFDCFKKVLRYEGFFGLYRGLLPQLLGVAPEKAIKLTVNDFVRDKFMHKDGSVPLAAEILAGGCAGGSQVIFTNPLEIVKIRLQVAGEITTGPRVSALSVVRDLGFFGIYKGAKACFLRDIPFSAIYFPCYAHVKASFANEDGQVSPGSLLLAGAIAGMPAASLVTPADVIKTRLQVAARAGQTTYSGVIDCFRKILREEGPKALWKGAGARVFRSSPQFGVTLLTYELLQRWFYIDFGGVKPMGSEPVPKSRINLPAPNPDHVGGYKLAVATFAGIENKFGLYLPLFKPSVSTSKAIGGGP

SEQ ID NO: 17292 - protein, 633 aa, Homo sapiens
MPSCGACTCGAAAVRLITSSLASAQRGISGGRIHMSVLGRLGTFETQILQRAPLRSFTETPAYFASKDGISKDGSGDGNKKSASEGSSKKSGSGNSGKGGNQLRCPKCGDLCTHVETFVSSTRFVKCEKCHHFFVVLSEADSKKSIIKEPESAAEAVKLAFQQKPPPPPKKIYNYLDKYVVGQSFAKKVLSVAVYNHYKRIYNNIPANLRQQAEVEKQTSLTPRELEIRRREDEYRFTKLLQIAGISPHGNALGASMQQQVNQQIPQEKRGGEVLDSSHDDIKLEKSNILLLGPTGSGKTLLAQTLAKCLDVPFAICDCTTLTQAGYVGEDIESVIAKLLQDANYNVEKAQQGIVFLDEVDKIGSVPGIHQLRDVGGEGVQQGLLKLLEGTIVNVPEKNSRKLRGETVQVDTTNILFVASGAFNGLDRIISRRKNEKYLGFGTPSNLGKGRRAAAAADLANRSGESNTHQDIEEKDRLLRHVEARDLIEFGMIPEFVGRLPVVVPLHSLDEKTLVQILTEPRNAVIPQYQALFSMDKCELNVTEDALKAIARLALERKTGARGLRSIMEKLLLEPMFEVPNSDIVCVEVDKEVVEGKKEPGYIRAPTKESSEEEYDSGVEEEGWPRQADAANS

SEQ ID NO: 17293 - protein, 457 aa, Homo sapiens
MRSAAVLALLLCAGQVTALPVNSPMNKGDTEVMKCIVEVISDTLSKPSPMPVSQECFETLRGDERILSILRHQNLLKELQDLALQGAKERAHQQKKHSGFEDELSEVLENQSSQAELKEAVEEPSSKDVMEKREDSKEAEKSGEATDGARPQALPEPMQESKAEGNNQAPGEEEEEEEEATNTHPPASLPSQKYPGPQAEGDSEGLSQGLVDREKGLSAEPGWQAKREEEEEEEEEAEAGEEAVPEEEGPTVVLNPHPSLGYKEIRKGESRSEALAVDGAGKPGAEEAQDPEGKGEQEHSQQKEEEEEMAVVPQGLFRGGKSGELEQEEERLSKEWEDSKRWSKMDQLAKELTAEKRLEGQEEEEDNRDSSMKLSFRARAYGFRGPGPQLRRGWRPSSREDSLEAGLPLQVRGYPEEKKEEEGSANRRPEDQELESLSAIEAELEKVAHQLQALRRG

SEQ ID NO: 17294 - protein, 488 aa, Homo sapiens
MQHVSSSQSSQRHVQWPGACPGAGEEQPACSQPSLPLTLPSPSHQLQQLMVRGGPAGGQNMNVDLQGVGPGLQGSPQVTLAPLPLPSPTSPGFQFSAQPRRFEHGSPSYIQVTSPLSQQVQTQSPTQPSPGPGQALQNVRAGAPGPGLGLCSSSPTGDFVDASVLVRQISLSPSSGGHFVFQDGSGLTQIAQGAQVQLQHPGTPITVRERRPSQPHTQSGGTIHHLGPQSPAAAGGAGLQPLASPSHITTANLPPQISSIIQGQLVQQQQVLQGPPLPRPLGFERTPGVLLPGAGGAAGFGMTSPPPPTSPSRTAVPPGLSSLPLTSVGNTGMKKVPKKLEEIPPASPEMAQMRKQCLDYHHQEMQALKEVFKEYLIELFFLQHFQGNMMDFLAFKERLYGPLQAYLRQNDLDIEEEEEEHFEVINDEVKVVARKHGQPGTPVAIATQLPPRTSAAFPAQQQPLQQIHMGTPVPGDVNSIKMEASKRQ

SEQ ID NO: 17295 - protein, 430 aa, Homo sapiens
MQHVSSSQSSQRHVQWPGACPGAGEEQPACSQPSLPLTLPSPSHQLQQLMQVQTQSPTQPSPGPGQALQNVRAGAPGPGLGLCSSSPTGDFVDASVLVRQISLSPSSGGHFVFQDGSGLTQIAQGAQVQLQHPGTPITVRERRPSQPHTQSGGTIHHLGPQSPAAAGGAGLQPLASPSHITTANLPPQISSIIQGQLVQQQQVLQGPPLPRPLGFERTPGVLLPGAGGAAGFGMTSPPPPTSPSRTAVPPGLSSLPLTSVGNTGMKKVPKKLEEIPPASPEMAQMRKQCLDYHHQEMQALKEVFKEYLIELFFLQHFQGNMMDFLAFKERLYGPLQAYLRQNDLDIEEEEEEHFEVINDEVKVVARKHGQPGTPVAIATQLPPRTSAAFPAQQQPLQPLAPTTVLSVSADWNALLQRPNKYIWGLQYLEM

SEQ ID NO: 17296 - protein, 345 aa, Homo sapiens
MQHVSSSQSSQRHVQWPGACPGAGEEQPACSQPSLPLTLPSPSHQLQQLMDGSGLTQIAQGAQVQLQHPGTPITVRERRPSQPHTQSGGTIHHLGPQSPAAAGGAGLQPLASPSHITTANLPPLPRPLGFERTPGVLLPGAGGAAGFGMTSPPPPTSPSRTAVPPGLSSLPLTSVGNTGMKKVPKKLEEIPPASPEMAQMRKQCLDYHHQEMQALKEVFKEYLIELFFLQHFQGNMMDFLAFKERLYGPLQAYLRQNDLDIEEEEEEHFEVINDEVKVVARKHGQPGTPVAIATQLPPRTSAAFPAQQQPLQPLAPTTVLSVSADWNALLQRPNKYIWGLQYLEM

SEQ ID NO: 17297 - protein, 356 aa, Homo sapiens
MQHVSSSQSSQRHVQWPGACPGAGEEQPACSQPSLPLTLPSPSHQLQQLMDGSGLTQIAQGAQVQLQHPGTPITVRERRPSQPHTQSGGTIHHLGPQSPAAAGGAGLQPLASPSHITTANLPPQISSIIQGQLVQQQQVLQGPPLPRPLGFERTPGVLLPGAGGAAGFGMTSPPPPTSPSRTAVPPGLSSLPLTSVGNTGMKKVPKKLEEIPPASPEMAQMRKQCLDYHHQEMQALKEVFKEYLIELFFLQHFQGNMMDFLAFKERLYGPLQAYLRQNDLDIEEEEEEHFEVINDEVKVVARKHGQPGTPVAIATQLPPRTSAAFPAQQQPLQVLSDGSTVQLPRLSSLGFEDSMC

SEQ ID NO: 17298 - protein, 488 aa, Homo sapiens
MQHVSSSQSSQRHVQWPGACPGAGEEQPACSQPSLPLTLPSPSHQLQQLMVRGGPAGGQNMNVDLQGVGPGLQGSPQVTLAPLPLPSPTSPGFQFSAQPRRFEHGSPSYIQVTSPLSQQVQTQSPTQPSPGPGQALQNVRAGAPGPGLGLCSSSPTGDFVDASVLVRQISLSPSSGGHFVFQDGSGLTQIAQGAQVQLQHPGTPITVRERRPSQPHTQSGGTIHHLGPQSPAAAGGAGLQPLASPSHITTANLPPQISSIIQGQLVQQQQVLQGPPLPRPLGFERTPGVLLPGAGGAAGFGMTSPPPPTSPSRTAVPPGLSSLPLTSVGNTGMKKVPKKLEEIPPASPEMAQMRKQCLDYHHQEMQALKEVFKEYLIELFFLQHFQGNMMDFLAFKERLYGPLQAYLRQNDLDIEEEEEEHFEVINDEVKVVARKHGQPGTPVAIATQLPPRTSAAFPAQQQPLQVLSDGSTVQLPRLSSLGFEDSMC

SEQ ID NO: 17299 - protein, 649 aa, Homo sapiens
MAGVSFSGHRLELLAAYEEVIREESAADWALYTYEDGSDDLKLAASGEGGLQELSGHFENQKVMYGFCSVKDSQAALPKYVLINWVGEDVPDARKCACASHVAKVAEFFQGVDVIVNASSVEDIDAGAIGQRLSNGLARLSSPVLHRLRLREDENAEPVGTTYQKTDAAVEMKRINREQFWEQAKKEEELRKEEERKKALDERLRFEQERMEQERQEQEERERRYREREQQIEEHRRKQQTLEAEEAKRRLKEQSIFGDHRDEEEETHMKKSESEVEEAAAIIAQRPDNPREFFKQQERVASASAGSCDVPSPFNHRPGSHLDSHRRMAPTPIPTRSPSDSSTASTPVAEQIERALDEVTSSQPPPLPPPPPPAQETQEPSPILDSEETRAAAPQAWAGPMEEPPQAQAPPRGPGSPAEDLMFMESAEQAVLAAPVEPATADATEIHDAADTIETDTATADTTVANNVPPAATSLIDLWPGNGEGASTLQGEPRAPTPPSGTEVTLAEVPLLDEVAPEPLLPAGEGCATLLNFDELPEPPATFCDPEEVEGESLAAPQTPTLPSALEELEQEQEPEPHLLTNGETTQKEGTQASEGYFSQSQEEEFAQSEELCAKAPPPVFYNKPPEIDITCWDADPVPEEEEGFEGGD

SEQ ID NO: 17300 - protein, 651 aa, Homo sapiens
MAGHPWHGTAALASSQAWRDGRERQALVSCRALYTYEDGSDDLKLAASGEGGLQELSGHFENQKVMYGFCSVKDSQAALPKYVLINWVGEDVPDARKCACASHVAKVAEFFQGVDVIVNASSVEDIDAGAIGQRLSNGLARLSSPVLHRLRLREDENAEPVGTTYQKTDAAVEMKRINREQFWEQAKKEEELRKEEERKKALDERLRFEQERMEQERQEQEERERRYREREQQIEEHRRKQQTLEAEEAKRRLKEQSIFGDHRDEEEETHMKKSESEVEEAAAIIAQRPDNPREFFKQQERVASASAGSCDVPSPFNHRPGSHLDSHRRMAPTPIPTRSPSDSSTASTPVAEQIERALDEVTSSQPPPLPPPPPPAQETQEPSPILDSEETRAAAPQAWAGPMEEPPQAQAPPRGPGSPAEDLMFMESAEQAVLAAPVEPATADATEIHDAADTIETDTATADTTVANNVPPAATSLIDLWPGNGEGASTLQGEPRAPTPPSGTEVTLAEVPLLDEVAPEPLLPAGEGCATLLNFDELPEPPATFCDPEEVEGESLAAPQTPTLPSALEELEQEQEPEPHLLTNGETTQKEGTQASEGYFSQSQEEEFAQSEELCAKAPPPVFYNKPPEIDITCWDADPVPEEEEGFEGGD

SEQ ID NO: 17301 - protein, 695 aa, Homo sapiens
MAGVSFSGHRLELLAAYEEVIREESAADWALYTYEDGSDDLKLAASGEGGLQELSGHFENQKVMYGFCSVKDSQAALPKYVLINWVGEDVPDARKCACASHVAKVAEFFQGVDVIVNASSVEDIDAGAIGQRLSNGLARLSSPVLHRLRLREDENAEPVGTTYQKTDAAVEMKRINREQFWEQAKKEEELRKEEERKKALDERLRFEQERMEQERQEQEERERRYREREQQIEEHRRKQQTLEAEEAKRRLKEQSIFGDHRDEEEETHMKKSESEVEEAAAIIAQRPDNPREFFKQQERVASASAGSCDVPSPFNHRPGRPYCPFIKASDSGPSSSSSSSSSPPRTPFPYITCHRTPNLSSSLPCSHLDSHRRMAPTPIPTRSPSDSSTASTPVAEQIERALDEVTSSQPPPLPPPPPPAQETQEPSPILDSEETRAAAPQAWAGPMEEPPQAQAPPRGPGSPAEDLMFMESAEQAVLAAPVEPATADATEIHDAADTIETDTATADTTVANNVPPAATSLIDLWPGNGEGASTLQGEPRAPTPPSGTEVTLAEVPLLDEVAPEPLLPAGEGCATLLNFDELPEPPATFCDPEEVEGESLAAPQTPTLPSALEELEQEQEPEPHLLTNGETTQKEGTQASEGYFSQSQEEEFAQSEELCAKAPPPVFYNKPPEIDITCWDADPVPEEEEGFEGGD

SEQ ID NO: 17302 - protein, 881 aa, Homo sapiens
MTTETGPDSEVKKAQEEAPQQPEAAAAVTTPVTPAGHGHPEANSNEKHPSQQDTRPAEQSLDMEEKDYSEADGLSERTTPSKAQKSPQKIAKKYKSAICRVTLLDASEYECEVEKHGRGQVLFDLVCEHLNLLEKDYFGLTFCDADSQKNWLDPSKEIKKQIRSSPWNFAFTVKFYPPDPAQLTEDITRYYLCLQLRADIITGRLPCSFVTHALLGSYAVQAELGDYDAEEHVGNYVSELRFAPNQTRELEERIMELHKTYRGMTPGEAEIHFLENAKKLSMYGVDLHHAKDSEGIDIMLGVCANGLLIYRDRLRINRFAWPKILKISYKRSNFYIKIRPGEYEQFESTIGFKLPNHRSAKRLWKVCIEHHTFFRLVSPEPPPKGFLVMGSKFRYSGRTQAQTRQASALIDRPAPFFERSSSKRYTMSRSLDGAEFSRPASVSENHDAGPDGDKRDEDGESGGQRSEAEEGEVRTPTKIKELKPEQETTPRHKQEFLDKPEDVLLKHQASINELKRTLKEPNSKLIHRDRDWERERRLPSSPASPSPKGTPEKANERAGLREGSEEKVKPPRPRAPESDTGDEDQDQERDTVFLKDNHLAIERKCSSITVSSTSSLEAEVDFTVIGDYHGSAFEDFSRSLPELDRDKSDSDTEGLLFSRDLNKGAPSQDDESGGIEDSPDRGACSTPDMPQFEPVKTETMTVSSLAIRKKIEPEAVLQTRVSAMDNTQQVDGSASVGREFIATTPSITTETISTTMENSLKSGKGAAAMIPGPQTVATEIRSLSPIIGKDVLTSTYGATAETLSTSTTTHVTKTVKGGFSETRIEKRIIITGDEDVDQDQALALAIKEAKLQHPDMLVTKAVVYRETDPSPEERDKKPQES

SEQ ID NO: 17303 - protein, 779 aa, Homo sapiens
MEEKDYSEADGLSERTTPSKAQKSPQKIAKKYKSAICRVTLLDASEYECEVEKHGRGQVLFDLVCEHLNLLEKDYFGLTFCDADSQKNWLDPSKEIKKQIRSSPWNFAFTVKFYPPDPAQLTEDITRYYLCLQLRADIITGRLPCSFVTHALLGSYAVQAELGDYDAEEHVGNYVSELRFAPNQTRELEERIMELHKTYRGMTPGEAEIHFLENAKKLSMYGVDLHHAKDSEGIDIMLGVCANGLLIYRDRLRINRFAWPKILKISYKRSNFYIKIRPGEYEQFESTIGFKLPNHRSAKRLWKVCIEHHTFFRLVSPEPPPKGFLVMGSKFRYSGRTQAQTRQASALIDRPAPFFERSSSKRYTMSRSLDGAEFSRPASVSENHDAGPDGDKRDEDGESGGQRSEAEEGEVRTPTKIKELKFLDKPEDVLLKHQASINELKRTLKEPNSKLIHRDRDWERERRLPSSPASPSPKGTPEKANERAGLREGSEEKVKPPRPRAPESDTGDEDQDQERDTVFLKDNHLAIERKCSSITVSSTSSLEAEVDFTVIGDYHGSAFEDFSRSLPELDRDKSDSDTEGLLFSRDLNKGAPSQDDESGGIEDSPDRGACSTPDMPQFEPVKTETMTVSSLAIRKKIEPEAVLQTRVSAMDNTQENSLKSGKGAAAMIPGPQTVATEIRSLSPIIGKDVLTSTYGATAETLSTSTTTHVTKTVKGGFSETRIEKRIIITGDEDVDQDQALALAIKEAKLQHPDMLVTKAVVYRETDPSPEERDKKPQES

SEQ ID NO: 17304 - protein, 772 aa, Homo sapiens
MEEKDYSEADGLSERTTPSKAQKSPQKIAKKYKSAICRVTLLDASEYECEVENWLDPSKEIKKQIRSSPWNFAFTVKFYPPDPAQLTEDITRYYLCLQLRADIITGRLPCSFVTHALLGSYAVQAELGDYDAEEHVGNYVSELRFAPNQTRELEERIMELHKTYRGMTPGEAEIHFLENAKKLSMYGVDLHHAKDSEGIDIMLGVCANGLLIYRDRLRINRFAWPKILKISYKRSNFYIKIRPGEYEQFESTIGFKLPNHRSAKRLWKVCIEHHTFFRLVSPEPPPKGFLVMGSKFRYSGRTQAQTRQASALIDRPAPFFERSSSKRYTMSRSLDGAEFSRPASVSENHDAGPDGDKRDEDGESGGQRSEAEEGEVRTPTKIKELKFLDKPEDVLLKHQASINELKRTLKEPNSKLIHRDRDWERERRLPSSPASPSPKGTPEKANERAGLREGSEEKVKPPRPRAPESDTGDEDQDQERDTVFLKDNHLAIERKCSSITVSSTSSLEAEVDFTVIGDYHGSAFEDFSRSLPELDRDKSDSDTEGLLFSRDLNKGAPSQDDESGGIEDSPDRGACSTPDMPQFEPVKTETMTVSSLAIRKKIEPEAVLQTRVSAMDNTQQVDGSASVGREFIATTPSITTETISTTMENSLKSGKGAAAMIPGPQTVATEIRSLSPIIGKDVLTSTYGATAETLSTSTTTHVTKTVKGGFSETRIEKRIIITGDEDVDQDQALALAIKEAKLQHPDMLVTKAVVYRETDPSPEERDKKPQES

SEQ ID NO: 17305 - protein, 701 aa, Homo sapiens
MVFLGRINEVEPAKGLAESLAPTERSVKSLDMEEKDYSEADGLSERTTPSKAQKSPQKIAKKYKSAICRVTLLDASEYECEVEKHGRGQVLFDLVCEHLNLLEKDYFGLTFCDADSQKNWLDPSKEIKKQIRSSPWNFAFTVKFYPPDPAQLTEDITRYYLCLQLRADIITGRLPCSFVTHALLGSYAVQAELGDYDAEEHVGNYVSELRFAPNQTRELEERIMELHKTYRGMTPGEAEIHFLENAKKLSMYGVDLHHAKDSEGIDIMLGVCANGLLIYRDRLRINRFAWPKILKISYKRSNFYIKIRPGEYEQFESTIGFKLPNHRSAKRLWKVCIEHHTFFRLVSPEPPPKGFLVMGSKFRYSGRTQAQTRQASALIDRPAPFFERSSSKRYTMSRSLDGAEFSRPASVSENHDAGPDGDKRDEDGESGGQRSEAEEGEVRTPTKIKELKFLDKPEDVLLKHQASINELKRTLKEPNSKLIHRDRDWERERRLPSSPASPSPKGTPEKANEPVKTETMTVSSLAIRKKIEPEAVLQTRVSAMDNTQQVDGSASVGREFIATTPSITTETISTTMENSLKSGKGAAAMIPGPQTVATEIRSLSPIIGKDVLTSTYGATAETLSTSTTTHVTKTVKGGFSETRIEKRIIITGDEDVDQDQALALAIKEAKLQHPDMLVTKAVVYRETDPSPEERDKKPQES

SEQ ID NO: 17306 - protein, 1005 aa, Homo sapiens
MTTEVGSVSEVKKDSSQLGTDATKEKPKEVAENQQNQSSDPEEEKGSQPPPAAESQSSLRRQKREKETSESRGISRFIPPWLKKQKSYTLVVAKDGGDKKEPTQAVVEEQVLDKEEPLPEEQRQAKGDAEEMAQKKQEIKVEVKEEKPSVSKEEKPSVSKVEMQPTELVSKEREEKVKETQEDKLEGGAAKRETKEVQTNELKAEKASQKVTKKTKTVQCKVTLLDGTEYSCDLEKHAKGQVLFDKVCEHLNLLEKDYFGLLFQESPEQKNWLDPAKEIKRQLRNLPWLFTFNVKFYPPDPSQLTEDITRYFLCLQLRQDIASGRLPCSFVTHALLGSYTLQAELGDYDPEEHGSIDLSEFQFAPTQTKELEEKVAELHKTHRGLSPAQADSQFLENAKRLSMYGVDLHHAKDSEGVDIKLGVCANGLLIYKDRLRINRFAWPKILKISYKRSNFYIKVRPAELEQFESTIGFKLPNHRAAKRLWKVCVEHHTFYRLVSPEQPPKAKFLTLGSKFRYSGRTQAQTRQASTLIDRPAPHFERTSSKRVSRSLDGAPIGVMDQSLMKDFPGAAGEISAYGPGLVSIAVVQDGDGRREVRSPTKAPHLQLIEGKKNSLRVEGDNIYVRHSNLMLEELDKAQEDILKHQASISELKRNFMESTPEPRPNEWEKRRITPLSLQTQGSSHETLNIVEEKKRAEVGKDERVITEEMNGKEISPGSGPGEIRKVEPVTQKDSTSLSSESSSSSSESEEEDVGEYRPHHRVTEGTIREEQEYEEEVEEEPRPAAKVVEREEAVPEASPVTQAGASVITVETVIQENVGAQKIPGEKSVHEGALKQDMGEEAEEEPQKVNGEVSHVDIDVLPQIICCSEPPVVKTEMVTISDASQRTEISTKEVPIVQTETKTITYESPQIDGGAGGDSGTLLTAQTITSESVSTTTTTHITKTVKGGISETRIEKRIVITGDGDIDHDQALAQAIREAREQHPDMSVTRVVVHKETELAEEGED

SEQ ID NO: 17307 - protein, 673 aa, Homo sapiens
MTTEVGSVSEVKKDSSQLGTDATKEKPKEVAENQQNQSSDPEEEKGSQPPPAAESQSSLRRQKREKETSESRGISRFIPPWLKKQKSYTLVVAKDGGDKKEPTQAVVEEQVLDKEEPLPEEQRQAKGDAEEMAQKKQEIKVEVKEEKPSVSKEEKPSVSKVEMQPTELVSKEREEKVKETQEDKLEGGAAKRETKEVQTNELKAEKASQKVTKKTKTVQCKVTLLDGTEYSCDLEKHAKGQVLFDKVCEHLNLLEKDYFGLLFQESPEQKNWLDPAKEIKRQLRNLPWLFTFNVKFYPPDPSQLTEDITRYFLCLQLRQDIASGRLPCSFVTHALLGSYTLQAELGDYDPEEHGSIDLSEFQFAPTQTKELEEKVAELHKTHRGLSPAQADSQFLENAKRLSMYGVDLHHAKDSEGVDIKLGVCANGLLIYKDRLRINRFAWPKILKISYKRSNFYIKVRPAELEQFESTIGFKLPNHRAAKRLWKVCVEHHTFYRLVSPEQPPKAKFLTLGSKFRYSGRTQAQTRQASTLIDRPAPHFERTSSKRVSRSLDGAPIGVMDQSLMKDFPGAAGEISAYGPGLVSIAVVQDGDGRREVRSPTKAPHLQLIEGKTVKGGISETRIEKRIVITGDGDIDHDQALAQAIREAREQHPDMSVTRVVVHKETELAEEGED

SEQ ID NO: 17308 - protein, 747 aa, Homo sapiens
MTTEVGSVSEVKKDSSQLGTDATKEKPKEVAENQQNQSSDPEEEKGSQPPPAAESQSSLRRQKREKETSESRGISRFIPPWLKKQKSYTLVVAKDGGDKKEPTQAVVEEQVLDKEEPLPEEQRQAKGDAEEMAQKKQEIKVEVKEEKPSVSKEEKPSVSKVEMQPTELVSKEREEKVKETQEDKLEGGAAKRETKEVQTNELKAEKASQKVTKKTKTVQCKVTLLDGTEYSCDLEKHAKGQVLFDKVCEHLNLLEKDYFGLLFQESPEQKNWLDPAKEIKRQLRNLPWLFTFNVKFYPPDPSQLTEDITRYFLCLQLRQDIASGRLPCSFVTHALLGSYTLQAELGDYDPEEHGSIDLSEFQFAPTQTKELEEKVAELHKTHRGLSPAQADSQFLENAKRLSMYGVDLHHAKDSEGVDIKLGVCANGLLIYKDRLRINRFAWPKILKISYKRSNFYIKVRPAELEQFESTIGFKLPNHRAAKRLWKVCVEHHTFYRLVSPEQPPKAKFLTLGSKFRYSGRTQAQTRQASTLIDRPAPHFERTSSKRVSRSLDGAPIGVMDQSLMKDFPGAAGEISAYGPGLVSIAVVQDGDGRREVRSPTKAPHLQLIEGKPPVVKTEMVTISDASQRTEISTKEVPIVQTETKTITYESPQIDGGAGGDSGTLLTAQTITSESVSTTTTTHITKTVKGGISETRIEKRIVITGDGDIDHDQALAQAIREAREQHPDMSVTRVVVHKETELAEEGED

SEQ ID NO: 17309 - protein, 852 aa, Homo sapiens
MTTEVGSVSEVKKDSSQLGTDATKEKPKEVAENQQNQSSDPEEEKGSQPPPAAESQSSLRRQKREKETSESRGISRFIPPWLKKQKSYTLVVAKDGGDKKEPTQAVVEEQVLDKEEPLPEEQRQAKGDAEEMAQKKQEIKVEVKEEKPSVSKEEKPSVSKVEMQPTELVSKEREEKVKETQEDKLEGGAAKRETKEVQTNELKAEKASQKVTKKTKTVQCKVTLLDGTEYSCDLEKHAKGQVLFDKVCEHLNLLEKDYFGLLFQESPEQKNWLDPAKEIKRQLRNLPWLFTFNVKFYPPDPSQLTEDITRYFLCLQLRQDIASGRLPCSFVTHALLGSYTLQAELGDYDPEEHGSIDLSEFQFAPTQTKELEEKVAELHKTHRGLSPAQADSQFLENAKRLSMYGVDLHHAKDSEGVDIKLGVCANGLLIYKDRLRINRFAWPKILKISYKRSNFYIKVRPAELEQFESTIGFKLPNHRAAKRLWKVCVEHHTFYRLVSPEQPPKAKFLTLGSKFRYSGRTQAQTRQASTLIDRPAPHFERTSSKRVSRSLDGAPIGVMDQSLMKDFPGAAGEISAYGPGLVSIAVVQDGDGRREVRSPTKAPHLQLIEGKSSHETLNIVEEKKRAEVGKDERVITEEMNGKEISPGSGPGEIRKVEPVTQKDSTSLSSESSSSSSESEEEDVGEYRPHHRVTEGTIREEQEYEEEVEEEPRPAAKPPVVKTEMVTISDASQRTEISTKEVPIVQTETKTITYESPQIDGGAGGDSGTLLTAQTITSESVSTTTTTHITKTVKGGISETRIEKRIVITGDGDIDHDQALAQAIREAREQHPDMSVTRVVVHKETELAEEGED

SEQ ID NO: 17310 - protein, 170 aa, Homo sapiens; identical to SEQ ID NO: 14103

SEQ ID NO: 17311 - protein, 197 aa, Homo sapiens
MPAEVHGSPPASLCPCPSVKFRPGLPAMALLTALDDTLPEEAQGPGRRMILLSTPSQSDALRACFERNLYPGIATKEQLAQGIDIPEPRVQIWFQNERSCQLRQHRRQSRPWPGRRDPQKGRRKRTAITGSQTALLLRAFEKDRFPGIPAREELARETGLPESRIQLWFQNRRARHWGQSGRAPTQASIRCNAAPIG

SEQ ID NO: 17312 - protein, 170 aa, Homo sapiens
MALLTALDDTLPEEAQGPGRRMILLSTPSQSDALRACFERNLYPGIATKEQLAQGIDIPEPRVQIWFQNERSCQLRQHRRQSRPWPGRRDPQKGRRKRTAITGSQTALLLRAFEKDRFPGIPAREELARETGLPESRIQLWFQNRRARHWGQSGRAPTQASIRCNAAPIG

SEQ ID NO: 17313 - protein, 374 aa, Homo sapiens
MALPTPSDSTLPAEARGRGRRRRLVWTPSQSEALRACFERNPYPGIATRERLAQAIGIPEPRVQIWFQNERSRQLRQHRRESRPWPGRRGPPEGRRKRTAVTGSQTALLLRAFEKDRFPGIAAREELARETGLPESRIQIWFQNRRARHPGQGGRAPAQAGGLCSAAPGGGHPAPSWVAFAHTGAWGTGLPAPHVPCAPGALPQGAFVSQAARAAPALQPSQAAPAEGISQPAPARGDFAYAAPAPPDGALSHPQAPRWPPHPGKSREDRDPQRDGLPGPCAVAQPGPAQAGPQGQGVLAPPTSQGSPWWGWGRGPQVAGAAWEPQAGAAPPPQPAPPDASAASTDASHPGASQPLQEPGRSSTVTSSLLYELL

SEQ ID NO: 17314 - protein, 83 aa, Homo sapiens
MSDNTTLPAPASNQGPTTPRKGPPKFKQRQTRQFKSKPPKKGVKGFGDDIPGMEGLGTDITVICPWEAFSHLELHELAQFGII

SEQ ID NO: 17315 - protein, 292 aa, Homo sapiens
MLRVLCLLRPWRPLRARGCASDGAAGGSEIQVRALAGPDQGITEILMNRPSARNALGNVFVSELLETLAQLREDRQVRVLLFRSGVKGVFCAGADLKEREQMSEAEVGVFVQRLRGLMNDIAAFPAPTIAAMDGFALGGGLELALACDLRVAASSAVMGLIETTRGLLPGAGGTQRLPRCLGVALAKELIFTGRRLSGTEAHVLGLVNHAVAQNEEGDAAYQRARALAQEILPQAPIAVRLGKVAIDRGTEVDIASGMAIEGMCYAQNIPTRDRLEGMAAFREKRTPKFVGK

SEQ ID NO: 17316 - protein, 261 aa, Homo sapiens
MLRVLCLLRPWRPLRARGCASDGAAGGSEIQVRALAGPDQGITEILMNRPSARNALGNVFVSELLETLAQLREDRQVRVLLFRSGVKGVFCAGADLKEREQMSEAEVGVFVQRLRGLMNDIASSAVMGLIETTRGLLPGAGGTQRLPRCLGVALAKELIFTGRRLSGTEAHVLGLVNHAVAQNEEGDAAYQRARALAQEILPQAPIAVRLGKVAIDRGTEVDIASGMAIEGMCYAQNIPTRDRLEGMAAFREKRTPKFVGK

SEQ ID NO: 17317 - protein, 280 aa, Homo sapiens
MQAKYSSTRDMLDDDGDTTMSLHSQGSATTRHPEPRRTEHRAPSSTWRPVALTLLTLCLVLLIGLAALGLLFFQYYQLSNTGQDTISQMEERLGNTSQELQSLQVQNIKLAGSLQHVAEKLCRELYNKAGAHRCSPCTEQWKWHGDNCYQFYKDSKSWEDCKYFCLSENSTMLKINKQEDLEFAASQSYSEFFYSYWTGLLRPDSGKAWLWMDGTPFTSELFHIIIDVTSPRSRDCVAILNGMIFSKDCKELKRCVCERRAGMVKPESLHVPPETLGEGD

SEQ ID NO: 17318 - protein, 219 aa, Homo sapiens
MEYLSALNPSDLLRSVSNISSEFGRRVWTSAPPPQRPFRVCDHKRTIRKGLTAATRQELLAKALETLLLNGVLTLVLEEDGTAVDSEDFFQLLEDDTCLMVLQSGQSWSPTRSGVLSYGLGRERPKHSKDIARFTFDVYKQNPRDLFGSLNVKATFYGLYSMSCDFQGLGPKKVLRELLRWTSTLLQGLGHMLLGISSTLRHAVEGAEQWQQKGRLHSY

SEQ ID NO: 17319 - protein, 191 aa, Homo sapiens
MHDSNNVEKDITPSELPANPGCLHSKEHSIKATLIWRLFFLIMFLTIIVCGMVAALSAIRANCHQEPSVCLQAACPESWIGFQRKCFYFSDDTKNWTSSQRFCDSQDADLAQVESFQELNFLLRYKGPSDHWIGLSREQGQPWKWINGTEWTRQFPILGAGECAYLNDKGASSARHYTERKWICSKSDIHV

SEQ ID NO: 17320 - protein, 154 aa, Homo sapiens
MHDSNNVEKDITPSELPANPGCLHSKEHSIKATLIWRLFFLIMFLTIIVCGMVAALSAIRANCHQEPSVCLQAACPESWIGFQRKCFYFSDDTKNWTSSQRFCDSQDADLAQVESFQELNFLLRYKGPSDHWIGLSREQGQPWKWINGTEWTRQ

SEQ ID NO: 17321 - protein, 194 aa, Homo sapiens
MHDSNNVEKDITPSELPANPGCLHSKEHSIKATLIWRLFFLIMFLTIIVCGMVAALSAIRANCHQEPSVCLQAACPESWIGFQRKCFYFSDDTKNWTSSQRFCDSQDADLAQVESFQELNFLLRYKGPSDHWIGLSREQGQPWKWINGTEWTRQLVMKEDGANLYVAKVSQVPRMNPRPVMVSYPGSRRVCLFE

SEQ ID NO: 17322 - protein, 132 aa, Homo sapiens
MHDSNNVEKDITPSELPANPGCLHSKEHSIKATLIWRLFFLIMFLTIIVCGMVAALSAIRANCHQEPSVCLQAACPESWIGFQRKCFYFSDDTKNWTSSQRFCDSQDADLAQVESFQELVSYPGSRRVCLFE

SEQ ID NO: 17323 - protein, 154 aa, Homo sapiens
MHDSNNVEKDITPSELPANPAIRANCHQEPSVCLQAACPESWIGFQRKCFYFSDDTKNWTSSQRFCDSQDADLAQVESFQELNFLLRYKGPSDHWIGLSREQGQPWKWINGTEWTRQFPILGAGECAYLNDKGASSARHYTERKWICSKSDIHV

SEQ ID NO: 17324 - protein, 95 aa, Homo sapiens
MHDSNNVEKDITPSELPANPAIRANCHQEPSVCLQAACPESWIGFQRKCFYFSDDTKNWTSSQRFCDSQDADLAQVESFQELVSYPGSRRVCLFE

SEQ ID NO: 17325 - protein, 1184 aa, Homo sapiens
MVGTKAWVFSFLVLEVTSVLGRQTMLTQSVRRVQPGKKNPSIFAKPADTLESPGEWTTWFNIDYPGGKGDYERLDAIRFYYGDRVCARPLRLEARTTDWTPAGSTGQVVHGSPREGFWCLNREQRPGQNCSNYTVRFLCPPGSLRRDTERIWSPWSPWSKCSAACGQTGVQTRTRICLAEMVSLCSEASEEGQHCMGQDCTACDLTCPMGQVNADCDACMCQDFMLHGAVSLPGGAPASGAAIYLLTKTPKLLTQTDSDGRFRIPGLCPDGKSILKITKVKFAPIVLTMPKTSLKAATIKAEFVRAETPYMVMNPETKARRAGQSVSLCCKATGKPRPDKYFWYHNDTLLDPSLYKHESKLVLRKLQQHQAGEYFCKAQSDAGAVKSKVAQLIVIASDETPCNPVPESYLIRLPHDCFQNATNSFYYDVGRCPVKTCAGQQDNGIRCRDAVQNCCGISKTEEREIQCSGYTLPTKVAKECSCQRCTETRSIVRGRVSAADNGEPMRFGHVYMGNSRVSMTGYKGTFTLHVPQDTERLVLTFVDRLQKFVNTTKVLPFNKKGSAVFHEIKMLRRKKPITLEAMETNIIPLGEVVGEDPMAELEIPSRSFYRQNGEPYIGKVKASVTFLDPRNISTATAAQTDLNFINDEGDTFPLRTYGMFSVDFRDEVTSEPLNAGKVKVHLDSTQVKMPEHISTVKLWSLNPDTGLWEEEGDFKFENQRRNKREDRTFLVGNLEIRERRLFNLDVPESRRCFVKVRAYRSERFLPSEQIQGVVISVINLEPRTGFLSNPRAWGRFDSVITGPNGACVPAFCDDQSPDAYSAYVLASLAGEELQAVESSPKFNPNAIGVPQPYLNKLNYRRTDHEDPRVKKTAFQISMAKPRPNSAEESNGPIYAFENLRACEEAPPSAAHFRFYQIEGDRYDYNTVPFNEDDPMSWTEDYLAWWPKPMEFRACYIKVKIVGPLEVNVRSRNMGGTHRQTVGKLYGIRDVRSTRDRDQPNVSAACLEFKCSGMLYDQDRVDRTLVKVIPQGSCRRASVNPMLHEYLVNHLPLAVNNDTSEYTMLAPLDPLGHNYGIYTVTDQDPRTAKEIALGRCFDGTSDGSSRIMKSNVGVALTFNCVERQVGRQSAFQYLQSTPAQSPAAGTVQGRVPSRRQQRASRGGQRQGGVVASLRFPRVAQQPLIN

SEQ ID NO: 17326 - protein, 690 aa, Homo sapiens
MKLSMKNNIINTQQSFVTMPNVIVPDIEKEIRRMENGACSSFSEDDDSASTSEESENENPHARGSFSYKSLRKGGPSQREQYLPGAIALFNVNNSSNKDQEPEEKKKKKKEKKSKSDDKNENKNDPEKKKKKKDKEKKKKEEKSKDKKEEEKKEVVVIDPSGNTYYNWLFCITLPVMYNWTMVIARACFDELQSDYLEYWLILDYVSDIVYLIDMFVRTRTGYLEQGLLVKEELKLINKYKSNLQFKLDVLSLIPTDLLYFKLGWNYPEIRLNRLLRFSRMFEFFQRTETRTNYPNIFRISNLVMYIVIIIHWNACVFYSISKAIGFGNDTWVYPDINDPEFGRLARKYVYSLYWSTLTLTTIGETPPPVRDSEYVFVVVDFLIGVLIFATIVGNIGSMISNMNAARAEFQARIDAIKQYMHFRNVSKDMEKRVIKWFDYLWTNKKTVDEKEVLKYLPDKLRAEIAINVHLDTLKKVRIFADCEAGLLVELVLKLQPQVYSPGDYICKKGDIGREMYIIKEGKLAVVADDGVTQFVVLSDGSYFGEISILNIKGSKAGNRRTANIKSIGYSDLFCLSKDDLMEALTEYPDAKTMLEEKGKQILMKDGLLDLNIANAGSDPKDLEEKVTRMEGSVDLLQTRFARILAEYESMQQKLKQRLTKVEKFLKPLIDTEFSSIEGPGAESGPIDST

SEQ ID NO: 17327 - protein, 759 aa, Homo sapiens
MESRSSPRLECSGAISAHCSLHLPDSSDFQLIFVFLVEMGFHHVGQAGLELLISSDLPTSASQSAGITDMKLSMKNNIINTQQSFVTMPNVIVPDIEKEIRRMENGACSSFSEDDDSASTSEESENENPHARGSFSYKSLRKGGPSQREQYLPGAIALFNVNNSSNKDQEPEEKKKKKKEKKSKSDDKNENKNDPEKKKKKKDKEKKKKEEKSKDKKEEEKKEVVVIDPSGNTYYNWLFCITLPVMYNWTMVIARACFDELQSDYLEYWLILDYVSDIVYLIDMFVRTRTGYLEQGLLVKEELKLINKYKSNLQFKLDVLSLIPTDLLYFKLGWNYPEIRLNRLLRFSRMFEFFQRTETRTNYPNIFRISNLVMYIVIIIHWNACVFYSISKAIGFGNDTWVYPDINDPEFGRLARKYVYSLYWSTLTLTTIGETPPPVRDSEYVFVVVDFLIGVLIFATIVGNIGSMISNMNAARAEFQARIDAIKQYMHFRNVSKDMEKRVIKWFDYLWTNKKTVDEKEVLKYLPDKLRAEIAINVHLDTLKKVRIFADCEAGLLVELVLKLQPQVYSPGDYICKKGDIGREMYIIKEGKLAVVADDGVTQFVVLSDGSYFGEISILNIKGSKAGNRRTANIKSIGYSDLFCLSKDDLMEALTEYPDAKTMLEEKGKQILMKDGLLDLNIANAGSDPKDLEEKVTRMEGSVDLLQTRFARILAEYESMQQKLKQRLTKVEKFLKPLIDTEFSSIEGPGAESGPIDST

SEQ ID NO: 17328 - protein, 723 aa, Homo sapiens
MAEYTRLHNALALIRLRNPPVNAISTTLLRDIKEGLQKAVIDHTIKAIVICGAEGKFSAGADIRGFSAPRTFGLTLGHVVDEIQRNEKPVVAAIQGMAFGGGLELALGCHYRIAHAEAQVGLPEVTLGLLPGARGTQLLPRLTGVPAALDLITSGRRILADEALKLGILDKVVNSDPVEEAIRFAQRVSDQPLESRRLCNKPIQSLPNMDSIFSEALLKMRRQHPGCLAQEACVRAVQAAVQYPYEVGIKKEEELFLYLLQSGQARALQYAFFAERKANKWSTPSGASWKTASARPVSSVGVVGLGTMGRGIVISFARARIPVIAVDSDKNQLATANKMITSVLEKEASKMQQSGHPWSGPKPRLTSSVKELGGVDLVIEAVFEEMSLKKQVFAELSAVCKPEAFLCTNTSALDVDEIASSTDRPHLVIGTHFFSPAHVMKLLEVIPSQYSSPTTIATVMNLSKKIKKIGVVVGNCFGFVGNRMLNPYYNQAYFLLEEGSKPEEVDQVLEEFGFKMGPFRVSDLAGLDVGWKSRKGQGLTGPTLLPGTPARKRGNRRYCPIPDVLCELGRFGQKTGKGWYQYDKPLGRIHKPDPWLSKFLSRYRKTHHIEPRTISQDEILERCLYSLINEAFRILGEGIAASPEHIDVVYLHGYGWPRHKGGPMFYASTVGLPTVLEKLQKYYRQNPDIPQLEPSDYLKKLASQGNPPLKEWQSLAGSPSSKL

SEQ ID NO: 17329 - protein, 627 aa, Homo sapiens
MAFGGGLELALGCHYRIAHAEAQVGLPEVTLGLLPGARGTQLLPRLTGVPAALDLITSGRRILADEALKLGILDKVVNSDPVEEAIRFAQRVSDQPLESRRLCNKPIQSLPNMDSIFSEALLKMRRQHPGCLAQEACVRAVQAAVQYPYEVGIKKEEELFLYLLQSGQARALQYAFFAERKANKWSTPSGASWKTASARPVSSVGVVGLGTMGRGIVISFARARIPVIAVDSDKNQLATANKMITSVLEKEASKMQQSGHPWSGPKPRLTSSVKELGGVDLVIEAVFEEMSLKKQVFAELSAVCKPEAFLCTNTSALDVDEIASSTDRPHLVIGTHFFSPAHVMKLLEVIPSQYSSPTTIATVMNLSKKIKKIGVVVGNCFGFVGNRMLNPYYNQAYFLLEEGSKPEEVDQVLEEFGFKMGPFRVSDLAGLDVGWKSRKGQGLTGPTLLPGTPARKRGNRRYCPIPDVLCELGRFGQKTGKGWYQYDKPLGRIHKPDPWLSKFLSRYRKTHHIEPRTISQDEILERCLYSLINEAFRILGEGIAASPEHIDVVYLHGYGWPRHKGGPMFYASTVGLPTVLEKLQKYYRQNPDIPQLEPSDYLKKLASQGNPPLKEWQSLAGSPSSKL

SEQ ID NO: 17330 - protein, 481 aa, Homo sapiens
MRHSKRTHCPDWDSRESWGHESYRGSHKRKRRSHSSTQENRHCKPHHQFKESDCHYLEARSLNERDYRDRRYVDEYRNDYCEGYVPRHYHRDIESGYRIHCSKSSVRSRRSSPKRKRNRHCSSHQSRSKSHRRKRSRSIEDDEEGHLICQSGDVLRARYEIVDTLGEGAFGKVVECIDHGMDGMHVAVKIVKNVGRYREAARSEIQVLEHLNSTDPNSVFRCVQMLEWFDHHGHVCIVFELLGLSTYDFIKENSFLPFQIDHIRQMAYQICQSINFLHHNKLTHTDLKPENILFVKSDYVVKYNSKMKRDERTLKNTDIKVVDFGSATYDDEHHSTLVSTRHYRAPEVILALGWSQPCDVWSIGCILIEYYLGFTVFQTHDSKEHLAMMERILGPIPQHMIQKTRKRKYFHHNQLDWDEHSSAGRYVRRRCKPLKEFMLCHDEEHEKLFDLVRRMLEYDPTQRITLDEALQHPFFDLLKKK

SEQ ID NO: 17331 - protein, 214 aa, Homo sapiens
MEPAREPPSRARPPPPLAARPAPAPAAPRPRSPAEAEARGPEGLLRRSGSGYEGSTSWKAALEDTTTRLLLGAIAVLLFAILVVMSILASKGCIKCEAPCPEDWLLYGRKCYFFSEEPRDWNTGRQYCHTHEAVLAVIQSQKELEFMFKFTRREPWIGLRRVGDEFHWVNGDPFDPDTFTIAGPGECVFVEPTRLVSTECLMTRPWVCSKMAYT

SEQ ID NO: 17332 - protein, 302 aa, Homo sapiens
MALVASVRVPARVLLRAGARLPGAALGRTERAAGGGDGARRFGSQRVLVEPDAGAGVAVMKFKNPPVNSLSLEFLTELVISLEKLENDKSFRGVILTSDRPGVFSAGLDLTEMCGRSPAHYAGYWKAVQELWLRLYQSNLVLVSAINGACPAGGCLVALTCDYRILADNPRYCIGLNETQLGIIAPFWLKDTLENTIGHRAAERALQLGLLFPPAEALQVGIVDQVVPEEQVQSTALSAIAQWMAIPDHARQLTKAMMRKATASRLVTQRDADVQNFVSFISKDSIQKSLQMYLERLKEEKG

SEQ ID NO: 17333 - protein, 285 aa, Homo sapiens
MALVASVRVPARVLLRAGARLPGAALGRTERAAGGGDGARRFGSQRVLVEPDAGAGVAVMKFKNPPVNSLSLEFLTELVISLEKLENDKSFRGVILTSDRPGVFSAGLDLTEMCGRSPAHYAGYWKAVQELWLRLYQSNLVLVSAINGACPAGGCLVALTCDYRILADNPRLKDTLENTIGHRAAERALQLGLLFPPAEALQVGIVDQVVPEEQVQSTALSAIAQWMAIPDHARQLTKAMMRKATASRLVTQRDADVQNFVSFISKDSIQKSLQMYLERLKEEKG

SEQ ID NO: 17334 - protein, 285 aa, Homo sapiens
MLYLIGLGLGDAKDITVKGLEVVRRCSRVYLEAYTSVLTVGKEALEEFYGRKLVVADREEVEQEADNILKDADISDVAFLVVGDPFGATTHSDLVLRATKLGIPYRVIHNASIMNAVGCCGLQLYKFGETVSIVFWTDTWRPESFFDKVKKNRQNGMHTLCLLDIKVKEQSLENLIKGRKIYEPPRYMSVNQAAQQLLEIVQNQRIRGEEPAVTEETLCVGLARVGADDQKIAAGTLRQMCTVDLGEPLHSLIITGGSIHPMEMEMLSLFSIPENSSESQSINGL

SEQ ID NO: 17335 - protein, 234 aa, Homo sapiens
MLYLIGLGLGDAKDITVKGLEVVRRCSRVYLEAYTSVLTVGKEALEEFYGRKLVVADREEVEQEADNILKDADISDVAFLVVGDHLDTWRPESFFDKVKKNRQNGMHTLCLLDIKVKEQSLENLIKGRKIYEPPRYMSVNQAAQQLLEIVQNQRIRGEEPAVTEETLCVGLARVGADDQKIAAGTLRQMCTVDLGEPLHSLIITGGSIHPMEMEMLSLFSIPENSSESQSINGL

SEQ ID NO: 17336 - protein, 234 aa, Homo sapiens
MLYLIGLGLGDAKDITVKGLEVVRRCSRVYLEAYTSVLTVGKEALEEFYGRKLVVADREEVEQEADNILKDADISDVAFLVVGDPFGHLETRSFFDKVKKNRQNGMHTLCLLDIKVKEQSLENLIKGRKIYEPPRYMSVNQAAQQLLEIVQNQRIRGEEPAVTEETLCVGLARVGADDQKIAAGTLRQMCTVDLGEPLHSLIITGGSIHPMEMEMLSLFSIPENSSESQSINGL

SEQ ID NO: 17337 - protein, 285 aa, Homo sapiens
MLYLIGLGLGDAKDITVKGLEVVRRCSRVYLEAYTSVLTVGKEALEEFYGRKLVVADREEVEQEADNILKDADISDVAFLVVGDPFGATTHSDLVLRATKLGIPYRVIHNASIMNAEAAGGYRYISLERQVLLVFGQTLGGPESFFDKVKKNRQNGMHTLCLLDIKVKEQSLENLIKGRKIYEPPRYMSVNQAAQQLLEIVQNQRIRGEEPAVTEETLCVGLARVGADDQKIAAGTLRQMCTVDLGEPLHSLIITGGSIHPMEMEMLSLFSIPENSSESQSINGL

SEQ ID NO: 17338 - protein, 297 aa, Homo sapiens
MLYLIGLGLGDAKDITVKGLEVVRRCSRVYLEAYTSVLTVGKEALEEFYGRKLVVADREEVEQEADNILKDADISDVAFLVVGDPFGATTHSDLVLRATKLGIPYRVIHNASIMNAVGCCGLQLYKFGETVSIMLISVMLHSLWLVIHLDTWRPESFFDKVKKNRQNGMHTLCLLDIKVKEQSLENLIKGRKIYEPPRYMSVNQAAQQLLEIVQNQRIRGEEPAVTEETLCVGLARVGADDQKIAAGTLRQMCTVDLGEPLHSLIITGGSIHPMEMEMLSLFSIPENSSESQSINGL

SEQ ID NO: 17339 - protein, 284 aa, Homo sapiens
MLYLIGLGLGDAKDITVKGLEVVRRCSRVYLEAYTSVLTVGKEALEEFYGRKLVVADREEVEQEADNILKDADISDVAFLVVGDPFGATTHSDLVLRATKLGIPYRVIHNASIMNAVGCCGLQLYKFGETVSIVFWTDTWRPESFFDKVKKNRQNGMHTLCLLDIKVKEQSLENLIKGRKIYEPPRYMSVNQAAQQLLEIVQNQRIRGEEPVTEETLCVGLARVGADDQKIAAGTLRQMCTVDLGEPLHSLIITGGSIHPMEMEMLSLFSIPENSSESQSINGL

SEQ ID NO: 17340 - protein, 366 aa, Homo sapiens
MSRPRNNPQTSSPQDSTKDGSSFHYFQGRFELSGKSRQYPADALEPQPGIGDVKVIEKATKSMLDPAQRSHFYLVTPSLVFLCFIFDGLHKALLSVGVSKRSNIVIGNENKETGTLYASKFEDVLPTFTALEMSSILRHCCDLIGIAAGSSDPICTNSLQVQRQFKAMMISIGRPLHSESADLLISYNAGPAIDWINSRPWVGGLMFTFLFGEFESPACELLDQVKVVASKAQMMTYYTVRMFLDQCVDGSTALPAVVLEIPVFEQKKPLAKKVLGDFFEFGGVLRHPVIGVLSPQMFPNLATAANYWAKRRNSTFSGFEALDIIPGSTITFPVLQMASAQKISRGSDMDPYTLNILRGYGISGFE

SEQ ID NO: 17341 - protein, 957 aa, Homo sapiens
MQPMVMQGCPYTLPRCHDWQAADQFHHSSSLRSTCPHPQVRAAVTSPAPPQDGAGVPCLSLKLLNGSVGASGPLEPPAMNLCWNEIKKKSHNLRARLEAFSDHSGKLQLPLQEIIDWLSQKDEELSAQLPLQGDVALVQQEKETHAAFMEEVKSRGPYIYSVLESAQAFLSQHPFEELEEPHSESKDTSPKQRIQNLSRFVWKQATVASELWEKLTARCVDQHRHIERTLEQLLEIQGAMEELSTTLSQAEGVRATWEPIGDLFIDSLPEHIQAIKLFKEEFSPMKDGVKLVNDLAHQLAISDVHLSMENSQALEQINVRWKQLQASVSERLKQLQDAHRDFGPGSQHFLSSSVQVPWERAISPNKVPYYINHQAQTTCWDHPKMTELYQTLADLNNIKFSAYRTAMKLRRVQKALRLDLVTLTTALEIFNEHDLQASEHVMDVVEVIHCLTALYERLEEERGILVNVPLCVDMSLNWLLNVFDSGRSGKMRALSFKTGIACLCGTEVKEKLQYLFSQVANSGSQCDQRHLGVLLHEAIQVPRQLGEVAAFGGSNVEPSVRSCFRFSTGKPVIEASQFLEWVNLEPQSMVWLAVLHRVTIAEQVKHQTKCSICRQCPIKGFRYRSLKQFNVDICQTCFLTGRASKGNKLHYPIMEYYTPTTSSENMRDFATTLKNKFRSKHYFSKHPQRGYLPVQSVLEADYSETPASSPMWPHADTHSRIEHFASRLAEMESQNCSFFNDSLSPDDSIDEDQYLLRHSSPITDREPAFGQQAPCSVATESKGELQKILAHLEDENRILQGELRRLKWQHEEAAEAPSLADGSTEAATDHRNEELLAEARILRQHKSRLETRMQILEDHNKQLESQLQRLRELLLQPPTESDGSGSAGSSLASSPQQSEGSHPREKGQTTPDTEAADDVGSKSQDVSLCLEDIMEKLRHAFPSVRSSDVTANTLLAS

SEQ ID NO: 17342 - protein, 879 aa, Homo sapiens
MNLCWNEIKKKSHNLRARLEAFSDHSGKLQLPLQEIIDWLSQKDEELSAQLPLQGDVALVQQEKETHAAFMEEVKSRGPYIYSVLESAQAFLSQHPFEELEEPHSESKDTSPKQRIQNLSRFVWKQATVASELWEKLTARCVDQHRHIERTLEQLLEIQGAMEELSTTLSQAEGVRATWEPIGDLFIDSLPEHIQAIKLFKEEFSPMKDGVKLVNDLAHQLAISDVHLSMENSQALEQINVRWKQLQASVSERLKQLQDAHRDFGPGSQHFLSSSVQVPWERAISPNKVPYYINHQAQTTCWDHPKMTELYQTLADLNNIKFSAYRTAMKLRRVQKALRLDLVTLTTALEIFNEHDLQASEHVMDVVEVIHCLTALYERLEEERGILVNVPLCVDMSLNWLLNVFDSGRSGKMRALSFKTGIACLCGTEVKEKLQYLFSQVANSGSQCDQRHLGVLLHEAIQVPRQLGEVAAFGGSNVEPSVRSCFRFSTGKPVIEASQFLEWVNLEPQSMVWLAVLHRVTIAEQVKHQTKCSICRQCPIKGFRYRSLKQFNVDICQTCFLTGRASKGNKLHYPIMEYYTPTTSSENMRDFATTLKNKFRSKHYFSKHPQRGYLPVQSVLEADYSETPASSPMWPHADTHSRIEHFASRLAEMESQNCSFFNDSLSPDDSIDEDQYLLRHSSPITDREPAFGQQAPCSVATESKGELQKILAHLEDENRILQGELRRLKWQHEEAAEAPSLADGSTEAATDHRNEELLAEARILRQHKSRLETRMQILEDHNKQLESQLQRLRELLLQPPTESDGSGSAGSSLASSPQQSEGSHPREKGQTTPDTEAADDVGSKSQDVSLCLEDIMEKLRHAFPSVRSSDVTANTLLAS

SEQ ID NO: 17343 - protein, 272 aa, Homo sapiens
MGYFLKLYAYVNSHSLFVWVCDRSYKRSFRPMILNKIKELSRNQFSTMSHLRKDSQPSSPGDDAMDRSGLPDLQGRFELSGKNRQYPLDALEPQPSIGDIKDIKKAAKSMLDPAHKSHFHPVTPSLVFLCFIFDGLHQALLSVGVSKRSNTVVGNENEERGTPYASRFKDMPNFIALEKSSVLRHCCDLLIGIAAGSSDKICTSSLQVQRRFKAMMASIGRLSHGESADLLISCNAESAIGWISSRPWVGELMFTLLFGDFESPLHKLRKSS

SEQ ID NO: 17344 - protein, 396 aa, Homo sapiens
MDPRGTKRGAEKTEVAEPRNKLPRPAPSLPTDPALYSGPFPFYRRPSELGCFSLDAQRQYHGDARALRYYSPPPTNGPGPNFDLRDGYPDRYQPRDEEVQERLDHLLCWLLEHRGRLEGGPGWLAEAIVTWRGHLTKLLTTPYERQEGWQLAASRFQGTLYLSEVETPNARAQRLARPPLLRELMYMGYKFEQYMCADKPGSSPDPSGEVNTNVAFCSVLRSRLGSHPLLFSGEVDCTDPQAPSTQPPTCYVELKTSKEMHSPGQWRSFYRHKLLKWWAQSFLPGVPNVVAGFRNPDGFVSSLKTFPTMKMFEYVRNDRDGWNPSVCMNFCAAFLSFAQSTVVQDDPRLVHLFSWEPGGPVTVSVHQDAPYAFLPIWYVEAMTQDLPSPPKTPSPK

SEQ ID NO: 17345 - protein, 394 aa, Homo sapiens
MAMAYLAWRLARRSCPSSLQVTSFPVVQLHMNRTAMRASQKDFENSMNQVKLLKKDPGNEVKLKLYALYKQATEGPCNMPKPGVFDLINKAKWDAWNALGSLPKEAARQNYVDLVSSLSPSLESSSQVEPGTDRKSTGFETLVVTSEDGITKIMFNRPKKKNAINTEMYHEIMRALKAASKDDSIITVLTGNGDYYSSGNDLTNFTDIPPGGVEEKAKNNAVLLREFVGCFIDFPKPLIAVVNGPAVGISVTLLGLFDAVYASDRATFHTPFSHLGQSPEGCSSYTFPKIMSPAKATEMLIFGKKLTAGEACAQGLVTEVFPDSTFQKEVWTRLKAFAKLPPNALRISKEVIRKREREKLHAVNAEECNVLQGRWLSDECTNAVVNFLSRKSKL

SEQ ID NO: 17346 - protein, 359 aa, Homo sapiens
MRASQKDFENSMNQVKLLKKDPGNEVKLKLYALYKQATEGPCNMPKPGVFDLINKAKWDAWNALGSLPKEAARQNYVDLVSSLSPSLESSSQVEPGTDRKSTGFETLVVTSEDGITKIMFNRPKKKNAINTEMYHEIMRALKAASKDDSIITVLTGNGDYYSSGNDLTNFTDIPPGGVEEKAKNNAVLLREFVGCFIDFPKPLIAVVNGPAVGISVTLLGLFDAVYASDRATFHTPFSHLGQSPEGCSSYTFPKIMSPAKATEMLIFGKKLTAGEACAQGLVTEVFPDSTFQKEVWTRLKAFAKLPPNALRISKEVIRKREREKLHAVNAEECNVLQGRWLSDECTNAVVNFLSRKSKL

SEQ ID NO: 17347 - protein, 267 aa, Homo sapiens
MRVAALISGGKDSCYNMMQCIAAGHQIVALANLRPAENQVGSDELDSYMYQTVGHHAIDLYAEAMALPLYRRTIRGRSLDTRQVYTKCEGDEVEDLYELLKLVKEKEEVEGISVGAILSDYQRIRVENVCKRLNLQPLAYLWQRNQEDLLREMISSNIQAMIIKVAALGLDPDKHLGKTLDQMEPYLIELSKKYGVHVCGEGGEYETFTLDCPLFKKKIIVDSSEVVIHSADAFAPVAYLRFLELHLEDKVSSVPDNYRTSNYIYNF

SEQ ID NO: 17348 - protein, 165 aa, Homo sapiens
MRVAALISGGKDSCYNMMQCIAAGHQIVALANLRPAENQVGSDELDSYMYQTVGHHAIDLYAEAMALPLYRRTIRGRSLDTRQVYTKCEGDEVEDLYELLKLVKGITRMTLLAEYDALNLQDFHMHLKVGSQAIVYRTPNELCTHSKFDKHTFPPFISEIAKCEV

SEQ ID NO: 17349 - protein, 87 aa, Homo sapiens
MQIVQGFPADAPLCALMWTCSFLLPGLQTETPYPCTSLCLSSSQSAHPPLPVRVFSAESGYGIPFCAEPCSRVTVCHLQAVPVCMPV

SEQ ID NO: 17350 - protein, 894 aa, Homo sapiens
MALASAAPGSIFCKQLLFSLLVLTLLCDACQKVYLRVPSHLQAETLVGKVNLEECLKSASLIRSSDPAFRILEDGSIYTTHDLILSSERKSFSIFLSDGQRREQQEIKVVLSARENKSPKKRHTKDTALKRSKRRWAPIPASLMENSLGPFPQHVQQIQSDAAQNYTIFYSISGPGVDKEPFNLFYIEKDTGDIFCTRSIDREKYEQFALYGYATTADGYAPEYPLPLIIKIEDDNDNAPYFEHRVTIFTVPENCRSGTSVGKVTATDLDEPDTLHTRLKYKILQQIPDHPKHFSIHPDTGVITTTTPFLDREKCDTYQLIMEVRDMGGQPFGLFNTGTITISLEDENDNPPSFTETSYVTEVEENRIDVEILRMKVQDQDLPNTPHSKAVYKILQGNENGNFIISTDPNTNEGVLCVVKPLNYEVNRQVILQVGVINEAQFSKAASSQTPTMCTTTVTVKIIDSDEGPECHPPVKVIQSQDGFPAGQELLGYKALDPEISSGEGLRYQKLGDEDNWFEINQHTGDLRTLKVLDRESKFVKNNQYNISVVAVDAVGRSCTGTLVVHLDDYNDHAPQIDKEVTICQNNEDFAVLKPVDPDGPENGPPFQFFLDNSASKNWNIEEKDGKTAILRQRQNLDYNYYSVPIQIKDRHGLVATHMLTVRVCDCSTPSECRMKDKSTRDVRPNVILGRWAILAMVLGSVLLLCILFTCFCVTAKRTVKKCFPEDIAQQNLIVSNTEGPGEEVTEANIRLPMQTSNICDTSMSVGTVGGQGIKTQQSFEMVKGGYTLDSNKGGGHQTLESVKGVGQGDTGRYAYTDWQSFTQPRLGEKVYLCGQDEEHKHCEDYVCSYNYEGKGSLAGSVGCCSDRQEEEGLEFLDHLEPKFRTLAKTCIKK

SEQ ID NO: 17351 - protein, 840 aa, Homo sapiens
MALASAAPGSIFCKQLLFSLLVLTLLCDACQKVYLRVPSHLQAETLVGKVNLEECLKSASLIRSSDPAFRILEDGSIYTTHDLILSSERKSFSIFLSDGQRREQQEIKVVLSARENKSPKKRHTKDTALKRSKRRWAPIPASLMENSLGPFPQHVQQIQSDAAQNYTIFYSISGPGVDKEPFNLFYIEKDTGDIFCTRSIDREKYEQFALYGYATTADGYAPEYPLPLIIKIEDDNDNAPYFEHRVTIFTVPENCRSGTSVGKVTATDLDEPDTLHTRLKYKILQQIPDHPKHFSIHPDTGVITTTTPFLDREKCDTYQLIMEVRDMGGQPFGLFNTGTITISLEDENDNPPSFTETSYVTEVEENRIDVEILRMKVQDQDLPNTPHSKAVYKILQGNENGNFIISTDPNTNEGVLCVVKPLNYEVNRQVILQVGVINEAQFSKAASSQTPTMCTTTVTVKIIDSDEGPECHPPVKVIQSQDGFPAGQELLGYKALDPEISSGEGLRYQKLGDEDNWFEINQHTGDLRTLKVLDRESKFVKNNQYNISVVAVDAVGRSCTGTLVVHLDDYNDHAPQIDKEVTICQNNEDFAVLKPVDPDGPENGPPFQFFLDNSASKNWNIEEKDGKTAILRQRQNLDYNYYSVPIQIKDRHGLVATHMLTVRVCDCSTPSECRMKDKSTRDVRPNVILGRWAILAMVLGSVLLLCILFTCFCVTAKRTVKKCFPEDIAQQNLIVSNTEGPGEEVTEANIRLPMQTSNICDTSMSVGTVGGQGIKTQQSFEMVKGGYTLDSNKGGGHQTLESVKGVGQGDTGRYAYTDWQSFTQPRLGEESIRGHTLIKN

SEQ ID NO: 17352 - protein, 452 aa, Homo sapiens
MMGCFALQTVDTELTADSVEWCPLQGCRHLLACGTYQLRRPEDRPAGPQNKGGMEVKEPQVRLGRLFLYSFNDNNSIHPLVEVQRKDTSAILDMKWCHIPVAGHALLGLADASGSIQLLRLVESEKSHVLEPLSSLALEEQCLALSLDWSTGKTGRAGDQPLKIISSDSTGQLHLLMVNETRPRLQKVASWQAHQFEAWIAAFNYWHPEIVYSGGDDGLLRGWDTRVPGKFLFTSKRHTMGVCSIQSSPHREHILATGSYDEHILLWDTRNMKQPLADTPVQGGVWRIKWHPFHHHLLLAACMHSGFKILNCQKAMEERQEATVLTSHTLPDSLVYGADWSWLLFRSLQRAPSWSFPSNLGTKTADLKGASELPTPCHECREDNDGEGHARPQSGMKPLTEGMRKNGTWLQATAATTRDCGVNPEEADSAFSLLATCSFYDHALHLWEWEGN

SEQ ID NO: 17353 - protein, 901 aa, Homo sapiens
MEAARPSGSWNGALCRLLLLTLAILIFASDACKNVTLHVPSKLDAEKLVGRVNLKECFTAANLIHSSDPDFQILEDGSVYTTNTILLSSEKRSFTILLSNTENQEKKKIFVFLEHQTKVLKKRHTKEKVLRRAKRRWAPIPCSMLENSLGPFPLFLQQVQSDTAQNYTIYYSIRGPGVDQEPRNLFYVERDTGNLYCTRPVDREQYESFEIIAFATTPDGYTPELPLPLIIKIEDENDNYPIFTEETYTFTIFENCRVGTTVGQVCATDKDEPDTMHTRLKYSIIGQVPPSPTLFSMHPTTGVITTTSSQLDRELIDKYQLKIKVQDMDGQYFGLQTTSTCIINIDDVNDHLPTFTRTSYVTSVEENTVDVEILRVTVEDKDLVNTANWRANYTILKGNENGNFKIVTDAKTNEGVLCVVKPLNYEEKQQMILQIGVVNEAPFSREASPRSAMSTATVTVNVEDQDEGPECNPPIQTVRMKENAEVGTTSNGYKAYDPETRSSSGIRYKKLTDPTGWVTIDENTGSIKVFRSLDREAETIKNGIYNITVLASDQGGRTCTGTLGIILQDVNDNSPFIPKKTVIICKPTMSSAEIVAVDPDEPIHGPPFDFSLESSTSEVQRMWRLKAINDTAARLSYQNDPPFGSYVVPITVRDRLGMSSVTSLDVTLCDCITENDCTHRVDPRIGGGGVQLGKWAILAILLGIALLFCILFTLVCGASGTSKQPKVIPDDLAQQNLIVSNTEAPGDDKVYSANGFTTQTVGASAQGVCGTVGSGIKNGGQETIEMVKGGHQTSESCRGAGHHHTLDSCRGGHTEVDNCRYTYSEWHSFTQPRLGEKVYLCNQDENHKHAQDYVLTYNYEGRGSVAGSVGCCSERQEEDGLEFLDNLEPKFRTLAEACMKR

SEQ ID NO: 17354 - protein, 847 aa, Homo sapiens
MEAARPSGSWNGALCRLLLLTLAILIFASDACKNVTLHVPSKLDAEKLVGRVNLKECFTAANLIHSSDPDFQILEDGSVYTTNTILLSSEKRSFTILLSNTENQEKKKIFVFLEHQTKVLKKRHTKEKVLRRAKRRWAPIPCSMLENSLGPFPLFLQQVQSDTAQNYTIYYSIRGPGVDQEPRNLFYVERDTGNLYCTRPVDREQYESFEIIAFATTPDGYTPELPLPLIIKIEDENDNYPIFTEETYTFTIFENCRVGTTVGQVCATDKDEPDTMHTRLKYSIIGQVPPSPTLFSMHPTTGVITTTSSQLDRELIDKYQLKIKVQDMDGQYFGLQTTSTCIINIDDVNDHLPTFTRTSYVTSVEENTVDVEILRVTVEDKDLVNTANWRANYTILKGNENGNFKIVTDAKTNEGVLCVVKPLNYEEKQQMILQIGVVNEAPFSREASPRSAMSTATVTVNVEDQDEGPECNPPIQTVRMKENAEVGTTSNGYKAYDPETRSSSGIRYKKLTDPTGWVTIDENTGSIKVFRSLDREAETIKNGIYNITVLASDQGGRTCTGTLGIILQDVNDNSPFIPKKTVIICKPTMSSAEIVAVDPDEPIHGPPFDFSLESSTSEVQRMWRLKAINDTAARLSYQNDPPFGSYVVPITVRDRLGMSSVTSLDVTLCDCITENDCTHRVDPRIGGGGVQLGKWAILAILLGIALLFCILFTLVCGASGTSKQPKVIPDDLAQQNLIVSNTEAPGDDKVYSANGFTTQTVGASAQGVCGTVGSGIKNGGQETIEMVKGGHQTSESCRGAGHHHTLDSCRGGHTEVDNCRYTYSEWHSFTQPRLGEESIRGHTLIKN

SEQ ID NO: 17355 - protein, 306 aa, Homo sapiens
MDTPPLSDSESESDESLVTDRELQDAFSRGLLKPGLNVVLEGPKKAVNDVNGLKQCLAEFKRDLEWVERLDVTLGPVPEIGGSEAPAPQNKDQKAVDPEDDFQREMSFYRQAQAAVLAVLPRLHQLKVPTKRPTDYFAEMAKSDLQMQKIRQKLQTKQAAMERSEKAKQLRALRKYGKKVQTEVLQKRQQEKAHMMNAIKKYQKGFSDKLDFLEGDQKPLAQRKKAGAKGQQMRKGPSAKRRYKNQKFGFGGKKKGSKWNTRESYDDVSSFRAKTAHGRGLKRPGKKGSNKRPGKRTREKMKNRTH

SEQ ID NO: 17356 - protein, 896 aa, Homo sapiens
MAAAGPRRSVRGAVCLHLLLTLVIFSRAGEACKKVILNVPSKLEADKIIGRVNLEECFRSADLIRSSDPDFRVLNDGSVYTARAVALSDKKRSFTIWLSDKRKQTQKEVTVLLEHQKKVSKTRHTRETVLRRAKRRWAPIPCSMQENSLGPFPLFLQQVESDAAQNYTVFYSISGRGVDKEPLNLFYIERDTGNLFCTRPVDREEYDVFDLIAYASTADGYSADLPLPLPIRVEDENDNHPVFTEAIYNFEVLESSRPGTTVGVVCATDRDEPDTMHTRLKYSILQQTPRSPGLFSVHPSTGVITTVSHYLDREVVDKYSLIMKVQDMDGQFFGLIGTSTCIITVTDSNDNAPTFRQNAYEAFVEENAFNVEILRIPIEDKDLINTANWRVNFTILKGNENGHFKISTDKETNEGVLSVVKPLNYEENRQVNLEIGVNNEAPFARDIPRVTALNRALVTVHVRDLDEGPECTPAAQYVRIKENLAVGSKINGYKAYDPENRNGNGLRYKKLHDPKGWITIDEISGSIITSKILDREVETPKNELYNITVLAIDKDDRSCTGTLAVNIEDVNDNPPEILQEYVVICKPKMGYTDILAVDPDEPVHGAPFYFSLPNTSPEISRLWSLTKVNDTAARLSYQKNAGFQEYTIPITVKDRAGQAATKLLRVNLCECTHPTQCRATSRSTGVILGKWAILAILLGIALLFSVLLTLVCGVFGATKGKRFPEDLAQQNLIISNTEAPGDDRVCSANGFMTQTTNNSSQGFCGTMGSGMKNGGQETIEMMKGGNQTLESCRGAGHHHTLDSCRGGHTEVDNCRYTYSEWHSFTQPRLGEKLHRCNQNEDRMPSQDYVLTYNYEGRGSPAGSVGCCSEKQEEDGLDFLNNLEPKFITLAEACTKR

SEQ ID NO: 17357 - protein, 839 aa, Homo sapiens
MAAAGPRRSVRGAVCLHLLLTLVIFSRAGEACKKVILNVPSKLEADKIIGRVNLEECFRSADLIRSSDPDFRVLNDGSVYTARAVALSDKKRSFTIWLSDKRKQTQKEVTVLLEHQKKVSKTRHTRETVLRRAKRRWAPIPCSMQENSLGPFPLFLQQVESDAAQNYTVFYSISGRGVDKEPLNLFYIERDTGNLFCTRPVDREEYDVFDLIAYASTADGYSADLPLPLPIRVEDENDNHPVFTEAIYNFEVLESSRPGTTVGVVCATDRDEPDTMHTRLKYSILQQTPRSPGLFSVHPSTGVITTVSHYLDREVVDKYSLIMKVQDMDGQFFGLIGTSTCIITVTDSNDNAPTFRQNAYEAFVEENAFNVEILRIPIEDKDLINTANWRVNFTILKGNENGHFKISTDKETNEGVLSVVKPLNYEENRQVNLEIGVNNEAPFARDIPRVTALNRALVTVHVRDLDEGPECTPAAQYVRIKENLAVGSKINGYKAYDPENRNGNGLRYKKLHDPKGWITIDEISGSIITSKILDREVETPKNELYNITVLAIDKDDRSCTGTLAVNIEDVNDNPPEILQEYVVICKPKMGYTDILAVDPDEPVHGAPFYFSLPNTSPEISRLWSLTKVNDTAARLSYQKNAGFQEYTIPITVKDRAGQAATKLLRVNLCECTHPTQCRATSRSTGVILGKWAILAILLGIALLFSVLLTLVCGVFGATKGKRFPEDLAQQNLIISNTEAPGDDRVCSANGFMTQTTNNSSQGFCGTMGSGMKNGGQETIEMMKGGNQTLESCRGAGHHHTLDSCRGGHTEVDNCRYTYSEWHSFTQPRLGEESIRGHTG

SEQ ID NO: 17358 - protein, 205 aa, Homo sapiens
MWLLPALLLLCLSGCLSLKGPGSVTGTAGDSLTVWCQYESMYKGYNKYWCRGQYDTSCESIVETKGEEKVERNGRVSIRDHPEALAFTVTMQNLNEDDAGSYWCKIQTVWVLDSWSRDPSDLVRVYVSPAITTPRRTTHPATPPIFLVVNPGRNLSTGEVLTQNSGFRLSSPHFLLVVLLKLPLLLSMLGAVFWVNRPQWAPPGR

SEQ ID NO: 17359 - protein, 84 aa, Homo sapiens
MATGTDQVVGLGLVAVSLIIFTYYTAWVILLPFIDSQHVIHKYFLPRAYAVAIPLAAGLLLLLFVGLFISYVMLKTKRVTKKAQ

SEQ ID NO: 17360 - protein, 215 aa, Homo sapiens
MGLEKPQSKLEGGMHPQLIPSVIAVVFILLLSVCFIASCLVTHHNFSRCKRGTGVHKLEHHAKLKCIKEKSELKSAEGSTWNCCPIDWRAFQSNCYFPLTDNKTWAESERNCSGMGAHLMTISTEAEQNFIIQFLDRRLSYFLGLRDENAKGQWRWVDQTPFNPRRVFWHKNEPDNSQGENCVVLVYNQDKWAWNDVPCNFEASRICKIPGTTLN

SEQ ID NO: 17361 - protein, 438 aa, Homo sapiens
MGGCAGSRRRFSDSEGEETVPEPRLPLLDHQGAHWKNAVGFWLLGLCNNFSYVVMLSAAHDILSHKRTSGNQSHVDPGPTPIPHNSSSRFDCNSVSTAAVLLADILPTLVIKLLAPLGLHLLPYSPRVLVSGICAAGSFVLVAFSHSVGTSLCGVVFASISSGLGEVTFLSLTAFYPRAVISWWSSGTGGAGLLGALSYLGLTQAGLSPQQTLLSMLGIPALLLASYFLLLTSPEAQDPGGEEEAESAARQPLIRTEAPESKPGSSSSLSLRERWTVFKGLLWYIVPLVVVYFAEYFINQGLFELLFFWNTSLSHAQQYRWYQMLYQAGVFASRSSLRCCRIRFTWALALLQCLNLVFLLADVWFGFLPSIYLVFLIILYEGLLGGAAYVNTFHNIALETSDEHREFAMAATCISDTLGISLSGLLALPLHDFLCQLS

SEQ ID NO: 17362 - protein, 390 aa, Homo sapiens
MGGCAGSRRRFSDSEGEETVPEPRLPLLDHQGAHWKNAVGFWLLGLCNNFSYVVMLSAAHDILSHKRTSGNQSHVDPGPTPIPHNSSSRFDCNSVSTAAVLLADILPTLVIKLLAPLGLHLLPYSPRVLVSGICAAGSFVLVAFSHSVGTSLCGVVFASISSGLGEVTFLSLTAFYPSYFLLLTSPEAQDPGGEEEAESAARQPLIRTEAPESKPGSSSSLSLRERWTVFKGLLWYIVPLVVVYFAEYFINQGLFELLFFWNTSLSHAQQYRWYQMLYQAGVFASRSSLRCCRIRFTWALALLQCLNLVFLLADVWFGFLPSIYLVFLIILYEGLLGGAAYVNTFHNIALETSDEHREFAMAATCISDTLGISLSGLLALPLHDFLCQLS

SEQ ID NO: 17363 - protein, 421 aa, Homo sapiens
MGGCAGSRRRFSDSEGEETVPEPRLPLLDHQGAHWKNAVGFWLLGLCNNFSYVVMLSAAHDILSHKRTSGNQSHVDPGPTPIPHNSSSRFDCNSVSTAAVLLADILPTLVIKLLAPLGLHLLPYSPRVLVSGICAAGSFVLVAFSHSVGTSLCGVVFASISSGLGEVTFLSLTAFYPRAVISWWSSGTGGAGLLGALSYLGLTQAGLSPQQTLLSMLGIPALLLASYFLLLTSPEAQDPGGEEEAESAARQPLIRTEAPESKPGSSSSLSLRERWTVFKVRMMAGFELLFFWNTSLSHAQQYRWYQMLYQAGVFASRSSLRCCRIRFTWALALLQCLNLVFLLADVWFGFLPSIYLVFLIILYEGLLGGAAYVNTFHNIALETSDEHREFAMAATCISDTLGISLSGLLALPLHDFLCQLS

SEQ ID NO: 17364 - protein, 321 aa, Homo sapiens
MGGCAGSRRRFSDSEGEETVPEPRLPLLDHQGAHWKNAVGFWLLGLCNNFSYVVMLSAAHDILSHKRTSGNQSHVDPGPTPIPHNSSSRFDCNSVSTAAVLLADILPTLVIKLLAPLGLHLLPYSPRVLVSGICAAGSFVLVAFSHSVGTSLCGVVFASISSGLGEVTFLSLTAFYPRAVISWWSSGTGGAGLLGALSYLGLTQAGLSPQQTLLSMLGIPALLLASYFLLLTSPEAQDPGGEEEAESAARQPLIRTEAPESKPGSSSSLSLRERWTVFKGLLWYIVPLVVVYFAEYFINQGLFELLFFWNTSLSHAQQYRW

SEQ ID NO: 17365 - protein, 253 aa, Homo sapiens
MGGCAGSRRRFSDSEGEETVPEPRLPLLDHQGAHWKNAVGFWLLGLCNNFSYVVMLSAAHDILSHKRTSGNQSHVDPGPTPIPHNSSSRFDCNSVSTAAVLLADILPTLVIKLLAPLGLHLLPYSPRVLVSGICAAGSFVLVAFSHSVGTSLCGSSSSLSLRERWTVFKGLLWYIVPLVVVYFAEYFINQGLFELLFFWNTSLSHAQQYRWYQMLYQAGVFASRSSLRCCRIRFTWALALLQMESRSVAQAGM

SEQ ID NO: 17366 - protein, 339 aa, Homo sapiens
MGGCAGSRRRFSDSEGEETVPEPRLPLLDHQGAHWKNAVGFWLLGLCNNFSYVVMLSAAHDILSHKRTSGNQSHVDPGPTPIPHNSSSRFDCNSVSTAPPGSRQWDLCCWKLRPGCLFSFCGDQPVCYFLLLTSPEAQDPGGEEEAESAARQPLIRTEAPESKPGSSSSLSLRERWTVFKGLLWYIVPLVVVYFAEYFINQGLFELLFFWNTSLSHAQQYRWYQMLYQAGVFASRSSLRCCRIRFTWALALLQCLNLVFLLADVWFGFLPSIYLVFLIILYEGLLGGAAYVNTFHNIALETSDEHREFAMAATCISDTLGISLSGLLALPLHDFLCQLS

SEQ ID NO: 17367 - protein, 414 aa, Homo sapiens
MGGCAGSRRRFSDSEGEETVPEPRLPLLDHQGAHWKNAVGFWLLGLCNNFSYVVMLSAAHDILSHKRTSGNQSHAVLLADILPTLVIKLLAPLGLHLLPYSPRVLVSGICAAGSFVLVAFSHSVGTSLCGVVFASISSGLGEVTFLSLTAFYPRAVISWWSSGTGGAGLLGALSYLGLTQAGLSPQQTLLSMLGIPALLLASYFLLLTSPEAQDPGGEEEAESAARQPLIRTEAPESKPGSSSSLSLRERWTVFKGLLWYIVPLVVVYFAEYFINQGLFELLFFWNTSLSHAQQYRWYQMLYQAGVFASRSSLRCCRIRFTWALALLQCLNLVFLLADVWFGFLPSIYLVFLIILYEGLLGGAAYVNTFHNIALETSDEHREFAMAATCISDTLGISLSGLLALPLHDFLCQLS

SEQ ID NO: 17368 - protein, 295 aa, Homo sapiens
MTEGVLPGLYLGNFIDAKDLDQLGRNKITHIISIHESPQPLLQDITYLRIPVADTPEVPIKKHFKECINFIHCCRLNGGNCLVHCFAGISRSTTIVTAYVMTVTGLGWRDVLEAIKATRPIANPNPGFRQQLEEFGWASSQKGARHRTSKTSGAQCPPMTSATCLLAARVALLSAALVREATGRTAQRCRLSPRAAAERLLGPPPHVAAGWSPDPKYQICLCFGEEDPGPTQHPKEQLIMADVQVQLRPGSSSCTLSASTERPDGSSTPGNPDGITHLQCSCLHPKRAASSSCTR

SEQ ID NO: 17369 - protein, 232 aa, Homo sapiens
MTEGVLPGLYLGNFIDAKDLDQLGRNKITHIISIHESPQPLLQDITYLRIPVADTPEVPIKKHFKECINFIHCCRLNGGNCLVHCFAGISRSTTIVTAYVMTVTGLGWRDVLEAIKATRPIANPNPGFRQQLEEFGWASSQKLRRQLEERFGESPFRDEEELRALLPLCKRCRQGSATSASSAGPHSAASEGTVQRLVPRTPREAHRPLPLLARVKQTFSCLPRCLSRKGGK

SEQ ID NO: 17370 - protein, 235 aa, Homo sapiens
MGNGMTKVLPGLYLGNFIDAKDLDQLGRNKITHIISIHESPQPLLQDITYLRIPVADTPEVPIKKHFKECINFIHCCRLNGGNCLVHCFAGISRSTTIVTAYVMTVTGLGWRDVLEAIKATRPIANPNPGFRQQLEEFGWASSQKLRRQLEERFGESPFRDEEELRALLPLCKRCRQGSATSASSAGPHSAASEGTVQRLVPRTPREAHRPLPLLARVKQTFSCLPRCLSRKGGK

SEQ ID NO: 17371 - protein, 132 aa, Homo sapiens
MTVTGLGWRDVLEAIKATRPIANPNPGFRQQLEEFGWASSQKLRRQLEERFGESPFRDEEELRALLPLCKRCRQGSATSASSAGPHSAASEGTVQRLVPRTPREAHRPLPLLARVKQTFSCLPRCLSRKGGK

SEQ ID NO: 17372 - protein, 1040 aa, Homo sapiens
MDWLFFRNICLLIILMVVMEVNSEFIVEVKEFDIENGTTKWQTVRRQKREWIKFAAACREGEDNSKRNPIAKIRSDCESNQKITYRISGVGIDRPPYGVFTINPRTGEINITSVVDREITPLFLIYCRALNSRGEDLERPLELRVKVMDINDNAPVFSQSVYTASIEENSDANTLVVKLCATDADEENHLNSKIAYKIVSQEPSGAPMFILNRYTGEVCTMSSFLDREQHSMYNLVVRGSDRDGAADGLSSECDCRIKVLDVNDNFPTLEKTSYSASIEENCLSSELIRLQAIDLDEEGTDNWLAQYLILSGNDGNWFDIQTDPQTNEGILKVVKMLDYEQAPNIQLSIGVKNQADFHYSVASQFQMHPTPVRIQVVDVREGPAFHPSTMAFSVREGIKGSSLLNYVLGTYTAIDLDTGNPATDVRYIIGHDAGSWLKIDSRTGEIQFSREFDKKSKYIINGIYTAEILAIDDGSGKTATGTICIEVPDINDYCPNIFPERRTICIDSPSVLISVNEHSYGSPFTFCVVDEPPGIADMWDVRSTNATSAILTAKQVLSPGFYEIPILVKDSYNRACELAQMVQLYACDCDDNHMCLDSGAAGIYTEDITGDTYGPVTEDQAGVSNVGLGPAGIGMMVLGILLLILAPLLLLLCCCKQRQPEGLGTRFAPVPEGGEGVMQSWRIEGAHPEDRDVSNICAPMTASNTQDRMDSSEIYTNTYAAGGTVEGGVSGVELNTGMGTAVGLMAAGAAGASGAARKRSSTMGTLRDYADADINMAFLDSYFSEKAYAYADEDEGRPANDCLLIYDHEGVGSPVGSIGCCSWIVDDLDESCMETLDPKFRTLAEICLNTEIEPFPSHQACIPISTDLPLLGPNYFVNESSGLTPSEVEFQEEMAASEPVVHGDIIVTETYGNADPCVQPTTIIFDPQLAPNVVVTEAVMAPVYDIQGNICVPAELADYNNVIYAERVLASPGVPDMSNSSTTEGCMGPVMSGNILVGPEIQVMQMMSPDLPIGQTVGSTSPMTSRHRVTRYSNIHYTQQ

SEQ ID NO: 17373 - protein, 1059 aa, Homo sapiens
MDWLFFRNICLLIILMVVMEVNSEFIVEVKEFDIENGTTKWQTVRRQKREWIKFAAACREGEDNSKRNPIAKIRSDCESNQKITYRISGVGIDRPPYGVFTINPRTGEINITSVVDREITPLFLIYCRALNSRGEDLERPLELRVKVMDINDNAPVFSQSVYTASIEENSDANTLVVKLCATDADEENHLNSKIAYKIVSQEPSGAPMFILNRYTGEVCTMSSFLDREQHSMYNLVVRGSDRDGAADGLSSECDCRIKVLDVNDNFPTLEKTSYSASIEENCLSSELIRLQAIDLDEEGTDNWLAQYLILSGNDGNWFDIQTDPQTNEGILKVVKMLDYEQAPNIQLSIGVKNQADFHYSVASQFQMHPTPVRIQVVDVREGPAFHPSTMAFSVREGIKGSSLLNYVLGTYTAIDLDTGNPATDVRYIIGHDAGSWLKIDSRTGEIQFSREFDKKSKYIINGIYTAEILAIDDGSGKTATGTICIEVPDINDYCPNIFPERRTICIDSPSVLISVNEHSYGSPFTFCVVDEPPGIADMWDVRSTNATSAILTAKQVLSPGFYEIPILVKDSYNRACELAQMVQLYACDCDDNHMCLDSGAAGIYTEDITGDTYGPVTEDQAGVSNVGLGPAGIGMMVLGILLLILAPLLLLLCCCKQRQPEGLGTRFAPVPEGGEGVMQSWRIEGAHPEDRLFSAYALPGGGGTADGGGSVLGRCALQATPALLNQHPPFSEIYTNTYAAGGTVEGGVSGVELNTGMGTAVGLMAAGAAGASGAARKRSSTMGTLRDYADADINMAFLDSYFSEKAYAYADEDEGRPANDCLLIYDHEGVGSPVGSIGCCSWIVDDLDESCMETLDPKFRTLAEICLNTEIEPFPSHQACIPISTDLPLLGPNYFVNESSGLTPSEVEFQEEMAASEPVVHGDIIVTETYGNADPCVQPTTIIFDPQLAPNVVVTEAVMAPVYDIQGNICVPAELADYNNVIYAERVLASPGVPDMSNSSTTEGCMGPVMSGNILVGPEIQVMQMMSPDLPIGQTVGSTSPMTSRHRVTRYSNIHYTQQ

SEQ ID NO: 17374 - protein, 139 aa, Homo sapiens
MEAVVFVFSLLDCCALIFLSVYFIITLSDLECDYINARSCCSKLNKWVIPELIGHTIVTVLLLMSLHWFIFLLNLPVATWNIYRYIMVPSGNMGVFDPTEIHNRGQLKSHMKEAMIKLGFHLLCFFMYLYSMILALIND

SEQ ID NO: 17375 - protein, 92 aa, Homo sapiens
MEAVVFVFSLLDCCALIFLSVYFIITLSDLECDYINARSCCSKLNKWVIPELIGHTIVTVLLLMSLHWFIFLLNLPVATWNIYRMILALIND

SEQ ID NO: 17376 - protein, 665 aa, Homo sapiens
MAHEMIGTQIVTERLVALLESGTEKVLLIDSRPFVEYNTSHILEAININCSKLMKRRLQQDKVLITELIQHSAKHKVDIDCSQKVVVYDQSSQDVASLSSDCFLTVLLGKLEKSFNSVHLLAGGFAEFSRCFPGLCEGKSTLVPTCISQPCLPVANIGPTRILPNLYLGCQRDVLNKELMQQNGIGYVLNASNTCPKPDFIPESHFLRVPVNDSFCEKILPWLDKSVDFIEKAKASNGCVLVHCLAGISRSATIAIAYIMKRMDMSLDEAYRFVKEKRPTISPNFNFLGQLLDYEKKIKNQTGASGPKSKLKLLHLEKPNEPVPAVSEGGQKSETPLSPPCADSATSEAAGQRPVHPASVPSVPSVQPSLLEDSPLVQALSGLHLSADRLEDSNKLKRSFSLDIKSVSYSASMAASLHGFSSSEDALEYYKPSTTLDGTNKLCQFSPVQELSEQTPETSPDKEEASIPKKLQTARPSDSQSKRLHSVRTSSSGTAQRSLLSPLHRSGSVEDNYHTSFLFGLSTSQQHLTKSAGLGLKGWHSDILAPQTSTPSLTSSWYFATESSHFYSASAIYGGSASYSAYSCSQLPTCGDQVYSVRRRQKPSDRADSRRSWHEESPFEKQFKRRSCQMEFGESIMSENRSREELGKVGSQSSFSGSMEIIEVS

SEQ ID NO: 17377 - protein, 143 aa, Homo sapiens
MAHEMIGTQIVTERLVALLESGTEKVLLIDSRPFVEYNTSHILEAININCSKLMKRRLQQDKVLITELIQHSAKHKVDIDCSQKVVVYDQSSQDVASLSSDCFLTVLLGKLEKSFNSVHLLAGADAAEWDWLCVKCQQYLSKA

SEQ ID NO: 17378 - protein, 260 aa, Homo sapiens
MNSAAGFSHLDRRERVLKLGESFEKQPRCAFHTVRYDFKPASIDTSSEGYLEVGEGEQVTITLPNIEGSTPPVTVFKGSKKPYLKECILIINHDTGECRLEKLSSNITVKKTRVEGSSKIQYRKEQQQQQMWNSARTPNLVKHSPSEDKMSPASPIDDIERELKAEASLMDQMSSCDSSSDSKSSSSSSSEDSSSDSEDEDCKSSTSDTGNCVSGHPTMTQYRIPDIDASHNRFRDNSGLLMNTLRNDLQLSESGSDSDD

SEQ ID NO: 17379 - protein, 130 aa, Homo sapiens
MWNSARTPNLVKHSPSEDKMSPASPIDDIERELKAEASLMDQMSSCDSSSDSKSSSSSSSEDSSSDSEDEDCKSSTSDTGNCVSGHPTMTQYRIPDIDASHNRFRDNSGLLMNTLRNDLQLSESGSDSDD

SEQ ID NO: 17380 - protein, 358 aa, Homo sapiens
MAQEVDTAQGAEMRRGAGAARGRASWCWALALLWLAVVPGWSRVSGIPSRRHWPVPYKRFDFRPKPDPYCQAKYTFCPTGSPIPVMEGDDDIEVFRLQAPVWEFKYGDLLGHLKIMHDAIGFRSTLTGKNYTMEWYELFQLGNCTFPHLRPEMDAPFWCNQGAACFFEGIDDVHWKENGTLVQVATISGNMFNQMAKWVKQDNETGIYYETWNVKASPEKGAETWFDSYDCSKFVLRTFNKLAEFGAEFKNIETNYTRIFLYSGEPTYLGNETSVFGPTGNKTLGLAIKRFYYPFKPHLPTKEFLLSLLQIFDAVIVHKQFYLFYNFEYWFLPMKFPFIKITYEEIPLPIRNKTLSGL

SEQ ID NO: 17381 - protein, 188 aa, Homo sapiens
MTAPSCAFPVQFRQPSVSGLSQITKSLYISNGVAANNKLMLSSNQITMVINVSVEVVNTLYEDIQYMQVPVADSPNSRLCDFFDPIADHIHSVEMKQGRTLLHCAAGVSRSAALCLAYLMKYHAMSLLDAHTWTKSCRPIIRPNSGFWEQLIHYEFQLFGKNTVHMVSSPVGMIPDIYEKEVRLMIPL

SEQ ID NO: 17382 - protein, 428 aa, Homo sapiens
MNRQGNRKTTKEGSNDLKFQNFSLPKNRSWPRINSATGQYQRMNKPLLDWERNFAAVLDGAKGHSDDDYDDPELRMEETWQSIKILPARPIKESEYADTHYFKVAMDTPLPLDTRTSISIGQPTWNTQTRLERVDKPISKDVRSQNIKGDASVRKNKIPLPPPRPLITLPKKYQPLPPEPESSRPPLSQRHTFPEVQRMPSQISLRDLSEVLEAEKVPHNQRKPESTHLLENQNTQEIPLAISSSSFTTSNHSVQNRDHRGGMQPCSPQRCQPPASCSPHENILPYKYTSWRPPFPKRSDRKDVQHNEWYIGEYSRQAVEEAFMKENKDGSFLVRDCSTKSKEEPYVLAVFYENKVYNVKIRFLERNQQFALGTGLRGDEKFDSVEDIIEHYKNFPIILIDGKDKTGVHRKQCHLTQPLPLTRHLLPL

SEQ ID NO: 17383 - protein, 169 aa, Homo sapiens
MNKPLLDWERNFAAVLDGAKGHSDDDYDDPELRMEETWQSIKILPARPIKESEYADTHYFKVAMDTPLPLDTRTSISIGQPTWNTQTRLERVDKPISKDVRSQNIKGDASVRKNKIPLPPPRPLITLPKKYQPLPPEPESSRPPLSQRHTFPEVQRMPSQISLRDLSEP

SEQ ID NO: 17384 - protein, 391 aa, Homo sapiens
MNRQGNRKTTKEGSNDLKFQNFSLPKNRSWPRINSATGQYQRMNKPLLDWERNFAAVLDGAKGHSDDDYDDPELRMEETWQSIKILPARPIKESEYADTHYFKVAMDTPLPLDTRTSISIGQPTWNTQTRLERVDKPISKDVRSQNRPPLSQRHTFPEVQRMPSQISLRDLSEVLEAEKVPHNQRKPESTHLLENQNTQEIPLAISSSSFTTSNHSVQNRDHRGGMQPCSPQRCQPPASCSPHENILPYKYTSWRPPFPKRSDRKDVQHNEWYIGEYSRQAVEEAFMKENKDGSFLVRDCSTKSKEEPYVLAVFYENKVYNVKIRFLERNQQFALGTGLRGDEKFDSVEDIIEHYKNFPIILIDGKDKTGVHRKQCHLTQPLPLTRHLLPL

SEQ ID NO: 17385 - protein, 176 aa, Homo sapiens
MGPAEAGRRGAASPVPPPLVRVAPSLFLGSARAAGAEEQLARAGVTLCVNVSRQQPGPRAPGVAELRVPVFDDPAEDLLAHLEPTCAAMEAAVRAGGACLVYCKNGRSRSAAVCTAYLMRHRGLSLAKAFQMVKSARPVAEPNPGFWSQLQKYEEALQAQSCLQGEPPALGLGPEA

SEQ ID NO: 17386 - protein, 555 aa, Homo sapiens
MRLIGMPKEKYDPPDPRRIYTIMSAEEVANGKKSHWAELEISGRVRSLSTSLWSLTHLTALHLNDNYLSRIPPDIAKLHNLVYLDLSSNKLRSLPAELGNMVSLRELLLNNNLLRVLPYELGRLFQLQTLGLKGNPLSQDILNLYQDPDGTRKLLNFMLDNLAVHPEQLPPRPWITLKERDQILPSASFTVMCYNVLCDKYATRQLYGYCPSWALNWEYRKKGIMEEIVNCDADIISLQEVETEQYFTLFLPALKERGYDGFFSPKSRAKIMSEQERKHVDGCAIFFKTEKFTLVQKHTVEFNQVAMANSDGSEAMLNRVMTKDNIGVAVVLEVHKELFGAGMKPIHAADKQLLIVANAHMHWDPEYSDVKLIQTMMFVSEVKNILEKASSRPGSPTADPNSIPLVLCADLNSLPDSGVVEYLSNGGVADNHKDFKELRYNECLMNFSCNGKNGSSEGRITHGFQLKSAYENNLMPYTNYTFDFKGVIDYIFYSKTHMNVLGVLGPLDPQWLVENNITGCPHPHIPSDHFSLLTQLELHPPLLPLVNGVHLPNRR

SEQ ID NO: 17387 - protein, 475 aa, Homo sapiens
MRLIGMPKEKYDPPDPRRIYTIMSAEEVANGKKSHWAELEISGRVRSLSTSLWSLTHLTALHLNDNYLSRIPPDIAKLHNLVYLDLSSNKLRSLPAELGNMVSLRELLLNNNLLRVLPYELGRLFQLLNFMLDNLAVHPEQLPPRPWITLKERDQILPSASFTVMCYNVLCDKYATRQLYGYCPSWALNWEYRKKGIMEEIVNCDADIISLQEVETEQYFTLFLPALKERGYDGFFSPKSRAKIMSEQERKHVDGCAIFFKTEKFTLVQKHTVEFNQVAMANSDGSEAMLNRVMTKDNIGVAVVLEVHKELFGAGMKPIHAADKQLLIVANAHMHWDPEYSDVKLIQTMMFVSEVKNILEKASSRPGSPTADPNSIPLVLCADLNSLPDSGVVEYLSNGGVADNHKDFKELRYNECLMNFSCNGKNGSSEGRITHGFQLKSAYENNLMPYTNYTFDFKVSGSLWAGVEIISDTSM

SEQ ID NO: 17388 - protein, 805 aa, Homo sapiens
MANVSKKVSWSGRDRDDEEAAPLLRRTARPGGGTPLLNGAGPGAARQSPRSALFRVGHMSSVELDDELLDPDMDPPHPFPKEIPHNEKLLSLKYESLDYDNSENQLFLEEERRINHTAFRTVEIKRWVICALIGILTGLVACFIDIVVENLAGLKYRVIKGNIDKFTEKGGLSFSLLLWATLNAAFVLVGSVIVAFIEPVAAGSGIPQIKCFLNGVKIPHVVRLKTLVIKVSGVILSVVGGLAVGKEGPMIHSGSVIAAGISQGRSTSLKRDFKIFEYFRRDTEKRDFVSAGAAAGVSAAFGAPVGGVLFSLEEGASFWNQFLTWRIFFASMISTFTLNFVLSIYHGNMWDLSSPGLINFGRFDSEKMAYTIHEIPVFIAMGVVGGVLGAVFNALNYWLTMFRIRYIHRPCLQVIEAVLVAAVTATVAFVLIYSSRDCQPLQGGSMSYPLQLFCADGEYNSMAAAFFNTPEKSVVSLFHDPPGSYNPLTLGLFTLVYFFLACWTYGLTVSAGVFIPSLLIGAAWGRLFGISLSYLTGAAIWADPGKYALMGAAAQLGGIVRMTLSLTVIMMEATSNVTYGFPIMLVLMTAKIVGDVFIEGLYDMHIQLQSVPFLHWEAPVTSHSLTAREVMSTPVTCLRRREKVGVIVDVLSDTASNHNGFPVVEHADDTQPARLQGLILRSQLIVLLKHKVFVERSNLGLVQRRLRLKDFRDAYPRFPPIQSIHVSQDERECTMDLSEFMNPSPYTVPQEASLPRVFKLFRALGLRHLVVVDNRNQVVGLVTRKDLARYRLGKRGLEELSLAQT

SEQ ID NO: 17389 - protein, 781 aa, Homo sapiens
MANVSKKVSWSGRDRDDEEAAPLLRRTARPGGGTPLLNGAGPGAARQDMDPPHPFPKEIPHNEKLLSLKYESLDYDNSENQLFLEEERRINHTAFRTVEIKRWVICALIGILTGLVACFIDIVVENLAGLKYRVIKGNIDKFTEKGGLSFSLLLWATLNAAFVLVGSVIVAFIEPVAAGSGIPQIKCFLNGVKIPHVVRLKTLVIKVSGVILSVVGGLAVGKEGPMIHSGSVIAAGISQGRSTSLKRDFKIFEYFRRDTEKRDFVSAGAAAGVSAAFGAPVGGVLFSLEEGASFWNQFLTWRIFFASMISTFTLNFVLSIYHGNMWDLSSPGLINFGRFDSEKMAYTIHEIPVFIAMGVVGGVLGAVFNALNYWLTMFRIRYIHRPCLQVIEAVLVAAVTATVAFVLIYSSRDCQPLQGGSMSYPLQLFCADGEYNSMAAAFFNTPEKSVVSLFHDPPGSYNPLTLGLFTLVYFFLACWTYGLTVSAGVFIPSLLIGAAWGRLFGISLSYLTGAAIWADPGKYALMGAAAQLGGIVRMTLSLTVIMMEATSNVTYGFPIMLVLMTAKIVGDVFIEGLYDMHIQLQSVPFLHWEAPVTSHSLTAREVMSTPVTCLRRREKVGVIVDVLSDTASNHNGFPVVEHADDTQPARLQGLILRSQLIVLLKHKVFVERSNLGLVQRRLRLKDFRDAYPRFPPIQSIHVSQDERECTMDLSEFMNPSPYTVPQEASLPRVFKLFRALGLRHLVVVDNRNQVVGLVTRKDLARYRLGKRGLEELSLAQT

SEQ ID NO: 17390 - protein, 185 aa, Homo sapiens
MSGSFELSVQDLNDLLSDGSGCYSLPSQPCNEVTPRIYVGNASVAQDIPKLQKLGITHVLNAAEGRSFMHVNTNANFYKDSGITYLGIKANDTQEFNLSAYFERAADFIDQALAQKNGRVLVHCREGYSRSPTLVIAYLMMRQKMDVKSALSIVRQNREIGPNDGFLAQLCQLNDRLAKEGKLKP

SEQ ID NO: 17391 - protein, 144 aa, Homo sapiens
MSVAQDIPKLQKLGITHVLNAAEGRSFMHVNTNANFYKDSGITYLGIKANDTQEFNLSAYFERAADFIDQALAQKNGRVLVHCREGYSRSPTLVIAYLMMRQKMDVKSALSIVRQNREIGPNDGFLAQLCQLNDRLAKEGKLKP

SEQ ID NO: 17392 - protein, 867 aa, Homo sapiens
MQAEAADWFSSMPFQKHVYYPLASGPEGPDVAVAAAAAGAASMACAPPSAASGPLPFFQFRPRLESVDWRRLSAIDVDKVAGAVDVLTLQENIMNITFCKLEDEKCPHCQSGVDPVLLKLIRLAQFTIEYLLHSQEFLTSQLHTLEERLRLSHCDGEQSKKLLTKQAGEIKTLKEECKRRKKMISTQQLMIEAKANYYQCHFCDKAFMNQAFLQSHIQRRHTEENSHFEYQKNAQIEKLRSEIVVLKEELQLTRSELEAAHHASAVRFSKEYEMQKTKEEDFLKLFDRWKEEEKEKLVDEMEKVKEMFMKEFKELTSKNSALEYQLSEIQKSNMQIKSNIGTLKDAHEFKEDRSPYPQDFHNVMQLLDSQESKWTARVQAIHQEHKKEKGRLLSHIEKLRTSMIDDLNASNVFYKKRIEELGQRLQEQNELIITQRQQIKDFTCNPLNSISEPKGNPLAWQAFESQPAAPAVPMNAPALHTLETKSSLPMVHEQAFSSHILEPIEELSEEEKGRENEQKLNNNKMHLRKALKSNSSLTKGLRTMVEQNLMEKLETLGINADIRGISSDQLHRVLKSVESERHKQEREIPNFHQIREFLEHQVSCKIEEKALLSSDQCSVSQMDTLSTGEVPKMIQLPSKNRQLIRQKAVSTDRTSVPKIKKNVMEDPFPRKSSTITTPPFSSEEEQEDDDLIRAYASPGPLPVPPPQNKGSFGKNTVKSDADGTEGSEIEDTDDSPKPAGVAVKTPTEKVEKMFPHRKNVNKPVGGTNVPEMFIKKEELQELKCADVEDEDWDISSLEEEISLGKKSGKEQKEPPPAKNEPHFAHVLNAWGAFNPKGPKGEGLQENESSTLKSSLVTVTDWSDTSDV

SEQ ID NO: 17393 - protein, 848 aa, Homo sapiens
MQAEAADWFSSMPFQKHVYYPLASGPEGPDVAVAAAAAGAASMACAPPSAASGPLPFFQFRPRLESVDWRRLSAIDVDKVAGAVDVLTLQENIMNITFCKLEDEKCPHCQSGVDPVLLKLIRLAQFTIEYLLHSQEFLTSQLHTLEERLRLSHCDGEQSKKLLTKQAGEIKTLKEECKRRKKMISTQQLMIEAKANYYQCHFCDKAFMNQAFLQSHIQRRHTEENSHFEYQKNAQIEKLRSEIVVLKEELQLTRSELEAAHHASAVRFSKEYEMQKTKEEDFLKLFDRWKEEEKEKLVDEMEKVKEMFMKEFKELTSKNSALEYQLSEIQKSNMQIKSNIGTLKDAHEFKEDRSPYPQDFHNVMQLLDSQESKWTARVQAIHQEHKKEKGRLLSHIEKLRTSMIDDLNASNVFYKKRIEELGQRLQEQNELIITQRQQIKDFTCNPLNSISEPKVNAPALHTLETKSSLPMVHEQAFSSHILEPIEELSEEEKGRENEQKLNNNKMHLRKALKSNSSLTKGLRTMVEQNLMEKLETLGINADIRGISSDQLHRVLKSVESERHKQEREIPNFHQIREFLEHQVSCKIEEKALLSSDQCSVSQMDTLSTGEVPKMIQLPSKNRQLIRQKAVSTDRTSVPKIKKNVMEDPFPRKSSTITTPPFSSEEEQEDDDLIRAYASPGPLPVPPPQNKGSFGKNTVKSDADGTEGSEIEDTDDSPKPAGVAVKTPTEKVEKMFPHRKNVNKPVGGTNVPEMFIKKEELQELKCADVEDEDWDISSLEEEISLGKKSGKEQKEPPPAKNEPHFAHVLNAWGAFNPKGPKGEGLQENESSTLKSSLVTVTDWSDTSDV

SEQ ID NO: 17394 - protein, 277 aa, Homo sapiens
MQAEAADWFSSMVRGGRPGRPRRGCRAGENRGFPGPPAPQPARPPSPPPAALSLCPPQPFQKHVYYPLASGPEGPDVAVAAAAAGAASMACAPPSAASGPLPFFQFRPRLESVDWRRLSAIDVDKVAGAVDVLTLQENIMNITFCKLEDEKCPHCQSGVDPVLLKLIRLAQFTIEYLLHSQEFLTSQLHTLEERLRLSHCDGEQSKKLLTKQAGEIKTLKEECKRRKKMISTQQLMIEAKANYYQCHFCDKAFMNQAFLQSHIQRRHTEENSHFGHL

SEQ ID NO: 17395 - protein, 177 aa, Homo sapiens
METNYLKRCFGNCLAQALAEVAKVRPSDPIEYLAHWLYHYRKTAKAKEENREKKIHLQEEYDSSLKEMEMTEMLKQEEYQIQQNCEKCHKELTSETVSTKKTIFMQEDTNPLEKEALKQEFLPGTSSLIPGMPQQVPPSESAGQIDQNFKMPQEINYKEAFQHEVAHEMPPGSKSPF

SEQ ID NO: 17396 - protein, 687 aa, Homo sapiens
MEEFVGLREGSSGNPVTLQELWGPCPRIRRGIRGGLEWLKQKLFRLGEDWYFLMTLGVLMALVSCAMDLAVESVVRAHQWLYREIGDSHLLRYLSWTVYPVALVSFSSGFSQSITPSSGGSGIPEVKTMLAGVVLEDYLDIKNFGAKVVGLSCTLACGSTLFLGKVGPFVHLSVMMAAYLGRVRTTTIGEPENKSKQNEMLVAAAAVGVATVFAAPFSGVLFSIEVMSSHFSVWDYWRGFFAATCGAFMFRLLAVFNSEQETITSLYKTSFRVDVPFDLPEIFFFVALGGLCGILGSAYLFCQRIFFGFIRNNRFSSKLLATSKPVYSALATLVLASITYPPSAGRFLASRLSMKQHLDSLFDNHSWALMTQNSSPPWPEELDPQHLWWEWYHPRFTIFGTLAFFLVMKFWMLILATTIPMPAGYFMPIFVYGAAIGRLFGETLSFIFPEGIVAGGITNPIMPGGYALAGAAAFSGAVTHTISTALLAFEVTGQIVHALPVLMAVLAANAIAQSCQPSFYDGTVIVKKLPYLPRILGRNIGSHRVRVEHFMNHSITTLAKDMPLEEVVKVVTSTDVAKYPLVESTESQILVGIVRRAQLVQALKAEPPSWAPGHQQCLQDILAAGCPTEPVTLKLSPETSLHEAHNLFELLNLHSLFVTSRGRAVGCVSWVEMKKAISNLTNPPAPK

SEQ ID NO: 17397 - protein, 517 aa, Homo sapiens
MPCPPLLSVPVRAAGEQDRWVREEVTWGGGPTVTGGWGWRAHLRSVSPPGVLFSIEVMSSHFSVWDYWRGFFAATCGAFMFRLLAVFNSEQETITSLYKTSFRVDVPFDLPEIFFFVALGGLCGILGSAYLFCQRIFFGFIRNNRFSSKLLATSKPVYSALATLVLASITYPPSAGRFLASRLSMKQHLDSLFDNHSWALMTQNSSPPWPEELDPQHLWWEWYHPRFTIFGTLAFFLVMKFWMLILATTIPMPAGYFMPIFVYGAAIGRLFGETLSFIFPEGIVAGGITNPIMPGGYALAGAAAFSGAVTHTISTALLAFEVTGQIVHALPVLMAVLAANAIAQSCQPSFYDGTVIVKKLPYLPRILGRNIGSHRVRVEHFMNHSITTLAKDMPLEEVVKVVTSTDVAKYPLVESTESQILVGIVRRAQLVQALKAEPPSWAPGHQCLQDILAAGCPTEPVTLKLSPETSLHEAHNLFELLNLHSLFVTSRGRAVGCVSWVEMKKAISNLTNPPAPK

SEQ ID NO: 17398 - protein, 551 aa, Homo sapiens
MLCSLLLCECLLLVAGYAHDDDWIDPTDMLNYDAASGTMRKSQAKYGISGEKDVSPDLSCADEISECYHKLDSLTYKIDECEKKKREDYESQSNPVFRRYLNKILIEAGKLGLPDENKGDMHYDAEIILKRETLLEIQKFLNGEDWKPGALDDALSDILINFKFHDFETWKWRFEDSFGVDPYNVLMVLLCLLCIVVLVATELWTYVRWYTQLRRVLIISFLFSLGWNWMYLYKLAFAQHQAEVAKMEPLNNVCAKKMDWTGSIWEWFRSSWTYKDDPCQKYYELLLVNPIWLVPPTKALAVTFTTFVTEPLKHIGKGTGEFIKALMKEIPALLHLPVLIIMALAILSFCYGAGKSVHVLRHIGGPESEPPQALRPRDRRRQEEIDYRPDGGAGDADFHYRGQMGPTEQGPYAKTYEGRREILRERDVDLRFQTGNKSPEVLRAFDVPDAEAREHPTVVPSHKSPVLDTKPKETGGILGEGTPKESSTESSQSAKPVSGQDTSGNTEGSPAAEKAQLKSEAAGSPDQGSTYSPARGVAGPRGQDPVSSPCG

SEQ ID NO: 17399 - protein, 501 aa, Homo sapiens
MLCSLLLCECLLLVAGYAHDDDWIDPTDMLNYDAASGTMRKSQAKYGISGEKDVSPDLSCADEISECYHKLDSLTYKIDECEKKKREDYESQSNPVFRRYLNKILIEAGKLGLFHDFETWKWRFEDSFGVDPYNVLMVLLCLLCIVVLVATELWTYVRWYTQLRRVLIISFLFSLGWNWMYLYKLAFAQHQAEVAKMEPLNNVCAKKMDWTGSIWEWFRSSWTYKDDPCQKYYELLLVNPIWLVPPTKALAVTFTTFVTEPLKHIGKGTGEFIKALMKEIPALLHLPVLIIMALAILSFCYGAGKSVHVLRHIGGPESEPPQALRPRDRRRQEEIDYRPDGGAGDADFHYRGQMGPTEQGPYAKTYEGRREILRERDVDLRFQTGNKSPEVLRAFDVPDAEAREHPTVVPSHKSPVLDTKPKETGGILGEGTPKESSTESSQSAKPVSGQDTSGNTEGSPAAEKAQLKSEAAGSPDQGSTYSPARGVAGPRGQDPVSSPCG

SEQ ID NO: 17400 - protein, 430 aa, Homo sapiens
MLCSLLLCECLLLVAGYAHDDDWIDPTDMLNYDAASGTMRKSQAKYGISGEKDVSPDLSCADEISECYHKLDSLTYKIDECEKKKREDYESQSNPVFRRYLNKILIEAGKLGLLAFAQHQAEVAKMEPLNNVCAKKMDWTGSIWEWFRSSWTYKDDPCQKYYELLLVNPIWLVPPTKALAVTFTTFVTEPLKHIGKGTGEFIKALMKEIPALLHLPVLIIMALAILSFCYGAGKSVHVLRHIGGPESEPPQALRPRDRRRQEEIDYRPDGGAGDADFHYRGQMGPTEQGPYAKTYEGRREILRERDVDLRFQTGNKSPEVLRAFDVPDAEAREHPTVVPSHKSPVLDTKPKETGGILGEGTPKESSTESSQSAKPVSGQDTSGNTEGSPAAEKAQLKSEAAGSPDQGSTYSPARGVAGPRGQDPVSSPCG

SEQ ID NO: 17401 - protein, 366 aa, Homo sapiens
MLCSLLLCECLLLVAGYAHDDDWIDPTDMLNYDAASGTMRKSQAKYGISGEKDVSPDLSCADEISECYHKLDSLTYKIDECEKKKREDYESQSNPVFRRYLNKILIEAGKLGLALAVTFTTFVTEPLKHIGKGTGEFIKALMKEIPALLHLPVLIIMALAILSFCYGAGKSVHVLRHIGGPESEPPQALRPRDRRRQEEIDYRPDGGAGDADFHYRGQMGPTEQGPYAKTYEGRREILRERDVDLRFQTGNKSPEVLRAFDVPDAEAREHPTVVPSHKSPVLDTKPKETGGILGEGTPKESSTESSQSAKPVSGQDTSGNTEGSPAAEKAQLKSEAAGSPDQGSTYSPARGVAGPRGQDPVSSPCG

SEQ ID NO: 17402 - protein, 228 aa, Homo sapiens
MSMAVETFGFFMATVGLLMLGVTLPNSYWRVSTVHGNVITTNTIFENLWFSCATDSLGVYNCWEFPSMLALSGYIQACRALMITAILLGFLGLLLGIAGLRCTNIGGLELSRKAKLAATAGALHILAGICGMVAISWYAFNITRDFFDPLYPGTKYELGPALYLGWSASLISILGGLCLCSACCCGSDEDPAASARRPYQAPVSVMPVATSDQEGDSSFGKYGRNAYV

SEQ ID NO: 17403 - protein, 228 aa, Homo sapiens
MASTASEIIAFMVSISGWVLVSSTLPTDYWKVSTIDGTVITTATYWANLWKACVTDSTGVSNCKDFPSMLALDGYIQACRGLMIAAVSLGFFGSIFALFGMKCTKVGGSDKAKAKIACLAGIVFILSGLCSMTGCSLYANKITTEFFDPLFVEQKYELGAALFIGWAGASLCIIGGVIFCFSISDNNKTPRYTYNGATSVMSSRTKYHGGEDFKTTNPSKQFDKNAYV

SEQ ID NO: 17404 - protein, 226 aa, Homo sapiens
MSRAQIWALVSGVGGFGALVAATTSNEWKVTTRASSVITATWVYQGLWMNCAGNALGSFHCRPHFTIFKVAGYIQACRGLMIAAVSLGFFGSIFALFGMKCTKVGGSDKAKAKIACLAGIVFILSGLCSMTGCSLYANKITTEFFDPLFVEQKYELGAALFIGWAGASLCIIGGVIFCFSISDNNKTPRYTYNGATSVMSSRTKYHGGEDFKTTNPSKQFDKNAYV

SEQ ID NO: 17405 - protein, 207 aa, Homo sapiens
MSRAQIWALVSGVGGFGALVAATTSNEWKVTTRASSVITATWVYQGLWMNCAGYIQACRGLMIAAVSLGFFGSIFALFGMKCTKVGGSDKAKAKIACLAGIVFILSGLCSMTGCSLYANKITTEFFDPLFVEQKYELGAALFIGWAGASLCIIGGVIFCFSISDNNKTPRYTYNGATSVMSSRTKYHGGEDFKTTNPSKQFDKNAYV

SEQ ID NO: 17406 - protein, 244 aa, Homo sapiens
MGCRDVHAATVLSFLCGIASVAGLFAGTLLPNWRKLRLITFNRNEKNLTVYTGLWVKCARYDGSSDCLMYDTTWYSSVDQLDLRVLQFALPLSMLIAMGALLLCLIGMCNTAFRSSVPNIKLAKCLVNSAGCHLVAGLLFFLAGTVSLSPSIWVIFYNIHLNKKFEPVFSFDYAVYVTIASAGGLFMTSLILFIWYCTCKSLPSPFWQPLYSHPPSMHTYSQPYSARSRLSAIEIDIPVVSHTT

SEQ ID NO: 17407 - protein, 687 aa, Homo sapiens
MEELVGLREGFSGDPVTLQELWGPCPHIRRAIQGGLEWLKQKVFRLGEDWYFLMTLGVLMALVSYAMNFAIGCVVRAHQWLYREIGDSHLLRYLSWTVYPVALVSFSSGFSQSITPSSGGSGIPELKTMLAGVILEDYLDIKNFGAKVVGLSCTLATGSTLFLGKVGPFVHLSVMIAAYLGRVRTTTIGEPENKSKQNEMLVAAAAVGVATVFAAPFSGVLFSIEVMSSHFSVRDYWRGFFAATCGAFIFRLLAVFNSEQETITSLYKTSFRVDVPFDLPEIFFFVALGGICGVLSCAYLFCQRTFLSFIKTNRYSSKLLATSKPVYSALATLLLASITYPPGVGHFLASRLSMKQHLDSLFDNHSWALMTQNSSPPWPEELDPQHLWWEWYHPRFTIFGTLAFFLVMKFWMLILATTIPMPAGYFMPIFILGAAIGRLLGEALAVAFPEGIVTGGVTNPIMPGGYALAGAAAFSGAVTHTISTALLAFELTGQIVHALPVLMAVLAANAIAQSCQPSFYDGTIIVKKLPYLPRILGRNIGSHHVRVEHFMNHSITTLAKDTPLEEVVKVVTSTDVTEYPLVESTESQILVGIVQRAQLVQALQAEPPSRAPGHQQCLQDILARGCPTEPVTLTLFSETTLHQAQNLFKLLNLQSLFVTSRGRAVGCVSWVEMKKAISNLTNPPAPK

SEQ ID NO: 17408 - protein, 644 aa, Homo sapiens
MEELVGLREGFSGDPVTLQELWGPCPHIRRAIQGGLEWLKQKVFRLGEDWYFLMTLGVLMALVSYAMNFAIGCVVRGSGIPELKTMLAGVILEDYLDIKNFGAKVVGLSCTLATGSTLFLGKVGPFVHLSVMIAAYLGRVRTTTIGEPENKSKQNEMLVAAAAVGVATVFAAPFSGVLFSIEVMSSHFSVRDYWRGFFAATCGAFIFRLLAVFNSEQETITSLYKTSFRVDVPFDLPEIFFFVALGGICGVLSCAYLFCQRTFLSFIKTNRYSSKLLATSKPVYSALATLLLASITYPPGVGHFLASRLSMKQHLDSLFDNHSWALMTQNSSPPWPEELDPQHLWWEWYHPRFTIFGTLAFFLVMKFWMLILATTIPMPAGYFMPIFILGAAIGRLLGEALAVAFPEGIVTGGVTNPIMPGGYALAGAAAFSGAVTHTISTALLAFELTGQIVHALPVLMAVLAANAIAQSCQPSFYDGTIIVKKLPYLPRILGRNIGSHHVRVEHFMNHSITTLAKDTPLEEVVKVVTSTDVTEYPLVESTESQILVGIVQRAQLVQALQAEPPSRAPGHQQCLQDILARGCPTEPVTLTLFSETTLHQAQNLFKLLNLQSLFVTSRGRAVGCVSWVEMKKAISNLTNPPAPK

SEQ ID NO: 17409 - protein, 686 aa, Homo sapiens
MEELVGLREGFSGDPVTLQELWGPCPHIRRAIQGGLEWLKQKVFRLGEDWYFLMTLGVLMALVSYAMNFAIGCVVRAHQWLYREIGDSHLLRYLSWTVYPVALVSFSSGFSQSITPSSGGSGIPELKTMLAGVILEDYLDIKNFGAKVVGLSCTLATGSTLFLGKVGPFVHLSVMIAAYLGRVRTTTIGEPENKSKQNEMLVAAAAVGVATVFAAPFSGVLFSIEVMSSHFSVRDYWRGFFAATCGAFIFRLLAVFNSEQETITSLYKTSFRVDVPFDLPEIFFFVALGGICGVLSCAYLFCQRTFLSFIKTNRYSSKLLATSKPVYSALATLLLASITYPPGVGHFLASRLSMKQHLDSLFDNHSWALMTQNSSPPWPEELDPQHLWWEWYHPRFTIFGTLAFFLVMKFWMLILATTIPMPAGYFMPIFILGAAIGRLLGEALAVAFPEGIVTGGVTNPIMPGGYALAGAAAFSGAVTHTISTALLAFELTGQIVHALPVLMAVLAANAIAQSCQPSFYDGTIIVKKLPYLPRILGRNIGSHHVRVEHFMNHSITTLAKDTPLEEVVKVVTSTDVTEYPLVESTESQILVGIVQRAQLVQALQAEPPSRAPGHQCLQDILARGCPTEPVTLTLFSETTLHQAQNLFKLLNLQSLFVTSRGRAVGCVSWVEMKKAISNLTNPPAPK

SEQ ID NO: 17410 - protein, 224 aa, Homo sapiens
MAFYPLQIAGLVLGFLGMVGTLATTLLPQWRVSAFVGSNIIVFERLWEGLWMNCIRQARVRLQCKFYSSLLALPPALETARALMCVAVALSLIALLIGICGMKQVQCTGSNERAKAYLLGTSGVLFILTGIFVLIPVSWTANIIIRDFYNPAIHIGQKRELGAALFLGWASAAVLFIGGGLLCGFCCCNRKKQGYRYPVPGYRVPHTDKRRNTTMLSKTSTSYV

SEQ ID NO: 17411 - protein, 3092 aa, Homo sapiens
MSDANKAAIAAEKEALNLKLPPIVHLPENIGVDTPTQSKLLKYRRSKEQQQKINQLVIDGAKRNLDRTLGKRTPLLPPPDYPQTMTSEMKKKGFNYIYMKQCVESSPLVPIQQEWLDHMLRLIPESLKEGKEREELLESLINEVSSDFENSMKRYLVQSVLVKPPVKSLEDEGGPLPESPVGLDYSNPWHSSYVQARNQIFSNLHIIHPTMKMLLDLGYTTFADTVLLDFTGIRAKGPIDCESLKTDLSIQTRNAEEKIMNTWYPKVINLFTKKEALEGVKPEKLDAFYSCVSTLMSNQLKDLLRRTVEGFVKLFDPKDQQRLPIFKIELTFDDDKMEFYPTFQDLEDNVLSLVERIAEALQNVQTIPSWLSGTSTPVNLDTELPEHVLHWAVDTLKAAVHRNLEGARKHYETYVEKYNWLLDGTAVENIETFQTEDHTFDEYTEFIEKFLSLASEIMLLPQWIHYTMVRLDCEDLKTGLTNKAKAFANILLNDIASKYRKENECICSEFEAIKEHALKVPETTEEMMDLISYVEKARTVGIEELILRIQESKRQMSYFLDVFLFPQEDLALNATVLMWPRKINPIFDENDELIENAKHKKENELMAKREKLILEIEKESRRMEEFTEFAELERMQQYVTDVRQLQKRIQESEEAVQFINKEEELFKWELTKYPELDKLKVNIEPYQKFFNFVLKWQRSEKRWMDGGFLDLNGESMEADVEEFSREIFKTLKFFQTKLKKELQEKRKAARKRSLEEEKIEEEPKDNATITMCRMRARHWKQISEIVGYDLTPDSGTTLRKVLKLNLTPYLEQFEVISAGASKEFSLEKAMNTMIGTWEDIAFHISLYRDTGVCILSSVDEIQAILDDQIIKTQTMRGSPFIKPFEHEIKAWEDRLIRIQETIDEWLKVQAQWLYLEPIFCSEDIMQQMPEEGRQFQTVDRHWRDIMKFCAKDPKVLAATSLTGLLEKLQNCNELLEKIMKGLNAYLEKKRLFFPRFFFLSNDEMLEILSETKDPLRVQPHLKKCFEGIAKLEFLPNLDIKAMYSSEGERVELIALISTSAARGAVEKWLIQVEDLMLRSVHDVIAAARLAYPESARRDWVREWPGQVVLCISQMFWTSETQEVISGGTEGLKKYYKELQNQLNEIVELVRGKLSKQTRTTLGALVTIDVHARDVVMDMIKMGVSHDTDFLWLAQLRYYWENENARVRIINCNVKYAYEYLGNSPRLVITPLTDRCYRTLIGAFYLNLGGAPEGPAGTGKTETTKDLAKALAVQCVVFNCSDGLDYLAMGKFFKGLASSGAWACFDEFNRIELEVLSVVAQQILCIQRAIQQKLVVFVFEGTELKLNPNCFVAITMNPGYAGRSELPDNLKVLFRTVAMMVPNYALIAEISLYSYGFLNARPLSVKIVMTYRLCSEQLSSQFHYDYGMRAVKAVLVAAGNLKLKYPNENEDILLLRSIKDVNEPKFLSHDIPLFNGITSDLFPGIKLPEADYHEFLECAHEACNVHNLQPVKFFLEKIIQTYEMMIVRHGFMLVGEPFAAKTKVLHVLADTLTLMNEHGYGEEEKVIYRTVNPKSITMGQLFGQFDPVSHEWTDGIVANTFREFALSETPDRKWVVFDGPIDTLWIESMNTVLDDNKKLCLMSGEIIQMSPQMSLIFETMDLSQASPATVSRCGMIYLEPSQLGWEPLVSSWLNSLKGPLCEPEYQALLRGLFAWLIPPSLNQRVELFQLNYLYTTIVSKILKILITFRISNYFKYVPLKTQCTFIKFFLHQQACFIFSLIWSIGGSCDTDGRRVFDTFIRLIILGKDDENPVPDSVGKWECPFDEKGLVYDYMYELKNKGRWVHWNELIKNTNLGDKQIKIQDIIVPTMDTIRYTFLMDLSITYAKPLLFVGPTGTGKSVYVKDKLMNHLEKDQYFPFYINLSARTSANQVQNIIMARLDKRRKGVFGPPMGKKCIIFIDDMNMPALEKYGAQPPIELLRQFFDCGHWYDLKDTSKITLVDIELIAAMGPPGGGRNPVTPRCIRHFNICSINSFSDETMVRIFSSIVAFYLRTHEFPPEYFVIGNQIVNGTMEIYKQSVENLLPTPTKSHYTFNLRDFSRVIRGCLLIERDAVANKHTMIRLFVHEVLRVFYDRLINDDDRRWLFQLTKTVIKDHFKESFHSIFSHLRKQNAPVTEEDLRNLMFGDYMNPDLEGDDRVYIEIPNIHHFSDVVDQCLDEYNQTHKTRMNLVIFRYVLEHLSRICRVLKQSGGNALLVGLGGSGRQSLTRLATSMAKMHIFQPEISKSYGMNEWREDMKSFIAVPVTNRIVDNKSKILEKRLRYLNDHFTYNLYCNICRSLFEKDKLLFSFLLCANLLLARKEIEYQELMFLLTGGVSLKSAEKNPDPTWLQDKSWEEICRASEFPAFRGLRQHFCEHIYEWREIYDSKEPHNAKFPAPMDKNLNELQKIIILRCLRPDKITPAITNYVTDKLGKKFVEPPPFDLTKSYLDSNCTIPLIFVLSPGADPMASLLKFANDKSMSGNKFQAISLGQGQGPIAAKMIKAAIEEGTWVCLQNCHLAVSWMPMLEKICEDFTSETCNSSFRLWLTSYPSSKFPVTILQNGVKMTNEPPTGLRLNLLQSYLTDPVSDPEFFKGCRGKELAWEKLLFGVCFFHALVQERKKFGPLGWNIPYGFNESDLRISIRQLQLFINEYDTIPFEAISYLTGECNYGGRVTDDWDRRLLLTMLADFYNLYIVENPHYKFSPSGNYFAPPKGTYEDYIEFIKKLPFTQHPEIFGLHENVDISKDLQQTKTLFESLLLTQGGSKQTGASGSTDQILLEITKDILNKLPSDFDIEMALRKYPVRYEESMNTVLVQEMERFNNLIITIRNTLRDLEKAIKGVVVMDSALEALSGSLLVGKVPEIWAKRSYPSLKPLGSYITDFLARLNFLQDWYNSGKPCVFWLSGFFFTQAFLTGAMQNYARKYTTPIDLLGYEFEVIPSDTSDTSPEDGVYIHGLYLDGARWDRESGLLAEQYPKLLFDLMPIIWIKPTQKSRIIKSDAYVCPLYKTSERKGTLSTTGHSTNFVIAMLLKTDQPTRHWIKRGVALLCQLDD

SEQ ID NO: 17412 - protein, 457 aa, Homo sapiens
MSDANKAAIAAEKEALNLKLPPIVHLPENIGVDTPTQSKLLKYRRSKEQQQKINQLVIDGAKRNLDRTLGKRTPLLPPPDYPQTMTSEMKKKGFNYIYMKQCVESSPLVPIQQEWLDHMLRLIPESLKEGKEREELLESLINEVSSDFENSMKRYLVQSVLVKPPVKSLEDEGGPLPESPVGLDYSNPWHSSYVQARNQIFSNLHIIHPTMKMLLDLGYTTFADTVLLDFTGIRAKGPIDCESLKTDLSIQTRNAEEKIMNTWYPKVINLFTKKEALEGVKPEKLDAFYSCVSTLMSNQLKDLLRRTVEGFVKLFDPKDQQRLPIFKIELTFDDDKMEFYPTFQDLEDNVLSLVERIAEALQNVQTIPSWLSGTSTPVNLDTELPEHVLHWAVDTLKAAVHRNLEGARKHYETYVEKYNWLLDGTAVENIETFQTEDHTFDEYTEELDCWVVWEVYF

SEQ ID NO: 17413 - protein, 679 aa, Homo sapiens
MFLLTGGVSLKSAEKNPDPTWLQDKSWEEICRASEFPAFRGLRQHFCEHIYEWREIYDSKEPHNAKFPAPMDKNLNELQKIIILRCLRPDKITPAITNYVTDKLGKKFVEPPPFDLTKSYLDSNCTIPLIFVLSPGADPMASLLKFANDKSMSGNKFQAISLGQGQGPIAAKMIKAAIEEGTWVCLQNCHLAVSWMPMLEKICEDFTSETCNSSFRLWLTSYPSSKFPVTILQNGVKMTNEPPTGLRLNLLQSYLTDPVSDPEFFKGCRGKELLFINEYDTIPFEAISYLTGECNYGGRVTDDWDRRLLLTMLADFYNLYIVENPHYKFSPSGNYFAPPKGTYEDYIEFIKKLPFTQHPEIFGLHENVDISKDLQQTKTLFESLLLTQGGSKQTGASGSTDQILLEITKDILNKLPSDFDIEMALRKYPVRYEESMNTVLVQEMERFNNLIITIRNTLRDLEKAIKGVVVMDSALEALSGSLLVGKVPEIWAKRSYPSLKPLGSYITDFLARLNFLQDWYNSGKPCVFWLSGFFFTQAFLTGAMQNYARKYTTPIDLLGYEFEVIPSDTSDTSPEDGVYIHGLYLDGARWDRESGLLAEQYPKLLFDLMPIIWIKPTQKSRIIKSDAYVCPLYKTSERKGTLSTTGHSTNFVIAMLLKTDQPTRHWIKRGVALLCQLDD

SEQ ID NO: 17414 - protein, 1093 aa, Homo sapiens
MLCKKKKIPCSEEFLLSKTLGDPVKIRAWNIAGLPTDTFSIDNGVIVNNCRRWPLMIDPQGQANKWIKNSERENQLSVIKLSDSDYMRTLENCIQFGTPLLLENVGEELDPSLEPLLLRQTFKQGGIDCIRLGEVIIEYSFDFKFYITTKLRNPHYMPELATKVSLLNFMITPEGLEDQLLGIVVAKERPELEEERNALILQSAANKKQLKDIEKKILETLSSSEGNILEDESAIKVLDSAKMMSNEITKKQQIAEKTELKIAESREGYRPIAKHSSVLFFSIADLANIDPMYQYSLTWFVNLYINSIHDSNKSKILEKRLRYLNDHFTYNLYCNICRSLFEKDKLLFSFLLCANLLLARKEIEYQELMFLLTGGVSLKSAEKNPDPTWLQDKSWEEICRASEFPAFRGLRQHFCEHIYEWREIYDSKEPHNAKFPAPMDKNLNELQKIIILRCLRPDKITPAITNYVTDKLGKKFVEPPPFDLTKSYLDSNCTIPLIFVLSPGADPMASLLKFANDKSMSGNKFQAISLGQGQGPIAAKMIKAAIEEGTWVCLQNCHLAVSWMPMLEKICEDFTSETCNSSFRLWLTSYPSSKFPVTILQNGVKMTNEPPTGLRLNLLQSYLTDPVSDPEFFKGCRGKELAWEKLLFGVCFFHALVQERKKFGPLGWNIPYGFNESDLRISIRQLQLFINEYDTIPFEAISYLTGECNYGGRVTDDWDRRLLLTMLADFYNLYIVENPHYKFSPSGNYFAPPKGTYEDYIEFIKKLPFTQHPEIFGLHENVDISKDLQQTKTLFESLLLTQGGSKQTGASGSTDQILLEITKDILNKLPSDFDIEMALRKYPVRYEESMNTVLVQEMERFNNLIITIRNTLRDLEKAIKGVVVMDSALEALSGSLLVGKVPEIWAKRSYPSLKPLGSYITDFLARLNFLQDWYNSGKPCVFWLSGFFFTQAFLTGAMQNYARKYTTPIDLLGYEFEVIPSDTSDTSPEDGVYIHGLYLDGARWDRESGLLAEQYPKLLFDLMPIIWIKPTQKSRIIKSDAYVCPLYKTSERKGTLSTTGHSTNFVIAMLLKTDQPTRHWIKRGVALLCQLDD

SEQ ID NO: 17415 - protein, 3507 aa, Homo sapiens
MGRRSQWIWAMRCQMLVPVLSLHIGLARALGCGCIASKIECLIRCNAPFPLLDAVGSVASQELQSLTGTVGVTSGAAAYPRWNLARARAPPHLPGTQDPLRRVRDPTPIVASSPGRRRGSWSGGYGQEASEPGVVGLCCAVLPIHPSLALAGVGGPDLRRFQEGPQRPSDHGAAEKHMETFIPIDLTTENQEMDKEETKTKPRLLRYEEKKYEDVKPLETQPAEIAEKETLEYKTVRTFSESLKSEKTEEPKDDDVIRNIIRLREKLGWQTILPQHSLKYGSSKIAIQKITLKKPLEDDGEFVYCLPRKSPKSLYNPYDLQVVSAHTAKHCKEFWVITASFISKLDSSRTYSLDEFCEEQLQQATQALKQLEDIRNKAISEMKSTFLKVAEKNEIKEYFESKLSEDDTTHFKLPKYRRLLETFFKFVMLVDYIFQELIRQLMNTAVTLLLELFNGSAGMPFSVEKKNENLIRTFKDNSFPTGKTTNDCEELVDNSKLHAISVQKSEVKTDTDINEILNSVEVGKDLRKTYAPIFEVNLCLRIPAESDSSENSKENFHESDQCPEECVMFEDEMSENKDNCVKKHSSEELLPKAKKSKEISYNLEDIISATITPLCQDPQLSIFIDLVSIMDLPNKTGSIIHYKEQTRWPDCHILFETDPAYQNIIVNLLTIIGNSMGLVNAYSHKFIKYCTMTEKAKIMSMKISSMGELTSKEFEAILNRFRNYFRHIVNMAIEKRIGIFNVVVESSLQQLECDPTEIEEFLEHFIFLNAISSKISKLEKEFLTMSQLYSVAKHHQIHISEEQIAIFQVLLLKFSQLKSSMKLSKINKDTAITKFRDNLEACISGLHVDVGNLKAKIRTPLLLCAGTQVSTAMEMIQTLSGEAASLTNKAKAYSHYQDCFSDSQSHMHSVNVEEITQIVLSEISDIEGDLTLRKKLWEAQEEWKRASWEWRNSSLQSIDVESVQRNVSKLMHIISVLEKEIYSIFIIPSIDDISAQLEESQVILATIKGSPHIGPIKSQIMFYNDCVKSFVSSYSREKLEKVHAGLMCHLEEVADLVVLDTSNSRTKAILGALLILYVHCRDIVINLLLKNIFNAEDFEWTRHLQYKWNEKQKLCYVSQGNASFTYGYEYLGCTSRLVITPLTDRCWLTLMEALHLNLGGCPAGPAGTGKTETVKDLAKCALFAFKCNTALIKLPNSLIVLTCFGLEKTVLVMNTVMSFRFVLEGKEIRINMSCAVFITMNPRYGGGVELPDNLKSLFRPVAMMVPHYQMIAEIILFSFGFKSANSLSGKLTNLYELARKQLSQQDHYNFGLRSLKIVLIMAGTKKREFKCDTSDSLSEADETLIVIEAIREASLPKCPPEDVPLFENIIGDIFPEVTVLKVNQLALEKVIYTATQQLGLQNWSSQKEKIIQFYNQLQVCVGVMLVGPTGGGKTTVRRILEKALTLLPIADFLSVAERKSASKISERKGKVDICVLNPKCVTLSELYGQLDPNTMEWTDGLLSATIRSYVYFNTPKNTKKDIDLRLKSRISDLSNVFKLDSSDTTETDDNIFEEIEKVVKIPENHNFDWQWIILDGPVDTFWVENLNSVLDDTRTLCLANSERIALTNKIRVIFEVDNLSQASPATVSRCAMVYMDPVDLGWEPYVKSWLLKTSKIISQSGVDCLEFMIKNSVTDGLQFIRNRQKFQPYPMEDITVVITLCRILDAFFDFMGKNGGFEQSDDLNDTSSKEANSQRESVTFKDIEKRDENTWYPEKNPDKLTKIIQKLFVFAFTWAFGGALNREDEHRENIPFCPSLEPDSLAKVTYDFDKLVHELFGNSSQVGINLPTGECSIFGYFVDIEQCEFIPWSDLVPNDQTLIQRDNPTKKPEVRTNKKLLKNNDHKGVVVSTINFSTNVTAAKTKEMILKKLIRRTKDTLGAPKNNRILIFIDDMNMPVSDMYGAQPPLELIRQLLDLGGVYDTEKNTWKNIQDLSIVAACVPVVNDISPRLLKHFSMLVLPHPSQDILCTIFQIGIDGCGKKTCATLACYLTDNKLYRVPISHKCAYIEFKEVFKKVFIHAGLKGKPTVLMVPNLNIEQDSFLEDLNYIISSGRIPDLFENVELDSIAMKIRYLTEQSGHMDNRQSLLSFFQKRIYKNLHIFVIMSPEGPSFRQNCRVYPSMISSCTIDWYERWPEEALLIVANSFLKEKVNFENRENLKEKLAPTCVQIHKSMKDLNRKYFEETGRFYYTTPNSYLQFMETFAHILRAREEEMQTKRDRFHMGLSTILEATTLVTEMQEELLILGPQVEQKTKETETLMEKLRKDSQVVEKVQMLVKQDEEIVAEEVRIVEDYAQKTANELKSVLPAFDKAIVALNALDKADVAELRVYTRPPFLVLTVMNAVCILLQKKPNWATAKLLLSETGFLKKLINLDKDSIPDKVFVKLKKIVTLPDFNPHKISLVSVACCSLCQWVIALNNYHEVQKVVGPKQIQVAEAQNVLKIARQRLAEKQRGLQLISRWHNQGLPHGQYSVENAILIKNGQQWPLLIDPHRQAHKWIRQMEGSRLQKLSIEDSNYTKKIENAMKTGGSVLLQSCQASTWRKKLYLSTEIDNPHFLPSVYNFVTMINFTVTFQGLQDQLLSTVVTHEVPHLEDQRSKLLESISLDAITLEELEEKTLNLLQKALGSILDDDKIVDTLRKSKMTSNEISKRIEATKKAESEIQAIRKNYLPIATRGALLYFLVADLTQINYMYQFSLDWFHQVFVSSVVSKSKEQEHSFKREKVSPKEVHEFISISKEPNLENEKNLLDKHIKSAIDMLTKSIFKVVSSALFNEDKLCFSFRLCTVIMQNNANGNLIQDDIGFLPEEEWNIFLYSGILINIKSALSQSRLTSTFEIGESQHLQWLSDSRWRQCQYVSTHLEPFSLLCKSLLSNVSQWDTFKNSKAVYSLISTPFSSENASLEENTKPPEEKHTFCLLLRAINHTGTDLGPVGRGQWLTSTACDRHTDVCSFSFALNDGVPDVEHVQDIFYGHCVDKYHVKVLRPESLNNSVRKFITEKMGNKYLQRTGVNLKDAYKGSNARTPLILIQTHGSASIKDYIHIIQSLPDDDLPEVLGIHPEAIRSCWETQGEKFIENLIAMQPKTTTANLMIRPEQSKDELVMEILSDLLKRLPLTVEKEEIAVGTPSTLKSMMSSSIWESLSKNLKDHDPLIHCVLLTFLKQEIKRFDKLLFVIHKSLKDLQLAIKGEIILTQELEEIFNSFLNMRVPTLWQKHAYRSCKPLSSWIDDLIQRLNFFNTWAKVAYTAIQRRYMRFVTVWKQSIPSTSQKCKHPEDSENNFFEGFPSRYWLPAFFFPQAFLAAVLQDYGRSRGIAVDALTFTHHVISNTTDKDEKFSVFMPKKLNIVRRAFKGSASSHTGVYIFGLFIEGARWNREQKILEDSLPLEMCCDFPDIYFLPTKISTKTPNASNQTDSELYAFECPVYQTPERSRILATTGLPTNFLTSVYLSTKKPPSHWITMRVALLCEKNEK

SEQ ID NO: 17416 - protein, 453 aa, Homo sapiens
METFIPIDLTTENQEMDKEETKTKPRLLRYEEKKYEDVKPLETQPAEIAEKETLEYKTVRTFSESLKSEKTEDYLRESIIQQHMVSPEPASLKEKGKSRRKKDQTHACPNVRKARPVSYDRTEPKDDDVIRNIIRLREKLGWQTILPQHSLKYGSSKIAIQKITLKKPLEDDGEFVYCLPRKSPKSLYNPYDLQVVSAHTAKHCKEFWVITASFISKVINIVGSVKEVELIPTLEWLSERRHYYLLRQFKIFSDFRMNKAFVTWKLNVKRIKTEKSRSFLYHHLFLADDLFQTCLVYIRGLCEDAINLKNYNDHENNLSAICLVKLDSSRTYSLDEFCEEQLQQATQALKQLEDIRNKAISEMKSTFLKVAEKNEIKEYFESKLSEDDTTHFKLPKYRRLLETFFKFVMLVDYIFQELIRQLMNTAVTLLLELFNGSAGMPFSVEKKNENLIR

SEQ ID NO: 17417 - protein, 228 aa, Homo sapiens
METFIPIDLTTENQEMDKEETKTKPRLLRYEEKKYEDVKPLETQPAEIAEKETLEYKTVRTFSESLKSEKTEDYLRESIIQQHMVSPEPASLKEKGKSRRKKDQTHACPNVRKARPVSYDRTEPKDDDVIRNIIRLREKLGWQTILPQHSLKYGSSKIAIQKITLKKPLEDDGEFVYCLPRKSPKSLYNPYDLQVVSAHTAKHCKEFWVITASFISKRYLVICGAVYI

SEQ ID NO: 17418 - protein, 4515 aa, Homo sapiens
METFIPIDLTTENQEMDKEETKTKPRLLRYEEKKYEDVKPLETQPAEIAEKETLEYKTVRTFSESLKSEKTEDYLRESIIQQHMVSPEPASLKEKGKSRRKKDQTHACPNVRKARPVSYDRTEPKDDDVIRNIIRLREKLGWQTILPQHSLKYGSSKIAIQKITLKKPLEDDGEFVYCLPRKSPKSLYNPYDLQVVSAHTAKHCKEFWVITASFISKVINIVGSVKEVELIPTLEWLSERRHYYLLRQFKIFSDFRMNKAFVTWKLNVKRIKTEKSRSFLYHHLFLADDLFQTCLVYIRGLCEDAINLKNYNDHENNLSAICLVKLDSSRTYSLDEFCEEQLQQATQALKQLEDIRNKAISEMKSTFLKVAEKNEIKEYFESKLSEDDTTHFKLPKYRRLLETFFKFVMLVDYIFQELIRQLMNTAVTLLLELFNGSAGMPFSVEKKNENLIRTFKDNSFPTGKTTNDCEELVDNSKLHAISVQKSEVKTDTDINEILNSVEVGKDLRKTYAPIFEVNLCLRIPAESDSSENSKENFHESDQCPEECVMFEDEMSENKDNCVKKHSSEELLPKAKKSKEISYNLEDIISDTEIETEFENKYMYYEFPEFPTNLFIDPNRLEFSVKIQNMLTNMEKCITTITPLCQDPQLSIFIDLVSIMDLPNKTGSIIHYKEQTRWPDCHILFETDPAYQNIIVNLLTIIGNSMGLVNAYSHKFIKYCTMTEKAKIMSMKISSMGELTSKEFEAILNRFRNYFRHIVNMAIEKRIGIFNVVSLDYQSECLLYIDNVIHMSHTLIQSVIEKKNKNLLEVVESSLQQLECDPTEIEEFLEHFIFLNAISSKISKLEKEFLTMSQLYSVAKHHQIHISEEQIAIFQVLLLKFSQLKSSMKLSKINKDTAITKFRDNLEACISGLHVDVGNLKAKIRTPLLLCAGTQVSTAMEMIQTLSGEAASLTNKAKAYSHYQDCFSDSQSHMHSVNVEEITQIVLSEISDIEGDLTLRKKLWEAQEEWKRASWEWRNSSLQSIDVESVQRNVSKLMHIISVLEKGLPKSDMVTHLKQVVTEFKQELPIIIALGNPCLKPRHWEALQEIIGKSVPLDKNCKVENLLALKMFQYENEINDMSTSATNEAALEKMLFKIIDFWNTTPLPLILHHTEIYSIFIIPSIDDISAQLEESQVILATIKGSPHIGPIKDLVNEWDQNLTLFSYTLEEWMNCQRNWLYLEPVFHSSEIRRQLPAETELFSQVISMWKKIMSKIQNKQNALQITTSAGVLEILQNCNIHLEHIKKSLEDYLEVKRLIFPRFYFLSNAELLDILADSRNPESVQPHLVKCFENIKQLLIWKQDIGPPAVKMLISAEGEGLVLPKKIRVRSAVEQWLVNVEKSMFDVLKKERYIYNIILLFQSQIMFYNDCVKSFVSSYSREKLEKVHAGLMCHLEEVADLVVLDTSNSRTKAILGALLILYVHCRDIVINLLLKNIFNAEDFEWTRHLQYKWNEKQKLCYVSQGNASFTYGYEYLGCTSRLVITPLTDRCWLTLMEALHLNLGGCPAGPAGTGKTETVKDLAKSLGKHCVVFNCFEDLDYKIVRKFFFGLVQSGAWSCFDEFNLIDLEVLSVIASQILTIKAAKDNYSARFVLEGKEIRINMSCAVFITMNPRYGGGVELPDNLKSLFRPVAMMVPHYQMIAEIILFSFGFKSANSLSGKLTNLYELARKQLSQQDHYNFGLRSLKIVLIMAGTKKREFKCLSEADETLIVIEAIREASLPKCPPEDVPLFENIIGDIFPEVTVLKVNQLALEKVIYTATQQLGLQNWSSQKEKIIQFYNQLQVCVGVMLVGPTGGGKTTVRRILEKALTLLPIADFLSVAERKSASKISERKGKVDICVLNPKCVTLSELYGQLDPNTMEWTDGLLSATIRSYVYFNTPKNTKKDIDLRLKSRISDLSNVFKLDSSDTTETDDNIFEEIEKVVKIPENHNFDWQWIILDGPVDTFWVENLNSVLDDTRTLCLANSERIALTNKIRVIFEVDNLSQASPATVSRCAMVYMDPVDLGWEPYVKSWLLKTSKIISQSGVDCLEFMIKNSVTDGLQFIRNRQKFQPYPMEDITVVITLCRILDAFFDFMGKNGGFEQSDDLNDTSSKEANSQRESVTFKDIEKRDENTWYPEKNPDKLTKIIQKLFVFAFTWAFGGALNREDEHRENIPFCPSLEPDSLAKVTYDFDKLVHELFGNSSQVGWKHWGQSQGRRRKGNCINLPTGECSIFGYFVDIEQCEFIPWSDLVPNDQTLIQRGTSLLTNLQRSGGNFLKITECGECINYTATRDTTCLSFLMSLLLKNSCPVLLTGESGVGKTAAINQMLEKLEGPGAFDIKHGSILGDTLLYSEIKKSSSLKQNITILIPETHKTATGSSDNPTKKPEVRTNKKLLKNNDHKGVVVSTINFSTNVTAAKTKEMILKKLIRRTKDTLGAPKNNRILIFIDDMNMPVSDMYGAQPPLELIRQLLDLGGVYDTEKNTWKNIQDLSIVAACVPVVNDISPRLLKHFSMLVLPHPSQDILCTIFQAHLGIYFSINNFTPEVQKSKDQIISCSLAIYHQVRQNMLPTPTKCHYMFNLRDMFKLLLGLLQADRTVVNSKEMAALLFVHEATRVFHDRLIDFTDKSLFYRLLSRELENCFQIGIDGCGKKTCATLACYLTDNKLYRVPISHKCAYIEFKEVFKKVFIHAGLKGKPTVLMVPNLNIEQDSFLEDLNYIISSGRIPDLFENVELDSIAMKIRYLTEQSGHMDNRQSLLSFFQKRIYKNLHIFVIMSPEGPSFRQNCRVYPSMISSCTIDWYERWPEEALLIVANSFLKEKVNFENRENLKEKLAPTCVQIHKSMKDLNRKYFEETGRFYYTTPNSYLQFMETFAHILRAREEEMQTKRDRFHMGLSTILEATTLVTEMQEELLILGPQVEQKTKETETLMEKLRKDSQVVEKVQMLVKQDEEIVAEEVRIVEDYAQKTANELKSVLPAFDKAIVALNALDKADVAELRVYTRPPFLVLTVMNAVCILLQKKPNWATAKLLLSETGFLKKLINLDKDSIPDKVFVKLKKIVTLPDFNPHKISLVSVACCSLCQWVIALNNYHEVQKVVGPKQIQVAEAQNVLKIARQRLAEKQRGLQLVEEHLLFLQAAYKDTVAEKQLLANRKTMASRRFQCASVLLTVLEDEKTRWQETINQIDNKLEGILGDILLSAACIVYSGILTPEFRQLIVNKWETFCIENGISLSSKFSLIKVMAQKYEISRWHNQGLPHGQYSVENAILIKNGQQWPLLIDPHRQAHKWIRQMEGSRLQKLSIEDSNYTKKIENAMKTGGSVLLQNLLETLAPGLKAILKKDIYQKKGHYFIRVGDAEFEYNSNFRLYLSTEIDNPHFLPSVYNFVTMINFTVTFQGLQDQLLSTVVTHEVPHLEDQRSKLLESISLDAITLEELEEKTLNLLQKALGSILDDDKIVDTLRKSKMTSNEISKRIEATKKAESEIQAIRKNYLPIATRGALLYFLVADLTQINYMYQFSLDWFHQVFVSSVVSKSKEQEHSFKREKVSPKEVHEFISISKEPNLENEKNLLDKHIKSAIDMLTKSIFKVVSSALFNEDKLCFSFRLCTVIMQNNANGNLIQDDIGFLPEEEWNIFLYSGILINIKSALSQSRLTSTFEIGESQHLQWLSDSRWRQCQYVSTHLEPFSLLCKSLLSNVSQWDTFKNSKAVYSLISTPFSSENASLEENTKPPEETELLNENKETCNPINFPWEKLTSFQRLILVKVLRPESLNNSVRKFITEKMGNKYLQRTGVNLKDAYKGSNARTPLILIQTHGIDLTNILLRFAQELKGTTHHVTIISLGRDQAAKAEDLILKALTKTQQWVFLQNCHLATSFMPRLCTIVESFNSPNVTIDPEFRLWLSSKSYSSFPIPVLKKGLKIAVESPQGLKSNLLQTFGCTGSGEVTEEIFENPDCGQWWKKLLFSLCFFNAVINERKNYGILGWNIAYKFNSSDLGVAIKVLENSLRGQPSISWQALRYLIGEVIYGGRVIDNWDKRCLKTLLYKFCNPEVLKDDFSFSRSASIKDYIHIIQSLPDDDLPEVLGIHPEAIRSCWETQGEKFIENLIAMQPKTTTANLMIRPEQSKDELVMEILSDLLKRLPLTVEKEEIAVGTPSTLKSMMSSSIWESLSKNLKDHDPLIHCVLLTFLKQEIKRFDKLLFVIHKSLKDLQLAIKGEIILTQELEEIFNSFLNMRVPTLWQKHAYRSCKPLSSWIDDLIQRLNFFNTWAKVAYTAIQRRYMRFVTVWKQSIPSTSQKCKHPEDSENNFFEGFPSRYWLPAFFFPQAFLAAVLQDYGRSRGIAVDALTFTHHVISNTTDKDEKFSVFMPKKLNIVRRAFKGSASSHTGVYIFGLFIEGARWNREQKILEDSLPLEMCCDFPDIYFLPTKISTKTPNASNQTDSELYAFECPVYQTPERSRILATTGLPTNFLTSVYLSTKKPPSHWITMRVALLCEKNEK

SEQ ID NO: 17419 - protein, 4427 aa, Homo sapiens
MSSKAEKKQRLSGRGSSQASWSGRATRAAVATQEQGNAPAVSEPELQAELPKEEPEPRLEGPQAQSEESVEPEADVKPLFLSRAALTGLADAVWTQEHDAILEHFAQDPTESILTIFIDPCFGLKLELGMPVQTQNQLVYFIRQAPVPITWENFEATVQFGTVRGPYIPALLRLLGGVFAPQIFANTGWPESIRNHFASHLHKFLACLTDTRYKLEGHTVLYIPAEAMNMKPEMVIKDKELVQRLETSMIHWTRQIKEMLSAQETVETGENLGPLEEIEFWRNRCMDLSGISKQLVKKGVKHVESILHLAKSSYLAPFMKLAQQIQDGSRQAQSNLTFLSILKEPYQELAFMKPKDISSKLPKLISLIRIIWVNSPHYNTRERLTSLFRKVCDCQYHFARWEDGKQGPLPCFFGAQGPQITRNLLEIEDIFHKNLHTLRAVRGGILDVKNTCWHEDYNKFRAGIKDLEVMTQNLITSAFELVRDVPHGVLLLDTFHRLASREAIKRTYDKKAVDLYMLFNSELALVNRERNKKWPDLEPYVAQYSGKARWVHILRRRIDRVMTCLAGAHFLPRIGTGKESVHTYQQMVQAIDELVRKTFQEWTSSLDKDCIRRLDTPLLRISQEKAGMLDVNFDKSLLILFAEIDYWERLLFETPHYVVNVAERAEDLRILRENLLLVARDYNRIIAMLSPDEQALFKERIRLLDKKIHPGLKKLHWALKGASAFFITECRIHASKVQMIVNEFKASTLTIGWRAQEMSEKLLVRISGKRVYRDLEFEEDQREHRAAVQQKLMNLHQDVVTIMTNSYEVFKNDGPEIQQQWMLYMIRLDRMMEDALRLNVKWSLLELSKAINGDGKTSPNPLFQVLVILKNDLQGSVAQVEFSPTLQTLAGVVNDIGNHLFSTISVFCHLPDILTKRKLHREPIQTVVEQDEDIKKIQTQISSGMTNNASLLQNYLKTWDMYREIWEINKDSFIHRYQRLNPPVSSFVADIARYTEVANNVQKEETVTNIQFVLLDCSHLKFSLVQHCNEWQNKFATLLREMAAGRLLELHTYLKENAEKISRPPQTLEELGVSLQLVDALKHDLANVETQIPPIHEQFAILEKYEVPVEDSVLEMLDSLNGEWVVFQQTLLDSKQMLKKHKEKFKTGLIHSADDFKKKAHTLLEDFEFKGHFTSNVGYMSALDQITQVRAMLMAMREEENSLRANLGIFKIEQPPSKDLQNLEKELDALQQIWEIARDWEENWNEWKTGRFLILQTETMETTAHGLFRRLTKLAKEYKDRNWEIIETTRSKIEQFKRTMPLISDLRNPALRERHWDQVRDEIQREFDQESESFTLEQIVELGMDQHVEKIGEISASATKELAIEVALQNIAKTWDVTQLDIVPYKDKGHHRLRGTEEVFQALEDNQVALSTMKASRFVKAFEKDVDHWERCLSLILEVIEMILTVQRQWMYLENIFLGEDIRKQLPNESTLFDQVNSNWKAIMDRMNKDNNALRSTHHPGLLDTLIEMNTILEDIQKSLDMYLETKRHIFPRFYFLSNDDLLEILGQSRNPEAVQPHLKKCFDNIKLLRIQKVGGPSSKWEAVGMFSGDGEYIDFLHSVFLEGPVESWLGDVEQTMRVTLRDLLRNCHLALRKFLNKRDKWVKEWAGQVVITASQIQWTADVTKCLLTAKERADKKILKVMKKNQVSILNKYSEAIRGNLTKIMRLKIVALVTIEIHARDVLEKLYKSGLMDVNSFDWLSQLRFYWEKDLDDCVIRQTNTQFQYNYEYLGNSGRLVITPLTDRCYMTLTTALHLHRGGSPKGPAGTGKTETVKDLGKALGIYVIVVNCSEGLDYKSMGRMYSGLAQTGAWGCFDEFNRINIEVLSVVAHQILCILSALAAGLTHFHFDGFEINLVWSCGIFITMNPGYAGRTELPENLKSMFRPIAMVVPDSTLIAEIILFGEGFGNCKILAKKVYTLYSLAVQQLSRQDHYDFGLRALTSLLRYAGKKRRLQPDLTDEEVLLLSMRDMNIAKLTSVDAPLFNAIVQDLFPNIELPVIDYGKLRETVEQEIRDMGLQSTPFTLTKVFQLYETKNSRHSTMIVGCTGSGKTASWRILQASLSSLCRAGDPNFNIVREFPLNPKALSLGELYGEYDLSTNEWTDGILSSVMRTACADEKPDEKWILFDGPVDTLWIENMNSVMDDNKVLTLINGERIAMPEQVSLLFEVEDLAMASPATVSRCGMVYTDYADLGWKPYVQSWLEKRPKAEVEPLQRMFEKLINKMLAFKKDNCKELVPLPEYSGITSLCKLYSALATPENGVNPADGENYVTMVEMTFVFSMIWSVCASVDEEGRKRIDSYLREIEGSFPNKDTVYEYFVDPKIRSWTSFEDKLPKSWRYPPNAPFYKIMVPTVDTVRYNYLVSSLVANQNPILLVGPVGTGKTSIAQSVLQSLPSSQWSVLVVNMSAQTTSNNVQSIIESRVEKRTKGVYVPFGGKSMITFMDDLNMPAKDMFGSQPPLELIRLWIDYGFWYDRTKQTIKYIREMFLMAAMGPPGGGRTVISPRLRSRFNIINMTFPTKSQIIRIFGTMINQKLQDFEEEVKPIGNVVTEATLDMYNTVVQRFLPTPTKMHYLFNLRDISKVFQGMLRANKDFHDTKSSITRLWIHECFRVFSDRLVDAADTEAFMGIISDKLGSFFDLTFHHLCPSKRPPIFGDFLKEPKVYEDLTDLTVLKTVMETALNEYNLSPSVVPMQLVLFREAIEHITRIVRVIGQPRGNMLLVGIGGSGRQSLARLASSICDYTTFQIEVTKHYRKQEFRDDIKRLYRQAGVELKTTSFIFVDTQIADESFLEDINNILSSGEVPNLYKPDEFEEIQSHIIDQARVEQVPESSDSLFAYLIERVQNNLHIVLCLSPMGDPFRNWIRQYPALVNCTTINWFSEWPQEALLEVAEKCLIGVDLGTQENIHRKVAQIFVTMHWSVAQYSQKMLLELRRHNYVTPTKYLELLSGYKKLLGEKRQELLAQANKLRTGLFKIDETREKVQVMSLELEDAKKKVAEFQKQCEEYLVIIVQQKREADEQQKAVTANSEKIAVEEIKCQALADNAQKDLEEALPALEEAMRALESLNKKDIGEIKSYGRPPAQVEIVMQAVMILRGNEPTWAEAKRQLGEQNFIKSLINFDKDNISDKVLKKIGAYCAQPDFQPDIIGRVSLAAKSLCMWVRAMELYGRLYRVVEPKRIRMNAALAQLREKQAALAEAQEKLREVAEKLEMLKKQYDEKLAQKEELRKKSEEMELKLERAGMLVSGLAGEKARWEETVQGLEEDLGYLVGDCLLAAAFLSYMGPFLTNYRDEIVNQIWIGKIWELQVPCSPSFAIDNFLCNPTKVRDWNIQGLPSDAFSTENGIIVTRGNRWALMIDPQAQALKWIKNMEGGQGLKIIDLQMSDYLRILEHAIHFGYPVLLQNVQEYLDPTLNPMLNKSVARIGGRLLMRIGDKEVEYNTNFRFYITTKLSNPHYSPETSAKTTIVNFAVKEQGLEAQLLGIVVRKERPELEEQKDSLVINIAAGKRKLKELEDEILRLLNEATGSLLDDVQLVNTLHTSKITATEVTEQLETSETTEINTDLAREAYRPCAQRASILFFVLNDMGCIDPMYQFSLDAYISLFILSIDKSHRSNKLEDRIDYLNDYHTYAVYRYTCRTLFERHKLLFSFHMCAKILETSGKLNMDEYNFFLRGGVVLDREGQMDNPCSSWLADAYWDNITELDKLTNFHGLMNSFEQYPRDWHLWYTNAAPEKAMLPGEWENACNEMQRMLIVRSLRQDRVAFCVTSFIITNLGSRFIEPPVLNMKSVLEDSTPRSPLVFILSPGVDPTSALLQLAEHMGMAQRFHALSLGQGQAPIAARLLREGVTQGHWVFLANCHLSLSWMPNLDKLVEQLQVEDPHPSFRLWLSSIPHPDFPISILQVSIKMTTEPPKGLKANMTRLYQLMSEPQFSRCSKPAKYKKLLFSLCFFHSVLLERKKFLQLGWNIIYGFNDSDFEVSENLLSLYLDEYEETPWDALKYLIAGINYGGHVTDDWDRRLLTTYINDYFCDQSLSTPFHRLSALETYFIPKDGSLASYKEYISLLPGMDPPEAFGQHPNADVASQITEAQTLFDTLLSLQPQITPTRAGGQTREEKVLELAADVKQKIPEMIDYEGTQKLLALDPSPLNVVLLQEIQRYNTLMQTILFSLTDLEKGIQGLIVMSTSLEEIFNCIFDAHVPPLWGKAYPSQKPLAAWTRDLAMRVEQFELWASRARPPVIFWLSGFTFPTGFLTAVLQSSARQNNVSVDSLSWEFIVSTVDDSNLVYPPKDGVWVRGLYLEGAGWDRKNSCLVEAEPMQLVCLMPTIHFRPAESRKKSAKGMYSCPCYYYPNRAGSSDRASFVIGIDLRSGAMTPDHWIKRGTALLMSLDS

SEQ ID NO: 17420 - protein, 4196 aa, Homo sapiens
MSSKAEKKQRLSGRGSSQASWSGRATRAAVATQEQGNAPAVSEPELQAELPKEEPEPRLEGPQAQSEESVEPEADVKPLFLSRAALTGLADAVWTQEHDAILEHFAQDPTESILTIFIDPCFGLKLELGMPVQTQNQLVYFIRQAPVPITWENFEATVQFGTVRGPYIPALLRLLGGVFAPQIFANTGWPESIRNHFASHLHKFLACLTDTRYKLEGHTVLYIPAEAMNMKPEMVIKDKELVQRLETSMIHWTRQIKEMLSAQETVETGENLGPLEEIEFWRNRCMDLSGISKQLVKKGVKHVESILHLAKSSYLAPFMKLAQQIQDGSRQAQSNLTFLSILKEPYQELAFMKPKDISSKLPKLISLIRIIWVNSPHYNTRERLTSLFRKVCDCQYHFARWEDGKQGPLPCFFGAQGPQITRNLLEIEDIFHKNLHTLRAVRGGILDVKNTCWHEDYNKFRAGIKDLEVMTQNLITSAFELVRDVPHGVLLLDTFHRLASREAIKRTYDKKAVDLYMLFNSELALVNRERNKKWPDLEPYVAQYSGKARWVHILRRRIDRVMTCLAGAHFLPRIGTGKESVHTYQQMVQAIDELVRKTFQEWTSSLDKDCIRRLDTPLLRISQEKAGMLDVNFDKSLLILFAEIDYWERLLFETPHYVVNVAERAEDLRILRENLLLVARDYNRIIAMLSPDEQALFKERIRLLDKKIHPGLKKLHWALKGASAFFITECRIHASKVQMIVNEFKASTLTIGWRAQEMSEKLLVRISGKRVYRDLEFEEDQREHRAAVQQKLMNLHQDVVTIMTNSYEVFKNDGPEIQQQWMLYMIRLDRMMEDALRLNVKWSLLELSKAINGDGKTSPNPLFQVLVILKNDLQGSVAQVEFSPTLQTLAGVVNDIGNHLFSTISVFCHLPDILTKRKLHREPIQTVVEQDEDIKKIQTQISSGMTNNASLLQNYLKTWDMYREIWEINKDSFIHRYQRLNPPVSSFVADIARYTEVANNVQKEETVTNIQFVLLDCSHLKFSLVQHCNEWQNKFATLLREMAAGRLLELHTYLKENAEKISRPPQTLEELGVSLQLVDALKHDLANVETQIPPIHEQFAILEKYEVPVEDSVLEMLDSLNGEWVVFQQTLLDSKQMLKKHKEKFKTGLIHSADDFKKKAHTLLEDFEFKGHFTSNVGYMSALDQITQVRAMLMAMREEENSLRANLGIFKIEQPPSKDLQNLEKELDALQQIWEIARDWEENWNEWKTGRFLILQTETMETTAHGLFRRLTKLAKEYKDRNWEIIETTRSKIEQFKRTMPLISDLRNPALRERHWDQVRDEIQREFDQESESFTLEQIVELGMDQHVEKIGEISASATKELAIEVALQNIAKTWDVTQLDIVPYKDKGHHRLRGTEEVFQALEDNQVALSTMKASRFVKAFEKDVDHWERCLSLILEVIEMILTVQRQWMYLENIFLGEDIRKQLPNESTLFDQVNSNWKAIMDRMNKDNNALRSTHHPGLLDTLIEMNTILEDIQKSLDMYLETKRHIFPRFYFLSNDDLLEILGQSRNPEAVQPHLKKCFDNIKLLRIQKVGGPSSKWEAVGMFSGDGEYIDFLHSVFLEGPVESWLGDVEQTMRVTLRDLLRNCHLALRKFLNKRDKWVKEWAGQVVITASQIQWTADVTKCLLTAKERADKKILKVMKKNQVSILNKYSEAIRGNLTKIMRLKIVALVTIEIHARDVLEKLYKSGLMDVNSFDWLSQLRFYWEKDLDDCVIRQTNTQFQYNYEYLGNSGRLVITPLTDRCYMTLTTALHLHRGGSPKGPAGTGKTETVKDLGKALGIYVIVVNCSEGLDYKSMGRMYSGLAQTGAWGCFDEFNRINIEVLSVVAHQILCILSALAAGLTHFHFDGFEINLVWSCGIFITMNPGYAGRTELPENLKSMFRPIAMVVPDSTLIAEIILFGEGFGNCKILAKKVYTLYSLAVQQLSRQDHYDFGLRALTSLLRYAGKKRRLQPDLTDEEVLLLSMRDMNIAKLTSVDAPLFNAIVQDLFPNIELPVIDYGKLRETVEQEIRDMGLQSTPFTLTKVFQLYETKNSRHSTMIVGCTGSGKTASWRILQASLSSLCRAGDPNFNIVREFPLNPKALSLGELYGEYDLSTNEWTDGILSSVMRTACADEKPDEKWILFDGPVDTLWIENMNSVMDDNKVLTLINGERIAMPEQVSLLFEVEDLAMASPATVSRCGMVYTDYADLGWKPYVQSWLEKRPKAEVEPLQRMFEKLINKMLAFKKDNCKELVPLPEYSGITSLCKLYSALATPENGVNPADGENYVTMVEMTFVFSMIWSVCASVDEEGRKRIDSYLREIEGSFPNKDTVYEYFVDPKIRSWTSFEDKLPKSWRYPPNAPFYKIMVPTVDTVRYNYLVSSLVANQNPILLVGPVGTGKTSIAQSVLQSLPSSQWSVLVVNMSAQTTSNNVQSIIESRVEKRTKGVYVPFGGKSMITFMDDLNMPAKDMFGSQPPLELIRLWIDYGFWYDRTKQTIKYIREMFLMAAMGPPGGGRTVISPRLRSRFNIINMTFPTKSQIIRIFGTMINQKLQDFEEEVKPIGNVVTEATLDMYNTVVQRFLPTPTKMHYLFNLRDISKVFQGMLRANKDFHDTKSSITRLWIHECFRVFSDRLVDAADTEAFMGIISDKLGSFFDLTFHHLCPSKRPPIFGDFLKEPKVYEDLTDLTVLKTVMETALNEYNLSPSVVPMQLVLFREAIEHITRIVRVIGQPRGNMLLVGIGGSGRQSLARLASSICDYTTFQIEVTKHYRKQEFRDDIKRLYRQAGVELKTTSFIFVDTQIADESFLEDINNILSSGEVPNLYKPDEFEEIQSHIIDQARVEQVPESSDSLFAYLIERVQNNLHIVLCLSPMGDPFRNWIRQYPALVNCTTINWFSEWPQEALLEVAEKCLIGVDLGTQENIHRKVAQIFVTMHWSVAQYSQKMLLELRRHNYVTPTKYLELLSGYKKLLGEKRQELLAQANKLRTGLFKIDETREKVQVMSLELEDAKKKVAEFQKQCEEYLVIIVQQKREADEQQKALESLNKKDIGEIKSYGRPPAQVEIVMQAVMILRGNEPTWAEAKRQLGEQNFIKSLINFDKDNISDKVLKKIGAYCAQPDFQPDIIGRVSLAAKSLCMWVRAMELYGRLYRVVEPKRIRMNAALAQLREKQAALAEAQEKLREVAEKLEMLKKQYDEKLAQKEELRKKSEEMELKLERAGMLVSGLAGEKARWEETVQGLEEDLGYLVGDCLLAAAFLSYMGPFLTNYRDEIVNQIWIGKIWELQVPCSPSFAIDNFLCNPTKVRDWNIQGLPSDAFSTENGIIVTRGNRWALMIDPQAQALKWIKNMEGGQGLKIIDLQMSDYLRILEHAIHFGYPVLLQNVQEYLDPTLNPMLNKSVARIGGRLLMRIGDKEVEYNTNFRFYITTKLSNPHYSPETSAKTTIVNFAVKEQGLEAQLLGIVVRKERPELEEQKDSLVINIAAGKRKLKELEDEILRLLNEATGSLLDDVQLVNTLHTSKITATEVTEQLETSETTEINTDLAREAYRPCAQRASILFFVLNDMGCIDPMYQFSLDAYISLFILSIDKSHRSNKLEDRIDYLNDYHTYAVYRYTCRTLFERHKLLFSFHMCAKILETSGKLNMDEYNFFLRGGVVLDREGQMDNPCSSWLADAYWDNITELDKLTNFHGLMNSFEQYPRDWHLWYTNAAPEKAMLPGEWENACNEMQRMLIVRSLRQDRVAFCVTSFIITNLGSRFIEPPVLNMKSVLEDSTPRSPLVFILSPGVDPTSALLQLAEHMGMAQRFHALSLGQGQAPIAARLLREGVTQGHWVFLANCHLSLSWMPNLDKLVEQLQVEDPHPSFRLWLSSIPHPDFPISILQVSIKMTTEPPKGLKANMTRLYQLMSEPQFSRCSKPAKYKKLLFSLCFFHSVLLERKKFLQLGWNIIYGFNDSDFEVSENLLSLYLDEYEETPWDALKYLIAGINYGGHVTDDWDRRLLTTYINDYFCDQSLSTPFHRLSALETYFIPKDGSLASYKEYISLLPGMDPPEAFGQHPNADVASQITEAQTLFDTLLSLQPQITPTRAGGQTREEKVLELAADVKQKIPEMIDYEGTQKLLALDPSPLNVVLLQEIQRYNTLMQTILFSLTDLEIPSCVSHKSERVVLELSAVKHPRQ

SEQ ID NO: 17421 - protein, 872 aa, Homo sapiens
MSSKAEKKQRLSGRGSSQASWSGRATRAAVATQEQGNAPAVSEPELQAELPKEEPEPRLEGPQAQSEESVEPEADVKPLFLSRAALTGLADAVWTQEHDAILEHFAQDPTESILTIFIDPCFGLKLELGMPVQTQNQLVYFIRQAPVPITWENFEATVQFGTVRGPYIPALLRLLGGVFAPQIFANTGWPESIRNHFASHLHKFLACLTDTRYKLEGHTVLYIPAEAMNMKPEMVIKDKELVQRLETSMIHWTRQIKEMLSAQETVETGENLGPLEEIEFWRNRCMDLSGISKQLVKKGVKHVESILHLAKSSYLAPFMKLAQQIQDGSRQAQSNLTFLSILKEPYQELAFMKPKDISSKLPKLISLIRIIWVNSPHYNTRERLTSLFRKMSNEIIRLCCHAISLDRIFEGYVSSSKEDLQGCILCCHAWKDHYVQAVQMHIQFSSRGWVLDQTSIFAQVDAFVQRCKDLIEVCDCQYHFARWEDGKQGPLPCFFGAQGPQITRNLLEIEDIFHKNLHTLRAVRGGILDVKNTCWHEDYNKFRAGIKDLEVMTQNLITSAFELVRDVPHGVLLLDTFHRLASREAIKRTYDKKAVDLYMLFNSELALVNRERNKKWPDLEPYVAQYSGKARWVHILRRRIDRVMTCLAGAHFLPRIGTGKESVHTYQQMVQAIDELVRKTFQEWTSSLDKDCIRRLDTPLLRISQEKAGMLDVNFDKYRSHLAPFPYTPLLQLSQEFHSHLLTPLFIILSLSHTICLLSSFYFFFSSFIFVSPHLPPCYQHFNFTTYLKTQQNKTMIGQARWLTPVIPALWEAEVGASLEPRSLRTAWATWQNPVSAKNTKISWAWWHKPVVSATWEGEVGGSPEPGRQRLQ

SEQ ID NO: 17422 - protein, 4116 aa, Homo sapiens
MGATGRLELTLAAPPHPGPAFQRSKARETQGEEEGSEMQIAKSDSIHHMSHSQGQPELPPLPASANEEPSGLYQTVMSHSFYPPLMQRTSWTLAAPFKEQHHHRGPSDSIANNYSLMAQDLKLKDLLKVYQPATISVPRDRTGQGLPSSGNRSSSEPMRKKTKFSSRNKEDSTRIKLAFKTSIFSPMKKEVKTSLTFPGSRPMSPEQQLDVMLQQEMEMESKEKKPSESDLERYYYYLTNGIRKDMIAPEEGEVMVRISKLISNTLLTSPFLEPLMVVLVQEKENDYYCSLMKSIVDYILMDPMERKRLFIESIPRLFPQRVIRAPVPWHSVYRSAKKWNEEHLHTVNPMMLRLKELWFAEFRDLRFVRTAEILAGKLPLQPQEFWDVIQKHCLEAHQTLLNKWIPTCAQLFTSRKEHWIHFAPKSNYDSSRNIEEYFASVASFMSLQLRELVIKSLEDLVSLFMIHKDGNDFKEPYQEMKFFIPQLIMIKLEVSEPIIVFNPSFDGCWELIRDSFLEIIKNSNGIPKLKYIPLKFSFTAAAADRQCVKAAEPGEPSMHAAATAMAELKGYNLLLGTVNAEEKLVSDFLIQTFKVFQKNQVGPCKYLNVYKKYVDLLDNTAEQNIAAFLKENHDIDDFVTKINAIKKRRNEIASMNITVPLAMFCLDATALNHDLCERAQNLKDHLIQFQVDVNRDTNTSICNQYSHIADKVSEVPANTKELVSLIEFLKKSSAVTVFKLRRQLRDASERLEFLMDYADLPYQIEDIFDNSRNLLLHKRDQAEMDLIKRCSEFELRLEGYHRELESFRKREVMTTEEMKHNVEKLNELSKNLNRAFAEFELINKEEELLEKEKSTYPLLQAMLKNKVPYEQLWSTAYEFSIKSEEWMNGPLFLLNAEQIAEEIGNMWRTTYKLIKTLSDVPAPRRLAENVKIKIDKFKQYIPILSISCNPGMKDRHWQQISEIVGYEIKPTETTCLSNMLEFGFGKFVEKLEPIGAAASKEYSLEKNLDRMKLDWVNVTFSFVKYRDTDTNILCAIDDIQMLLDDHVIKTQTMCGSPFIKPIEAECRKWEEKLIRIQDNLDAWLKCQATWLYLEPIFSSEDIIAQMPEEGRKFGIVDSYWKSLMSQAVKDNRILVAADQPRMAEKLQEANFLLEDIQKGLNDYLEKKRLFFPRFFFLSNDELLEILSETKDPLRVQPHLKKCFEGIAKLEFTDNLEIVGMISSEKETVPFIQKIYPANAKGMVEKWLQQVEQMMLASMREVIGLGIEAYVKVPRNHWVLQWPGQVVICVSSIFWTQEVSQALAENTLLDFLKKSNDQIAQIVQLVRGKLSSGARLTLGALTVIDVHARDVVAKLSEDRVSDLNDFQWISQLRYYWVAKDVQVQIITTEALYGYEYLGNSPRLVITPLTDRCYRTLMGALKLNLGGAPEGPAGTGKTETTKDLAKALAKQCVVFNCSDGLDYKAMGKFFKGLAQAGAWACFDEFNRIEVEVLSVVAQQILSIQQAIIRKLKTFIFEGTELSLNPTCAVFITMNPGYAGRAELPDNLKALFRTVAMMVPDYALIGEISLYSMGFLDSRSLAQKIVATYRLCSEQLSSQHHYDYGMRAVKSVLTAAGNLKLKYPEENESVLLLRALLDVNLAKFLAQDVPLFQGIISDLFPGVVLPKPDYEVFLKVLNDNIKKMKLQPVPWFIGKIIQIYEMMLVRHGYMIVGDPMGGKTSAYKVLAAALGDLHAANQMEEFAVEYKIINPKAITMGQLYGCFDQVSHEWMDGVLANAFREQASSLSDDRKWIIFDGPVDAIWIENMNTVLDDNKKLCLMSGEIIQMNSKMSLIFEPADLEQASPATVSRCGMIYMEPHQLGWKPLKDSYMDTLPSSLTKEHKELVNDMFMWLVQPCLEFGRLHCKFVVQTSPIHLAFSMMRLYSSLLDEIRAVEEEEMELGEGLSSQQIFLWLQGLFLFSLVWTVAGTINADSRKKFDVFFRNLIMGMDDNHPRPKSVKLTKNNIFPERGSIYDFYFIKQASGHWETWTQYITKEEEKVPAGAKVSELIIPTMETARQSFFLKTYLDHEIPMLFVGPTGTGKSAITNNFLLHLPKNTYLPNCINFSARTSANQTQDIIMSKLDRRRKGLFGPPIGKKAVVFVDDLNMPAKEVYGAQPPIELLRQWIDHGYWFDKKDTTRLDIVDMLLVTAMGPPGGGRNDITGRFTRHLNIISINAFEDDILTKIFSSIVDWHFGKGFDVMFLRYGKMLVQATKTIYRDAVENFLPTPSKSHYVFNLRDFSRVIQGVLLCPHTHLQDVEKCIRLWIHEVYRVFYDRLIDKEDRQVFFNMVKETTSNCFKQTIEKVLIHLSPTGKIVDDNIRSLFFGDYFKPESDQKIYDEITDLKQLTVVMEHYLEEFNNISKAPMSLVMFRFAIEHISRICRVLKQDKGHLLLVGIGGSGRQSAAKLSTFMNAYELYQIEITKNYAGNDWREDLKKIILQVGVATKSTVFLFADNQIKDESFVEDINMLLNTGDVPNIFPADEKADIVEKMQTAARTQGEKVEVTPLSMYNFFIERVINKISFSLAMSPIGDAFRNRLRMFPSLINCCTIDWFQSWPTDALELVANKFLEDVELDDNIRVEVVSMCKYFQESVKKLSLDYYNKLRRHNYVTPTSYLELILTFKTLLNSKRQEVAMMRNRYLTGLQKLDFAASQVAVMQRELTALQPQLILTSEETAKMMVKIEAETREADGKKLLVQADEKEANVAAAIAQGIKNECEGDLAEAMPALEAALAALDTLNPADISLVKSMQNPPGPVKLVMESICIMKGMKPERKPDPSGSGKMIEDYWGVSKKILGDLKFLESLKTYDKDNIPPLTMKRIRERFINHPEFQPAVIKNVSSACEGLCKWVRAMEVYDRVAKVVAPKRERLREAEGKLAAQMQKLNQKRAELKLVVDRLQALNDDFEEMNTKKKDLEENIEICSQKLVRAEKLISGLGGEKDRWTEAARQLGIRYTNLTGDVLLSSGTVAYLGAFTVDYRVQCQNQWLAECKDKVIPGFSDFSLSHTLGDPIKIRAWQIAGLPVDSFSIDNGIIVSNSRRWALMIDPHGQANKWIKNMEKANKLAVIKFSDSNYMRMLENALQLGTPVLIENIGEELDASIEPILLKATFKQQGVEYMRLGENIIEYSRDFKLYITTRLRNPHYLPEVAVKVCLLNFMITPLGLQDQLLGIVAAKEKPELEEKKNQLIVESAKNKKHLKEIEDKILEVLSMSKGNILEDETAIKVLSSSKVLSEEISEKQKVASMTETQIDETRMGYKPVAVHSATIFFCISDLANIEPMYQYSLTWFINLYMHSLTHSTKSEELNLRIKYIIDHFTLSIYNNVCRSLFEKDKLLFSLLLTIGIMKQKKEITEEVWYFLLTGGIALDNPYPNPAPQWLSEKAWAEIVRASALPKLHGLMEHLEQNLGEWKLIYDSAWPHEEQLPGSWKFSQGLEKMVILRCLRPDKMVPAVREFIAEHMGKLYIEAPTFDLQGSYNDSSCCAPLIFVLSPSADPMAGLLKFADDLGMGGTRTQTISLGQGQGPIAAKMINNAIKDGTWVVLQNCHLAASWMPTLEKICEEVIVPESTNARFRLWLTSYPSEKFPVSILQNGIKMTNEPPKGLRANLLRSYLNDPISDPVFFQSCAKAVMWQKMLFGLCFFHAVVQERRNFGPLGWNIPYEFNESDLRISMWQIQMFLNDYKEVPFDALTYLTGECNYGGRVTDDKDRRLLLSLLSMFYCKEIEEDYYSLAPGDTYYIPPHGSYQSYIDYLRNLPITAHPEVFGLHENADITKDNQETNQLFEGVLLTLPRQSGGSGKSPQEVVEELAQDILSKLPRDFDLEEVMKLYPVVYEESMNTVLRQELIRFNRLTKVVRRSLINLGRAIKGQVLMSSELEEVFNSMLVGKVPAMWAAKSYPSLKPLGGYVADLLARLTFFQEWIDKGPPVVFWISGFYFTQSFLTGVSQNYARKYTIPIDHIGFEFEVTPQETVMENNPEDGAYIKGLFLEGARWDRKTMQIGESLPKILYDPLPIIWLKPGESAMFLHQDIYVCPVYKTSARRGTLSTTGHSTNYVLSIELPTDMPQKHWINRGVASLCQLDN

SEQ ID NO: 17423 - protein, 753 aa, Homo sapiens
MGDMDCSSQKIAKSDSIHHMSHSQGQPELPPLPASANEEPSGLYQTVMSHSFYPPLMQRTSWTLAAPFKEQHHHRGPSDSIANNYSLMAQDLKLKDLLKVYQPATISVPRDRTGQGLPSSGNRSSSEPMRKKTKFSSRNKEDSTRIKLAFKTSIFSPMKKEVKTSLTFPGSRPMSPEQQLDVMLQQEMEMESKEKKPSESDLERYYYYLTNGIRKDMIAPEEGEVMVRISKLISNTLLTSPFLEPLMVVLVQEKENDYYCSLMKSIVDYILMDPMERKRLFIESIPRLFPQRVIRAPVPWHSVYRSAKKWNEEHLHTVNPMMLRLKELWFAEFRDLRFVRTAEILAGKLPLQPQEFWDVIQKHCLEAHQTLLNKWIPTCAQLFTSRKEHWIHFAPKSNYDSSRNIEEYFASVASFMSLQLRELVIKSLEDLVSLFMIHKDGNDFKEPYQEMKFFIPQLIMIKLEVSEPIIVFNPSFDGCWELIRDSFLEIIKNSNGIPKVESVLFPELKGYNLLLGTVNAEEKLVSDFLIQTFKVFQKNQVGPCKYLNVYKKYVDLLDNTAEQNIAAFLKENHDIDDFVTKINAIKKRRNEIASMNITVPLAMFCLDATALNHDLCERAQNLKDHLIQFQVDVNRDTNTSICNQYSHIADKVSEVPANTKELVSLIEFLKKSSAVTVFKLRRQLRDASERLEFLMDYADLPYEDIKLNSTLFLWPDQIEDIFDNSRNLLLHKRDQAEMDLIKRYRESLGLSWK

SEQ ID NO: 17424 - protein, 1887 aa, Homo sapiens
MGATGRLELTLAAPPHPGPAFQRSKARETQGEEEGSEMQIAKSDSIHHMSHSQGQPELPPLPASANEEPSGLYQTVMSHSFYPPLMQRTSWTLAAPFKEQHHHRGPSDSIANNYSLMAQDLKLKDLLKVYQPATISVPRDRTGQGLPSSGNRSSSEPMRKKTKFSSRNKEDSTRIKLAFKTSIFSPMKKEVKTSLTFPGSRPMSPEQQLDVMLQQEMEMESKEKKPSESDLERYYYYLTNGIRKDMIAPEEGEVMVRISKLISNTLLTSPFLEPLMVVLVQEKENDYYCSLMKSIVDYILMDPMERKRLFIESIPRLFPQRVIRAPVPWHSVYRSAKKWNEEHLHTVNPMMLRLKELWFAEFRDLRFVRTAEILAGKLPLQPQEFWDVIQKHCLEAHQTLLNKWIPTCAQLFTSRKEHWIHFAPKSNYDSSRNIEEYFASVASFMSLQLRELVIKSLEDLVSLFMIHKDGNDFKEPYQEMKFFIPQLIMIKLEVSEPIIVFNPSFDGCWELIRDSFLEIIKNSNGIPKLKYIPLKFSFTAAAADRQCVKAAEPGEPSMHAAATAMAELKGYNLLLGTVNAEEKLVSDFLIQTFKVFQKNQVGPCKYLNVYKKYVDLLDNTAEQNIAAFLKENHDIDDFVTKINAIKKRRNEIASMNITVPLAMFCLDATALNHDLCERAQNLKDHLIQFQVDVNRDTNTSICNQYSHIADKVSEVPANTKELVSLIEFLKKSSAVTVFKLRRQLRDASERLEFLMDYADLPYQIEDIFDNSRNLLLHKRDQAEMDLIKRCSEFELRLEGYHRELESFRKREVMTTEEMKHNVEKLNELSKNLNRAFAEFELINKEEELLEKEKSTYPLLQAMLKNKVPYEQLWSTAYEFSIKSEEWMNGPLFLLNAEQIAEEIGNMWRTTYKLIKTLSDVPAPRRLAENVKIKIDKFKQYIPILSISCNPGMKDRHWQQISEIVGYEIKPTETTCLSNMLEFGFGKFVEKLEPIGAAASKEYSLEKNLDRMKLDWVNVTFSFVKYRDTDTNILCAIDDIQMLLDDHVIKTQTMCGSPFIKPIEAECRKWEEKLIRIQDNLDAWLKCQATWLYLEPIFSSEDIIAQMPEEGRKFGIVDSYWKSLMSQAVKDNRILVAADQPRMAEKLQEANFLLEDIQKGLNDYLEKKRLFFPRFFFLSNDELLEILSETKDPLRVQPHLKKCFEGIAKLEFTDNLEIVGMISSEKETVPFIQKIYPANAKGMVEKWLQQVEQMMLASMREVIGLGIEAYVKVPRNHWVLQWPGQVVICVSSIFWTQEVSQALAENTLLDFLKKSNDQIAQIVQLVRGKLSSGARLTLGALTVIDVHARDVVAKLSEDRVSDLNDFQWISQLRYYWVAKDVQVQIITTEALYGYEYLGNSPRLVITPLTDRCYRTLMGALKLNLGGAPEGPAGTGKTETTKDLAKALAKQCVVFNCSDGLDYKAMGKFFKGLAQAGAWACFDEFNRIEVEVLSVVAQQILSIQQAIIRKLKTFIFEGTELSLNPTCAVFITMNPGYAGRAELPDNLKALFRTVAMMVPDYALIGEISLYSMGFLDSRSLAQKIVATYRLCSEQLSSQHHYDYGMRAVKSVLTAAGNLKLKYPEENESVLLLRALLDVNLAKFLAQDVPLFQGIISDLFPGVVLPKPDYEVFLKVLNDNIKKMKLQPVPWFIGKIIQIYEMMLVRHGYMIVGDPMGGKTSAYKVLAAALGDLHAANQMEEFAVEYKIINPKAITMGQLYGCFDQVSHEWMDGVLANAFREQASSLSDDRKWIIFDGPVDAIWIENMNTVLDDNKKLCLMSGEIIQMNSKMSLIFEPADLEQASPATVSRCGMIYMEPHQLGWKPLKDSYMDTLPSSLTKEHKELMKSGQ

SEQ ID NO: 17425 - protein, 816 aa, Homo sapiens
MAMWQGAMDNRGFQQGSFSSFQNSSSDEDLMDIPATAMDFSMRDDVPPLDREVGEDKSYNGGGIGSSNRIMDFLEEPIPGVGTYDDFNTIDWVREKSRDRDRHREITNKSKESTWALIHSVSDAFSGWLLMLLIGLLSGSLAGLIDISAHWMTDLKEGICTGGFWFNHEHCCWNSEHVTFEERDKCPEWNSWSQLIISTDEGAFAYIVNYFMYVLWALLFAFLAVSLVKVFAPYACGSGIPEIKTILSGFIIRGYLGKWTLVIKTITLVLAVSSGLSLGKEGPLVHVACCCGNILCHCFNKYRKNEAKRREVLSAAAAAGVSVAFGAPIGGVLFSLEEVSYYFPLKTLWRSFFAALVAAFTLRSINPFGNSRLVLFYVEFHTPWHLFELVPFILLGIFGGLWGALFIRTNIAWCRKRKTTQLGKYPVIEVLVVTAITAILAFPNEYTRMSTSELISELFNDCGLLDSSKLCDYENRFNTSKGGELPDRPAGVGVYSAMWQLALTLILKIVITIFTFGMKIPSGLFIPSMAVGAIAGRLLGVGMEQLAYYHQEWTVFNSWCSQGADCITPGLYAMVGAAACLGGVTRMTVSLVVIMFELTGGLEYIVPLMAAAMTSKWVADALGREGIYDAHIRLNGYPFLEAKEEFAHKTLAMDVMKPRRNDPLLTVLTQDSMTVEDVETIISETTYSGFPVVVSRESQRLVGFVLRRDLIISIENARKKQDGVVSTSIIYFTEHSPPLPPYTPPTLKLRNILDLSPFTVTDLTPMEIVVDIFRKLGLRQCLVTHNGRLLGIITKKDVLKHIAQMANQDPDSILFN

SEQ ID NO: 17426 - protein, 746 aa, Homo sapiens
MDFLEEPIPGVGTYDDFNTIDWVREKSRDRDRHREITNKSKESTWALIHSVSDAFSGWLLMLLIGLLSGSLAGLIDISAHWMTDLKEGICTGGFWFNHEHCCWNSEHVTFEERDKCPEWNSWSQLIISTDEGAFAYIVNYFMYVLWALLFAFLAVSLVKVFAPYACGSGIPEIKTILSGFIIRGYLGKWTLVIKTITLVLAVSSGLSLGKEGPLVHVACCCGNILCHCFNKYRKNEAKRREVLSAAAAAGVSVAFGAPIGGVLFSLEEVSYYFPLKTLWRSFFAALVAAFTLRSINPFGNSRLVLFYVEFHTPWHLFELVPFILLGIFGGLWGALFIRTNIAWCRKRKTTQLGKYPVIEVLVVTAITAILAFPNEYTRMSTSELISELFNDCGLLDSSKLCDYENRFNTSKGGELPDRPAGVGVYSAMWQLALTLILKIVITIFTFGMKIPSGLFIPSMAVGAIAGRLLGVGMEQLAYYHQEWTVFNSWCSQGADCITPGLYAMVGAAACLGGVTRMTVSLVVIMFELTGGLEYIVPLMAAAMTSKWVADALGREGIYDAHIRLNGYPFLEAKEEFAHKTLAMDVMKPRRNDPLLTVLTQDSMTVEDVETIISETTYSGFPVVVSRESQRLVGFVLRRDLIISIENARKKQDGVVSTSIIYFTEHSPPLPPYTPPTLKLRNILDLSPFTVTDLTPMEIVVDIFRKLGLRQCLVTHNGRLLGIITKKDVLKHIAQMANQDPDSILFN

SEQ ID NO: 17427 - protein, 4646 aa, Homo sapiens [sequence omitted]

SEQ ID NO: 17428 - protein, 740 aa, Homo sapiens
MNPPGSLEALDPNVDEHLSTQILAPSVHSDNSQERIQARRLRIAARLEARRREALGEYLDGKKESEEDQSKSYKQKEESRLKLAKLLLCGTELVTNIQVAIDIREIHRRVEEEEIKRQRIEKLENEVKTSQDKFDEITSKWEEGKQKRIPQELWEMLNTQQLHCAGLLEDKNKLISELQQELKTKDDQYVKDLKKQSDDICLLLERMEEQVKNVMKTFREELYNIEKAFEVERQELLASNKKKWEQALQAHNAKELEYLNNRMKKVEDYEKQLNRQRIWDCEEYNMIKIKLEQDVQILEQQLQQRKAIYQLNQEKLEYNLQVLKKRDEESTVIKSQQKRKINRLHDILNNLRSKYAKQIKQFQEENQSLTSDYKRLVMQFKELQKAMRHFALIDDEKFWEIWLMNEEEAKDLIARAFDVDRIIHTHHLGLPWAAPDFWFLNNVGPISQQPQKSATQIVEEMLMRSEEEEAEEAAAEPESYLDLPKQISEKTTKRILMLLCDESGFLIESKLLSLLLPLEQNECYLLRLDAIFSALGIESEDDLYKLVNFFLKYRAHRLSSSLQIKPCSQASMEKASMEETSTRSELELAEQTEMEGEKEESLVEGEKEEEEETPPSPWVIHPNDVLKILEAFVMGLKKPRDSRAPLRVQKNVRDNSKDSEYWQALTTVIPSSKQNLWDALYTALEKYHLVLTQRAKLLLENSSLEQQNTELQALLQQYLNSKINSELQVPPTQVLRVPTK

SEQ ID NO: 17429 - protein, 211 aa, Homo sapiens
MANSGLQLLGFSMALLGWVGLVACTAIPQWQMSSYAGDNIITAQAMYKGLWMDCVTQSTGMMSCKMYDSVLALSAALQATRALMVVSLVLGFLAMFVATMGMKCTRCGGDDKVKKARIAMGGGIIFIVAGLAALVACSWYGHQIVTDFYNPLIPTNIKYEFGPAIFIGWAGSALVILGGALLSCSCPGNESKAGYRVPRSYPKSNSSKEYV

SEQ ID NO: 17430 - protein, 158 aa, Homo sapiens
MANSGLQLLGFSMALLGWVGLVACTAIPQWQMSSYAGDNIITAQAMYKGLWMDCVTQSTGMMSCKMYDSVLALSAALQATRALMVVSLVLGFLAMFVATMGMKCTRCGGDDKVKKARIAMGGGIIFIVAGLAALVACSWYGHQIVTDFYNPLIPTNIK

SEQ ID NO: 17431 - protein, 743 aa, Homo sapiens
MIEDSGKRGNTMAERRQLFAEMRAQDLDRIRLSTYRTACKLRFVQKKCNLHLVDIWNVIEALRENALNNLDPNTELNVSRLEAVLSTIFYQLNKRMPTTHQIHVEQSISLLLNFLLAAFDPEGHGKISVFAVKMALATLCGGKIMDKLRYIFSMISDSSGVMVYGRYDQFLREVLKLPTAVFEGPSFGYTEQSARSCFSQQKKVTLNGFLDTLMSDPPPQCLVWLPLLHRLANVENVFHPVECSYCHSESMMGFRYRCQQCHNYQLCQDCFWRGHAGGSHSNQHQMKEYTSWKSPAKKLTNALSKSLSCASSREPLHPMFPDQPEKPLNLAHIVDTWPPRPVTSMNDTLFSHSVPSSGSPFITRSSPPKDSEVEQNKLLARAAPAFLKGKGIQYSLNVADRLADEHVLIGLYVNMLRNNPSCMLESSNRLDEEHRLIARYAARLAAESSSSQPPQQRSAPDISFTIDANKQQRQLIAELENKNREILQEIQRLRLEHEQASQPTPEKAQQNPTLLAELRLLRQRKDELEQRMSALQESRRELMVQLEGLMKLLKTQGAGSPRSSPSHTISRPIPMPIRSASACSTPTHTPQDSLTGVGGDVQEAFAQSSRRNLRNDLLVAADSITNTMSSLVKELNSEVGSETESNVDSEFARTQFEDLVPSPTSEKAFLAQIHARKPGYIHSGATTSTMRGDMVTEDADPYVQPEDENYENDSVRQLENELQMEEYLKQKLQDEAYQVSLQG

SEQ ID NO: 17432 - protein, 686 aa, Homo sapiens
MIEDSGKRGNTMAERRQLFAEMRAQDLDRIRLSTYRTACKLRFVQKKCNLHLVDIWNVIEALRENALNNLDPNTELNVSRLEAVLSTIFYQLNKRMPTTHQIHVEQSISLLLNFLLAAFDPEGHGKISVFAVKMALATLCGGKIMDKLRYIFSMISDSSGVMVYGRYDQFLREVLKLPTAVFEGPSFGYTEQSARSCFSQQKKVTLNGFLDTLMSDPPPQCLVWLPLLHRLANVENVFHPVECSYCHSESMMGFRYRCQQCHNYQLCQDCFWRGHAGGSHSNQHQMKEYTSWKSPAKKLTNALSKSLSCASSREPLHPMFPDQPEKPLNLAHIVDTWPPRPVTSMNDTLFSHSVPSSGSPFITRSMLESSNRLDEEHRLIARYAARLAAESSSSQPPQQRSAPDISFTIDANKQQRQLIAELENKNREILQEIQRLRLEHEQASQPTPEKAQQNPTLLAELRLLRQRKDELEQRMSALQESRRELMVQLEGLMKLLKTQGAGSPRSSPSHTISRPIPMPIRSASACSTPTHTPQDSLTGVGGDVQEAFAQSSRRNLRNDLLVAADSITNTMSSLVKELNSEVGSETESNVDSEFARTQFEDLVPSPTSEKAFLAQIHARKPGYIHSGATTSTMRGDMVTEDADPYVQPEDENYENDSVRQLENELQMEEYLKQKLQDEAYQVSLQG

SEQ ID NO: 17433 - protein, 570 aa, Homo sapiens
MIEDSGKRGNTMAERRQLFAEMRAQDLDRIRLSTYRTACKLRFVQKKCNLHLVDIWNVIEALRENALNNLDPNTELNVSRLEAVLSTIFYQLNKRMPTTHQIHVEQSISLLLNFLLAAFDPEGHGKISVFAVKMALATLCGGKIMDKLRYIFSMISDSSGVMVYGRYDQFLREVLKLPTAVFEGPSFGYTEQSARSCFSQQKKVTLNGFLDTLMSDPPPQCLVWLPLLHRLANVENVFHPVECSYCHSESMMGFRYRCQQCHNYQLCQDCFWRGHAGGSHSNQHQMKEYTSWKSPAKKLTNALSKSLSCASSREPLHPMFPDQPEKPLNLAHIVDTWPPRPVTSMNDTLFSHSVPSSGSPFITRSSPPKDSEVEQNKLLARAAPAFLKGKGIQYSLNVADRLADEHVLIGLYVNMLRNNPSCMLESSNRLDEEHRLIARYAARLAAESSSSQPPQQRSAPDISFTIDANKQQRQLIAELENKNREILQEIQRLRLEHEQASQPTPEKAQQNPTLLAELRLLRQRKDELEQRMSALQESRRELMVQLEGLMKLLKEEELKQGVSYVPYCRS

SEQ ID NO: 17434 - protein, 567 aa, Homo sapiens
MIEDSGKRGNTMAERRQLFAEMRAQDLDRIRLSTYRTACKLRFVQKKCNLHLVDIWNVIEALRENALNNLDPNTELNVSRLEAVLSTIFYQLNKRMPTTHQIHVEQSISLLLNFLLAAFDPEGHGKISVFAVKMALATLCGGKIMDKLRYIFSMISDSSGVMVYGRYDQFLREVLKLPTAVFEGPSFGYTEQSARSCFSQQKKVTLNGFLDTLMSDPPPQCLVWLPLLHRLANVENVFHPVECSYCHSESMMGFRYRCQQCHNYQLCQDCFWRGHAGGSHSNQHQMKEYTSWKSPAKKLTNALSKSLSCASSREPLHPMFPDQPEKPLNLAHIVPPRPVTSMNDTLFSHSVPSSGSPFITRSSPPKDSEVEQNKLLARAAPAFLKGKGIQYSLNVADRLADEHVLIGLYVNMLRNNPSCMLESSNRLDEEHRLIARYAARLAAESSSSQPPQQRSAPDISFTIDANKQQRQLIAELENKNREILQEIQRLRLEHEQASQPTPEKAQQNPTLLAELRLLRQRKDELEQRMSALQESRRELMVQLEGLMKLLKEEELKQGVSYVPYCRS

SEQ ID NO: 17435 - protein, 513 aa, Homo sapiens
MIEDSGKRGNTMAERRQLFAEMRAQDLDRIRLSTYRTACKLRFVQKKCNLHLVDIWNVIEALRENALNNLDPNTELNVSRLEAVLSTIFYQLNKRMPTTHQIHVEQSISLLLNFLLAAFDPEGHGKISVFAVKMALATLCGGKIMDKLRYIFSMISDSSGVMVYGRYDQFLREVLKLPTAVFEGPSFGYTEQSARSCFSQQKKVTLNGFLDTLMSDPPPQCLVWLPLLHRLANVENVFHPVECSYCHSESMMGFRYRCQQCHNYQLCQDCFWRGHAGGSHSNQHQMKEYTSWKSPAKKLTNALSKSLSCASSREPLHPMFPDQPEKPLNLAHIVDTWPPRPVTSMNDTLFSHSVPSSGSPFITRSMLESSNRLDEEHRLIARYAARLAAESSSSQPPQQRSAPDISFTIDANKQQRQLIAELENKNREILQEIQRLRLEHEQASQPTPEKAQQNPTLLAELRLLRQRKDELEQRMSALQESRRELMVQLEGLMKLLKEEELKQGVSYVPYCRS

SEQ ID NO: 17436 - protein, 391 aa, Homo sapiens
MFPDQPEKPLNLAHIVPPRPVTSMNDTLFSHSVPSSGSPFITRSSPPKDSEVEQNKLLARAAPAFLKGKGMLESSNRLDEEHRLIARYAARLAAESSSSQPPQQRSAPDISFTIDANKQQRQLIAELENKNREILQEIQRLRLEHEQASQPTPEKAQQNPTLLAELRLLRQRKDELEQRMSALQESRRELMVQLEGLMKLLKTQGAGSPRSSPSHTISRPIPMPIRSASACSTPTHTPQDSLTGVGGDVQEAFAQSSRRNLRNDLLVAADSITNTMSSLVKELNSEVGSETESNVDSEFARTQFEDLVPSPTSEKAFLAQIHARKPGYIHSGATTSTMRGDMVTEDADPYVQPEDENYENDSVRQLENELQMEEYLKQKLQDEAYQVSLQG

SEQ ID NO: 17437 - protein, 374 aa, Homo sapiens
MIEDSGKRGNTMAERRQLFAEMRAQDLDRIRLSTYRTACKLRFVQKKCNLHLVDIWNVIEALRENALNNLDPNTELNVSRLEAVLSTIFYQLNKRMPTTHQIHVEQSISLLLNFLLAAFDPEGHGKISVFAVKMALATLCGGKIMDKLRYIFSMISDSSGVMVYGRYDQFLREVLKLPTAVFEGPSFGYTEQSARSCFSQQKKVTLNGFLDTLMSDPPPQCLVWLPLLHRLANVENVFHPVECSYCHSESMMGFRYRCQQCHNYQLCQDCFWRGHAGGSHSNQHQMKEYTSWKSPAKKLTNALSKSLSCASSREPLHPMFPDQPEKPLNLAHIVDTWPPRPVTSMNDTLFSHSVPSSGSPFITRSSDGAFGGCV

SEQ ID NO: 17438 - protein, 192 aa, Homo sapiens
MFPDQPEKPLNLAHIVPPRPVTSMNDTLFSHSVPSSGSPFITRSMLESSNRLDEEHRLIARYAARLAAESSSSQPPQQRSAPDISFTIDANKQQRQLIAELENKNREILQEIQRLRLEHEQASQPTPEKAQQNPTLLAELRLLRQRKDELEQRMSALQESRRELMVQLEGLMKLLKEEELKQGVSYVPYCRS

SEQ ID NO: 17439 - protein, 371 aa, Homo sapiens
MIEDSGKRGNTMAERRQLFAEMRAQDLDRIRLSTYRTACKLRFVQKKCNLHLVDIWNVIEALRENALNNLDPNTELNVSRLEAVLSTIFYQLNKRMPTTHQIHVEQSISLLLNFLLAAFDPEGHGKISVFAVKMALATLCGGKIMDKLRYIFSMISDSSGVMVYGRYDQFLREVLKLPTAVFEGPSFGYTEQSARSCFSQQKKVTLNGFLDTLMSDPPPQCLVWLPLLHRLANVENVFHPVECSYCHSESMMGFRYRCQQCHNYQLCQDCFWRGHAGGSHSNQHQMKEYTSWKSPAKKLTNALSKSLSCASSREPLHPMFPDQPEKPLNLAHIVPPRPVTSMNDTLFSHSVPSSGSPFITRSSDGAFGGCV

SEQ ID NO: 17440 - protein, 395 aa, Homo sapiens
MFPDQPEKPLNLAHIVPPRPVTSMNDTLFSHSVPSSGSPFITRRLPEGISASSPVAEEHSLIKLYVNQLDHGARMLESSNRLDEEHRLIARYAARLAAESSSSQPPQQRSAPDISFTIDANKQQRQLIAELENKNREILQEIQRLRLEHEQASQPTPEKAQQNPTLLAELRLLRQRKDELEQRMSALQESRRELMVQLEGLMKLLKTQGAGSPRSSPSHTISRPIPMPIRSASACSTPTHTPQDSLTGVGGDVQEAFAQSSRRNLRNDLLVAADSITNTMSSLVKELNSEVGSETESNVDSEFARTQFEDLVPSPTSEKAFLAQIHARKPGYIHSGATTSTMRGDMVTEDADPYVQPEDENYENDSVRQLENELQMEEYLKQKLQDEAYQVSLQG

SEQ ID NO: 17441 - protein, 452 aa, Homo sapiens
MFPDQPEKPLNLAHIVPPRPVTSMNDTLFSHSVPSSGSPFITRRLPEGISASSPVAEEHSLIKLYVNQLDHGARSPPKDSEVEQNKLLARAAPAFLKGKGIQYSLNVADRLADEHVLIGLYVNMLRNNPSCMLESSNRLDEEHRLIARYAARLAAESSSSQPPQQRSAPDISFTIDANKQQRQLIAELENKNREILQEIQRLRLEHEQASQPTPEKAQQNPTLLAELRLLRQRKDELEQRMSALQESRRELMVQLEGLMKLLKTQGAGSPRSSPSHTISRPIPMPIRSASACSTPTHTPQDSLTGVGGDVQEAFAQSSRRNLRNDLLVAADSITNTMSSLVKELNSEVGSETESNVDSEFARTQFEDLVPSPTSEKAFLAQIHARKPGYIHSGATTSTMRGDMVTEDADPYVQPEDENYENDSVRQLENELQMEEYLKQKLQDEAYQVSLQG

SEQ ID NO: 17442 - protein, 320 aa, Homo sapiens
MIEDSGKRGNTMAERRQLFAEMRAQDLDRIRLSTYRTACKLRFVQKKCNLHLVDIWNVIEALRENALNNLDPNTELNVSRLEAVLSTIFYQLNKRMPTTHQIHVEQSISLLLNFLLAAFDPEGHGKISVFAVKMALATLCGGKIMDKLRYIFSMISDSSGVMVYGRYDQFLREVLKLPTAVFEGPSFGYTEQSARSCFSQQQPPQQRSAPDISFTIDANKQQRQLIAELENKNREILQEIQRLRLEHEQASQPTPEKAQQNPTLLAELRLLRQRKDELEQRMSALQESRRELMVQLEGLMKLLKEEELKQGVSYVPYCRS

SEQ ID NO: 17443 - protein, 683 aa, Homo sapiens
MIEDSGKRGNTMAERRQLFAEMRAQDLDRIRLSTYRTACKLRFVQKKCNLHLVDIWNVIEALRENALNNLDPNTELNVSRLEAVLSTIFYQLNKRMPTTHQIHVEQSISLLLNFLLAAFDPEGHGKISVFAVKMALATLCGGKIMDKLRYIFSMISDSSGVMVYGRYDQFLREVLKLPTAVFEGPSFGYTEQSARSCFSQQKKVTLNGFLDTLMSDPPPQCLVWLPLLHRLANVENVFHPVECSYCHSESMMGFRYRCQQCHNYQLCQDCFWRGHAGGSHSNQHQMKEYTSWKSPAKKLTNALSKSLSCASSREPLHPMFPDQPEKPLNLAHIVPPRPVTSMNDTLFSHSVPSSGSPFITRSMLESSNRLDEEHRLIARYAARLAAESSSSQPPQQRSAPDISFTIDANKQQRQLIAELENKNREILQEIQRLRLEHEQASQPTPEKAQQNPTLLAELRLLRQRKDELEQRMSALQESRRELMVQLEGLMKLLKTQGAGSPRSSPSHTISRPIPMPIRSASACSTPTHTPQDSLTGVGGDVQEAFAQSSRRNLRNDLLVAADSITNTMSSLVKELNSEVGSETESNVDSEFARTQFEDLVPSPTSEKAFLAQIHARKPGYIHSGATTSTMRGDMVTEDADPYVQPEDENYENDSVRQLENELQMEEYLKQKLQDEAYQVSLQG

SEQ ID NO: 17444 - protein, 690 aa, Homo sapiens
MIEDSGKRGNTMAERRQLFAEMRAQDLDRIRLSTYRTACKLRFVQKKCNLHLVDIWNVIEALRENALNNLDPNTELNVSRLEAVLSTIFYQLNKRMPTTHQIHVEQSISLLLNFLLAAFDPEGHGKISVFAVKMALATLCGGKIMDKLRYIFSMISDSSGVMVYGRYDQFLREVLKLPTAVFEGPSFGYTEQSARSCFSQQKKVTLNGFLDTLMSDPPPQCLVWLPLLHRLANVENVFHPVECSYCHSESMMGFRYRCQQCHNYQLCQDCFWRGHAGGSHSNQHQMKEYTSWKSPAKKLTNALSKSLSCASSREPLHPMFPDQPEKPLNLAHIVPPRPVTSMNDTLFSHSVPSSGSPFITRSMLESSNRLDEEHRLIARYAARLAAESSSSQPPQQRSAPDISFTIDANKQQRQLIAELENKNREILQEIQRLRLEHEQASQPTPEKAQQNPTLLAELRLLRQRKDELEQRMSALQESRRELMVQLEGLMKLLKEEELKQGTQGAGSPRSSPSHTISRPIPMPIRSASACSTPTHTPQDSLTGVGGDVQEAFAQSSRRNLRNDLLVAADSITNTMSSLVKELNSEVGSETESNVDSEFARTQFEDLVPSPTSEKAFLAQIHARKPGYIHSGATTSTMRGDMVTEDADPYVQPEDENYENDSVRQLENELQMEEYLKQKLQDEAYQVSLQG

SEQ ID NO: 17445 - protein, 724 aa, Homo sapiens
MIEDSGKRGNTMAERRQLFAEMRAQDLDRIRLSTYRTACKLRFVQKKCNLHLVDIWNVIEALRENALNNLDPNTELNVSRLEAVLSTIFYQLNKRMPTTHQIHVEQSISLLLNFLLAAFDPEGHGKISVFAVKMALATLCGGKIMDKLRYIFSMISDSSGVMVYGRYDQFLREVLKLPTAVFEGPSFGYTEQSARSCFSQQKKVTLNGFLDTLMSDPPPQCLVWLPLLHRLANVENVFHPVECSYCHSESMMGFRYRCQQCHNYQLCQDCFWRGHAGGSHSNQHQMKEYTSWKSPAKKLTNALSKSLSCASSREPLHPMFPDQPEKPLNLAHIVPPRPVTSMNDTLFSHSVPSSGSPFITRSMLESSNRLDEEHRLIARYAARLAAESSSSQPPQQRSAPDISFTIDANKQQRQLIAELENKNREILQEIQRLRLEHEQASQPTPEKAQQNPTLLAELRLLRQRKDELEQRMSALQESRRELMVQLEGLMKLLKTQGAGSPRSSPSHTISRPIPMPIRSASACSTPTHTPQDSLTGVGGDVQEAFAQSSRRNLRNDLLVAADSITNTMSSLVKELNSEVGSETESNVDSEFARTQFEDLVPSPTSEKAFLAQIHARKPGYIHSGATTSTMRGDMVTEDADPYVQPEDENYENDSVRQLENELQMEEYLKQKLQDEAYQLHVSTETRLEHPCPVSETKWRVLFWGFVFFGGFLSLALQIYFWGLF

SEQ ID NO: 17446 - protein, 510 aa, Homo sapiens
MIEDSGKRGNTMAERRQLFAEMRAQDLDRIRLSTYRTACKLRFVQKKCNLHLVDIWNVIEALRENALNNLDPNTELNVSRLEAVLSTIFYQLNKRMPTTHQIHVEQSISLLLNFLLAAFDPEGHGKISVFAVKMALATLCGGKIMDKLRYIFSMISDSSGVMVYGRYDQFLREVLKLPTAVFEGPSFGYTEQSARSCFSQQKKVTLNGFLDTLMSDPPPQCLVWLPLLHRLANVENVFHPVECSYCHSESMMGFRYRCQQCHNYQLCQDCFWRGHAGGSHSNQHQMKEYTSWKSPAKKLTNALSKSLSCASSREPLHPMFPDQPEKPLNLAHIVPPRPVTSMNDTLFSHSVPSSGSPFITRSMLESSNRLDEEHRLIARYAARLAAESSSSQPPQQRSAPDISFTIDANKQQRQLIAELENKNREILQEIQRLRLEHEQASQPTPEKAQQNPTLLAELRLLRQRKDELEQRMSALQESRRELMVQLEGLMKLLKEEELKQGVSYVPYCRS

SEQ ID NO: 17447 - protein, 269 aa, Homo sapiens
MLGPGQVRLRPRVWRDKAGGRVADGASGLPPARGSWRETGTGRALGASSPPRPAQGSSSPGIQSGPSSRPGSPRGAEQAGTPRPRLSLGISQATGSAARWRTRRTGKGLGYNSDEIRPRTLLIEHLMEGGRRDHHTMTVLWGTQEIIVAEFHKKIKEAFEVFDHESNNTVDVREIGTIIRSLGCCPTEGELHDLIAEVEEEEPTGYIRFEKFLPVMTEILLERKYRPIPEDVLLRAFEVLDSAKRGFLTKDELIKYMTEEDGVSLRRPG

SEQ ID NO: 17448 - protein, 162 aa, Homo sapiens
MADEKDREEIIVAEFHKKIKEAFEVFDHESNNTVDVREIGTIIRSLGCCPTEGELHDLIAEVEEEEPTGYIRFEKFLPVMTEILLERKYRPIPEDVLLRAFEVLDSAKRGFLTKDELIKYMTEEGEPFSQEEMEEMLSAAIDPESNSINYKDYITMMVIDEN

SEQ ID NO: 17449 - protein, 133 aa, Homo sapiens
MADEKDREEIIVAEFHKKIKEAFEVFDHESNNTVDVREIGTIIRSLGCCPTEGELHDLIAEVEEEEPTGYIRFEKFLPVMTEILLERKYRPIPEDVLLRAFEVLDSAKRGFLTKDELIKYMTEEDGVSLRRPG

SEQ ID NO: 17450 - protein, 737 aa, Homo sapiens
MADTQYILPNDIGVSSLDCREAFRLLSPTERLYAYHLSRAAWYGGLAVLLQTSPEAPYIYALLSRLFRAQDPDQLRQHALAEGLTEEEYQAFLVYAAGVYSNMGNYKSFGDTKFVPNLPKEKLERVILGSEAAQQHPEEVRGLWQTCGELMFSLEPRLRHLGLGKEGITTYFSGNCTMEDAKLAQDFLDSQNLSAYNTRLFKEVDGEGKPYYEVRLASVLGSEPSLDSEVTSKLKSYEFRGSPFQVTRGDYAPILQKVVEQLEKAKAYAANSHQGQMLAQYIESFTQGSIEAHKRGSRFWIQDKGPIVESYIGFIESYRDPFGSRGEFEGFVAVVNKAMSAKFERLVASAEQLLKELPWPPTFEKDKFLTPDFTSLDVLTFAGSGIPAGINIPNYDDLRQTEGFKNVSLGNVLAVAYATQREKLTFLEEDDKDLYILWKGPSFDVQVGLHELLGHGSGKLFVQDEKGAFNFDQETVINPETGEQIQSWYRSGETWDSKFSTIASSYEECRAESVGLYLCLHPQVLEIFGFEGADAEDVIYVNWLNMVRAGLLALEFYTPEAFNWRQAHMQARFVILRVLLEAGEGLVTITPTTGSDGRPDARVRLDRSKIRSVGKPALERFLRRLQVLKSTGDVAGGRALYEGYATVTDAPPECFLTLRDTVLLRKESRKLIVQPNTRLEGSDVQLLEYEASAAGLIRSFSERFPEDGPELEEILTQLATADARFWKGPSEAPSGQA

SEQ ID NO: 17451 - protein, 317 aa, Homo sapiens
MADTQYILPNDIGVSSLDCREAFRLLSPTERLYAYHLSRAAWYGGLAVLLQTSPEAPYIYALLSRLFRAQDPDQLRQHALAEGLTEEEYQAFLVYAAGVYSNMGNYKSFGDTKFVPNLPKEKLERVILGSEAAQQHPEEVRGLWQTCGELMFSLEPRLRHLGLGKEGITTYFSGNCTMEDARVRLDRSKIRSVGKPALERFLRRLQVLKSTGDVAGGRALYEGYATVTDAPPECFLTLRDTVLLRKESRKLIVQPNTRLEGSDVQLLEYEASAAGLIRSFSERFPEDGPELEEILTQLATADARFWKGPSEAPSGQA

SEQ ID NO: 17452 - protein, 707 aa, Homo sapiens
MADTQYILPNDIGVSSLDCREAFRLLSPTERLYAYHLSRAAWYGGLAVLLQTSPEAPYIYALLSRLFRAQDPDQLRQHALAEGLTEEEYQEKLERVILGSEAAQQHPEEVRGLWQTCGELMFSLEPRLRHLGLGKEGITTYFSGNCTMEDAKLAQDFLDSQNLSAYNTRLFKEVDGEGKPYYEVRLASVLGSEPSLDSEVTSKLKSYEFRGSPFQVTRGDYAPILQKVVEQLEKAKAYAANSHQGQMLAQYIESFTQGSIEAHKRGSRFWIQDKGPIVESYIGFIESYRDPFGSRGEFEGFVAVVNKAMSAKFERLVASAEQLLKELPWPPTFEKDKFLTPDFTSLDVLTFAGSGIPAGINIPNYDDLRQTEGFKNVSLGNVLAVAYATQREKLTFLEEDDKDLYILWKGPSFDVQVGLHELLGHGSGKLFVQDEKGAFNFDQETVINPETGEQIQSWYRSGETWDSKFSTIASSYEECRAESVGLYLCLHPQVLEIFGFEGADAEDVIYVNWLNMVRAGLLALEFYTPEAFNWRQAHMQARFVILRVLLEAGEGLVTITPTTGSDGRPDARVRLDRSKIRSVGKPALERFLRRLQVLKSTGDVAGGRALYEGYATVTDAPPECFLTLRDTVLLRKESRKLIVQPNTRLEGSDVQLLEYEASAAGLIRSFSERFPEDGPELEEILTQLATADARFWKGPSEAPSGQA

SEQ ID NO: 17453 - protein, 530 aa, Homo sapiens
MSRSPQRALPPGALPRLLQAAPAAAPRALLPQWPRRPGRRWPASPLGMKVFRRKALVLCAGYALLLVLTMLNLLDYKWHKEPLQQCNPDGPLGAAAGAAGGSWGRPGPPPAGPPRAHARLDLRTPYRPPAAAVGAAPAAAAGMAGVAAPPGNGTRGTGGVGDKRQLVYVFTTWRSGSSFFGELFNQNPEVFFLYEPVWHVWQKLYPGDAVSLQGAARDMLSALYRCDLSVFQLYSPAGSGGRNLTTLGIFGAATNKVVCSSPLCPAYRKEVVGLVDDRVCKKCPPQRLARFEEECRKYRTLVIKGVRVFDVAVLAPLLRDPALDLKVIHLVRDPRAVASSRIRSRHGLIRESLQVVRSRDPRAHRMPFLEAAGHKLGAKKEGVGGPADYHALGAMEVICNSMAKTLQTALQPPDWLQGHYLVVRYEDLVGDPVKTLRRVYDFVGLLVSPEMEQFALNMTSGSGSSSKPFVVSARNATQAANAWRTALTFQQIKQVEEFCYQPMAVLGYERVNSPEEVKDLSKTLLRKPRL

SEQ ID NO: 17454 - protein, 483 aa, Homo sapiens
MKVFRRKALVLCAGYALLLVLTMLNLLDYKWHKEPLQQCNPDGPLGAAAGAAGGSWGRPGPPPAGPPRAHARLDLRTPYRPPAAAVGAAPAAAAGMAGVAAPPGNGTRGTGGVGDKRQLVYVFTTWRSGSSFFGELFNQNPEVFFLYEPVWHVWQKLYPGDAVSLQGAARDMLSALYRCDLSVFQLYSPAGSGGRNLTTLGIFGAATNKVVCSSPLCPAYRKEVVGLVDDRVCKKCPPQRLARFEEECRKYRTLVIKGVRVFDVAVLAPLLRDPALDLKVIHLVRDPRAVASSRIRSRHGLIRESLQVVRSRDPRAHRMPFLEAAGHKLGAKKEGVGGPADYHALGAMEVICNSMAKTLQTALQPPDWLQGHYLVVRYEDLVGDPVKTLRRVYDFVGLLVSPEMEQFALNMTSGSGSSSKPFVVSARNATQAANAWRTALTFQQIKQVEEFCYQPMAVLGYERVNSPEEVKDLSKTLLRKPRL

SEQ ID NO: 17455 - protein, 147 aa, Homo sapiens
MSSEPPPPPQPPTHQASVGLLDTPRSRERSPSPLRGNVVPSPLPTRRTRTFSATVRASQGPVYKGVCKCFCRSKGHGFITPADGGPDIFLHISDVEGEYVPVEGDEVTYKMCSIPPKNEKLQAVEVVITHLAPGTKHETWSGHVISS

SEQ ID NO: 17456 - protein, 269 aa, Homo sapiens
MAYSSSNSDIEDDSSKSNSNLSLSVGYFPCEDTPCEDTTSWEDAPSKGPSIHFLPPVQGAWGTERIGRRMKRQDQIQDEPEQFCKLSIFLAWDVDIGSDNTDSRANRLLNGDNLWIDKLPKERTKLSVGKLNNLVQEFQIFLENLKDDDAVFPETAQQDFQLSSGSPPEMVQMISQATASQRTSAPEISSILSEQPEKDDTPSHTQAQCCLNFGWAFSWLRQRILPSLLRRDHPVNATKSPHRSAPTKRLFHRGKRIQPQETLELGHPI

SEQ ID NO: 17457 - protein, 476 aa, Homo sapiens
MASPFSGALQLTDLDDFIGPSQECIKPVKVEKRAGSGVAKIRIEDDGSYFQINQDGGTRRLEKAKVSLNDCLACSGCITSAETVLITQQSHEELKKVLDANKMAAPSQQRLVVVSVSPQSRASLAARFQLNPTDTARKLTSFFKKIGVHFVFDTAFSRHFSLLESQREFVRRFRGQADCRQALPLLASACPGWICYAEKTHGSFILPHISTARSPQQVMGSLVKDFFAQQQHLTPDKIYHVTVMPCYDKKLEASRPDFFNQEHQTRDVDCVLTTGEVFRLLEEEGVSLPDLEPAPLDSLCSGASAEEPTSHRGGGSGGYLEHVFRHAARELFGIHVAEVTYKPLRNKDFQEVTLEKEGQVLLHFAMAYGFRNIQNLVQRLKRGRCPYHYVEVMACPSGCLNGGGQLQAPDRPSRELLQHVERLYGMVRAEAPEDAPGVQELYTHWLQGTDSECAGRLLHTQYHAVEKASTGLGIRW

SEQ ID NO: 17458 - protein, 233 aa, Homo sapiens
MPCYDKKLEASRPDFFNQEHQTRDVDCVLTTGEVFRLLEEEGVSLPDLEPAPLDSLCSGASAEEPTSHRGGGSGGYLEHVFRHAARELFGIHVAEVTYKPLRNKDFQEVTLEKEGQVLLHFAMAYGFRNIQNLVQRLKRGRCPYHYVEVMACPSGCLNGGGQLQAPDRPSRELLQHVERLYGMVRAEAPEDAPGVQELYTHWLQGTDSECAGRLLHTQYHAVEKASTGLGIRW

SEQ ID NO: 17459 - protein, 374 aa, Homo sapiens
MAAPSQQRLVVVSVSPQSRASLAARFQLNPTDTARKLTSFFKKIGVHFVFDTAFSRHFSLLESQREFVRRFRGQADCRQALPLLASACPGWICYAEKTHGSFILPHISTARSPQQVMGSLVKDFFAQQQHLTPDKIYHVTVMPCYDKKLEASRPDFFNQEHQTRDVDCVLTTGEVFRLLEEEGVSLPDLEPAPLDSLCSGASAEEPTSHRGGGSGGYLEHVFRHAARELFGIHVAEVTYKPLRNKDFQEVTLEKEGQVLLHFAMAYGFRNIQNLVQRLKRGRCPYHYVEVMACPSGCLNGGGQLQAPDRPSRELLQHVERLYGMVRAEAPEDAPGVQELYTHWLQGTDSECAGRLLHTQYHAVEKASTGLGIRW

SEQ ID NO: 17460 - protein, 486 aa, Homo sapiens
MKGRRRRRREYCKFALLLVLYTLVLLLVPSVLDGGRDGDKGAEHCPGLQRSLGVWSLEAAAAGEREQGAEARAAEEGGANQSPRFPSNLSGAVGEAVSREKQHIYVHATWRTGSSFLGELFNQHPDVFYLYEPMWHLWQALYPGDAESLQGALRDMLRSLFRCDFSVLRLYAPPGDPAARAPDTANLTTAALFRWRTNKVICSPPLCPGAPRARAEVGLVEDTACERSCPPVAIRALEAECRKYPVVVIKDVRLLDLGVLVPLLRDPGLNLKVVQLFRDPRAVHNSRLKSRQGLLRESIQVLRTRQRGDRFHRVLLAHGVGARPGGQSRALPAAPRADFFLTGALEVICEAWLRDLLFARGAPAWLRRRYLRLRYEDLVRQPRAQLRRLLRFSGLRALAALDAFALNMTRGAAYGADRPFHLSARDAREAVHAWRERLSREQVRQVEAACAPAMRLLAYPRSGEEGDAEQPREGETPLEMDADGAT

SEQ ID NO: 17461 - protein, 325 aa, Homo sapiens
MKRLGSVQRKMPCVFVTEVKEEPSSKREHQPFKVLATETVSHKALDADIYSAIPTEKVDGTCCYVTTYKDQPYLWARLDRKPNKQAEKRFKNFLHSKENPKEFFWNVEEDFKPAPECWIPAKETEQINGNPVPDENGHIPGWVPVEKNNKQYCWHSSVVNYEFEIALVLKHHPDDSGLLEISAVPLSDLLEQTLELIGTNINGNPYGLGSKKHPLHLLIPHGAFQIRNLPSLKHNDLVSWFEDCKEGKIEGIVWHCSDGCLIKVHRHHLGLCWPIPDTYMNSRPVIINMNLNKCDSAFDIKCLFNHFLKIDNQKFVRLKDIIFDV

SEQ ID NO: 17462 - protein, 38 aa, Homo sapiens
MKRLGSVQRKMPCVFVTEVKEEPSSKREHQISHTFGLD

SEQ ID NO: 17463 - protein, 302 aa, Homo sapiens
MSLPFQPFKVLATETVSHKALDADIYSAIPTEKVDGTCCYVTTYKDQPYLWARLDRKPNKQAEKRFKNFLHSKENPKEFFWNVEEDFKPAPECWIPAKETEQINGNPVPDENGHIPGGWVPVEKNNKQYCWHSSVVNYEFEIALVLKHHPDDSGLLEISAVPLSDLLEQTLELIGTNINGNPYGLGSKKHPLHLLIPHGAFQIRNLPSLKHNDLVSWFEDCKEGKIEGIVWHCSDGCLIKVHRHHLGLCWPIPDTYMNSRPVIINMNLNKCDSAFDIKCLFNHFLKIDNQKFVRLKDIIFDV

SEQ ID NO: 17464 - protein, 424 aa, Homo sapiens
MTLRPGTMRLACMFSSILLFGAAGLLLFISLQDPTELAPQQVPGIKFNIRPRQPHHDLPPGGSQDGDLKEPTERVTRDLSSGAPRGRNLPAPDQPQPPLQRGTRLRLRQRRRRLLIKKMPAAATIPANSSDAPFIRPGPGTLDGRWVSLHRSQQERKRVMQEACAKYRASSSRRAVTPRHVSRIFVEDRHRVLYCEVPKAGCSNWKRVLMVLAGLASSTADIQHNTVHYGSALKRLDTFDRQGILHRLSTYTKMLFVREPFERLVSAFRDKFEHPNSYYHPVFGKAILARYRANASREALRTGSGVRFPEFVQYLLDVHRPVGMDIHWDHVSRLCSPCLIDYDFVGKFESMEDDANFFLSLIRAPRNLTFPRFKDRHSQEARTTARIAHQYFAQLSALQRQRTYDFYYMDYLMFNYSKPFADLY

SEQ ID NO: 17465 - protein, 1723 aa, Homo sapiens
MEKRSSGRRSGRRRGSQKSTDSPGADAELPESAARDDAVFDDEVAPNAASDNASAEKKVKSPRAALDGGVASAASPESKPSPGTKGQLRGESDRSKQPPPASSPTKRKGRSRALEAVPAPPASGPRAPAKESPPKRVPDPSPVTKGTAAESGEEAARAIPRELPVKSSSLLPEIKPEHKRGPLPNHFNGRAEGGRSRELGRAAGAPGASDADGLKPRNHFGVGRSTVTTKVTLPAKPKHVELNLKTPKNLDSLGNEHNPFSQPVHKGNTATKISLFENKRTNSSPRHTDIRGQRNTPASSKTFVGRAKLNLAKKAKEMEQPEKKVMPNSPQNGVLVKETAIETKVTVSEEEILPATRGMNGDSSENQALGPQPNQDDKADVQTDAGCLSEPVASALIPVKDHKLLEKEDSEAADSKSLVLENVTDTAQDIPTTVDTKDLPPTAMPKPQHTFSDSQSPAESSPGPSLSLSAPAPGDVPKDTCVQSPISSFPCTDLKVSENHKGCVLPVSRQNNEKMPLLELGGETTPPLSTERSPEAVGSECPSRVLVQVRSFVLPVESTQDVSSQVIPESSEVREVQLPTCHSNEPEVVSVASCAPPQEEVLGNEHSHCTAELAAKSGPQVIPPASEKTLPIQAQSQGSRTPLMAESSPTNSPSSGNHLATPQRPDQTVTNGQDSPASLLNISAGSDDSVFDSSSDMEKFTEIIKQMDSAVCMPMKRKKARMPNSPAPHFAMPPIHEDHLEKVFDPKVFTFGLGKKKESQPEMSPALHLMQNLDTKSKLRPKRASAEQSVLFKSLHTNTNGNSEPLVMPEINDKENRDVTNGGIKRSRLEKSALFSSLLSSLPQDKIFSPSVTSVNTMTTAFSTSQNGSLSQSSVSQPTTEGAPPCGLNKEQSNLLPDNSLKVFNFNSSSTSHSSLKSPSHMEKYPQKEKTKEDLDSRSNLHLPETKFSELSKLKNDDMEKANHIESVIKSNLPNCANSDTDFMGLFKSSRYDPSISFSGMSLSDTMTLRGSVQNKLNPRPGKVVIYSEPDVSEKCIEVFSDIQDCSSWSLSPVILIKVVRGCWILYEQPNFEGHSIPLEEGELELSGLWGIEDILERHEEAESDKPVVIGSIRHVVQDYRVSHIDLFTEPEGLGILSSYFDDTEEMQGFGVMQKTCSMKVHWGTWLIYEEPGFQGVPFILEPGEYPDLSFWDTEEAYIGSMRPLKMGGRKVEFPTDPKVVVYEKPFFEGKCVELETGMCSFVMEGGETEEATGDDHLPFTSVGSMKVLRGIWVAYEKPGFTGHQYLLEEGEYRDWKAWGGYNGELQSLRPILGDFSNAHMIMYSEKNFGSKGSSIDVLGIVANLKETGYGVKTQSINVLSGVWVAYENPDFTGEQYILDKGFYTSFEDWGGKNCKISSVQPICLDSFTGPRRRNQIHLFSEPQFQGHSQSFEETTSQIDDSFSTKSCRVSGGSWVVYDGENFTGNQYVLEEGHYPCLSAMGCPPGATFKSLRFIDVEFSEPTIILFEREDFKGKKIELNAETVNLRSLGFNTQIRSVQVIGGIWVTYEYGSYRGRQFLLSPAEVPNWYEFSGCRQIGSLRPFVQKRIYFRLRNKATGLFMSTNGNLEDLKLLRIQVMEDVGADDQIWIYQEGCIKCRIAEDCCLTIVGSLVTSGSKLGLALDQNADSQFWSLKSDGRIYSKLKPNLVLDIKGGTQYDQNHIILNTVSKEKFTQVWEAMVLYT

SEQ ID NO: 17466 - protein, 542 aa, Homo sapiens
MQKPKTVAWENLGPEMSALGTAFSREGGRKVEFPTDPKVVVYEKPFFEGKCVELETGMCSFVMEGGETEEATGDDHLPFTSVGSMKVLRGIWVAYEKPGFTGHQYLLEEGEYRDWKAWGGYNGELQSLRPILGDFSNAHMIMYSEKNFGSKGSSIDVLGIVANLKETGYGVKTQSINVLSGVWVAYENPDFTGEQYILDKGFYTSFEDWGGKNCKISSVQPICLDSFTGPRRRNQIHLFSEPQFQGHSQSFEETTSQIDDSFSTKSCRVSGGSWVVYDGENFTGNQYVLEEGHYPCLSAMGCPPGATFKSLRFIDVEFSEPTIILFEREDFKGKKIELNAETVNLRSLGFNTQIRSVQVIGGIWVTYEYGSYRGRQFLLSPAEVPNWYEFSGCRQIGSLRPFVQKRIYFRLRNKATGLFMSTNGNLEDLKLLRIQVMEDVGADDQIWIYQEGCIKCRIAEDCCLTIVGSLVTSGSKLGLALDQNADSQFWSLKSDGRIYSKLKPNLVLDIKGGTQYDQNHIILNTVSKEKFTQVWEAMVLYT

SEQ ID NO: 17467 - protein, 157 aa, Homo sapiens
MLVLLAGIFVVHIATVIMLFVSTIANVWLVSNTVDASVGLWKNCTNISCSDSLSYASEDALKTVQAFMILSIIFCVIALLVFVFQLFTMEKGNRFFLSGATTLVCWLCILVGVSIYTSHYANRDGTQYHHGYSYILGWICFCFSFIIGVLYLVLRKK

SEQ ID NO: 17468 - protein, 141 aa, Homo sapiens
MLVLLAGIFVVHIATVIMLFVSTIANVWLVSNTVDASVGLWKNCTNISCSDSLSYASEDALKTVQAFMILSIIFCVIALLVFVFQLFTMEKGNRFFLSGATTLVCFIMRIVMERSITTAIPTSWAGSASASASSSAFSIWS

SEQ ID NO: 17469 - protein, 554 aa, Homo sapiens
MTAPGAAGRCPPTTWLGSLLLLVCLLASRSITEEVSEYCSHMIGSGHLQSLQRLIDSQMETSCQITFEFVDQEQLKDPVCYLKKAFLLVQDIMEDTMRFRDNTPNAIAIVQLQELSLRLKSCFTKDYEEHDKACVRTFYETPLQLLEKVKNVFNETKNLLDKDWNIFSKNCNNSFAECSSQDVVTKPDCNCLYPKAIPSSDPASVSPHQPLAPSMAPVAGLTWEDSEGTEGSSLLPGEQPLHTVDPGSAKQRPPRSTCQSFEPPETPVVKDSTIGGSPQPRPSVGAFNPGMEDILDSAMGTNWVPEEASGEASEIPVPQGTELSPSRPGGGSMQTEPARPSNFLSASSPLPASAKGQQPADVTGTALPRVGPVRPTGQDWNHTPQKTDHPSALLRDPPEPGSPRISSLRPQGLSNPSTLSAQPQLSRSHSSGSVLPLGELEGRRSTRDRRSPAEPEGGPASEGAARPLPRFNSVPLTDTGHERQSEGSFSPQLQESVFHLLVPSVILVLLAVGGLLFYRWRRRSHQEPQRADSPLEQPEGSPLTQDDRQVELPV

SEQ ID NO: 17470 - protein, 438 aa, Homo sapiens
MTAPGAAGRCPPTTWLGSLLLLVCLLASRSITEEVSEYCSHMIGSGHLQSLQRLIDSQMETSCQITFEFVDQEQLKDPVCYLKKAFLLVQDIMEDTMRFRDNTPNAIAIVQLQELSLRLKSCFTKDYEEHDKACVRTFYETPLQLLEKVKNVFNETKNLLDKDWNIFSKNCNNSFAECSSQDVVTKPDCNCLYPKAIPSSDPASVSPHQPLAPSMAPVAGLTWEDSEGTEGSSLLPGEQPLHTVDPGSAKQRPPRSTCQSFEPPETPVVKDSTIGGSPQPRPSVGAFNPGMEDILDSAMGTNWVPEEASGEASEIPVPQGTELSPSRPGGGSMQTEPARPSNFLSASSPLPASAKGQQPADVTGHERQSEGSFSPQLQESVFHLLVPSVILVLLAVGGLLFYRWRRRSHQEPQRADSPLEQPEGSPLTQDDRQVELPV

SEQ ID NO: 17471 - protein, 256 aa, Homo sapiens
MTAPGAAGRCPPTTWLGSLLLLVCLLASRSITEEVSEYCSHMIGSGHLQSLQRLIDSQMETSCQITFEFVDQEQLKDPVCYLKKAFLLVQDIMEDTMRFRDNTPNAIAIVQLQELSLRLKSCFTKDYEEHDKACVRTFYETPLQLLEKVKNVFNETKNLLDKDWNIFSKNCNNSFAECSSQGHERQSEGSFSPQLQESVFHLLVPSVILVLLAVGGLLFYRWRRRSHQEPQRADSPLEQPEGSPLTQDDRQVELPV

SEQ ID NO: 17472 - protein, 619 aa, Homo sapiens
MAAVVQQNDLVFEFASNVMEDERQLGDPAIFPAVIVEHVPGADILNSYAGLACVEEPNDMITESSLDVAEEEIIDDDDDDITLTVEASCHDGDETIETIEAAEALLNMDSPGPMLDEKRINNNIFSSPEDDMVVAPVTHVSVTLDGIPEVMETQQVQEKYADSPGASSPEQPKRKKGRKTKPPRPDSPATTPNISVKKKNKDGKGNTIYLWEFLLALLQDKATCPKYIKWTQREKGIFKLVDSKAVSRLWGKHKNKPDMNYETMGRALRYYYQRGILAKVEGQRLVYQFKEMPKDLIYINDEDPSSSIESSDPSLSSSATSNRNQTSRSRVSSSPGVKGGATTVLKPGNSKAAKPKDPVEVAQPSEVLRTVQPTQSPYPTQLFRTVHVVQPVQAVPEGEAARTSTMQDETLNSSVQSIRTIQAPTQVPVVVSPRNQQLHTVTLQTVPLTTVIASTDPSAGTGSQKFILQAIPSSQPMTVLKENVMLQSQKAGSPPSIVLGPAQVQQVLTSNVQTICNGTVSVASSPSFSATAPVVTFSPRSSQLVAHPPGTVITSVIKTQETKTLTQEVEKKESEDHLKENTEKTEQQPQPYVMVVSSSNGFTSQVAMKQNELLEPNSF

SEQ ID NO: 17473 - protein, 595 aa, Homo sapiens
MAAVVQQNDLVFEFASNVMEDERQLGDPAIFPAVIVEHVPGADILNSYAGLACVEEPNDMITESSLDVAEEEIIDDDDDDITLTVEASCHDGDETIETIEAAEALLNMDSPGPMLDEKRINGIPEVMETQQVQEKYADSPGASSPEQPKRKKGRKTKPPRPDSPATTPNISVKKKNKDGKGNTIYLWEFLLALLQDKATCPKYIKWTQREKGIFKLVDSKAVSRLWGKHKNKPDMNYETMGRALRYYYQRGILAKVEGQRLVYQFKEMPKDLIYINDEDPSSSIESSDPSLSSSATSNRNQTSRSRVSSSPGVKGGATTVLKPGNSKAAKPKDPVEVAQPSEVLRTVQPTQSPYPTQLFRTVHVVQPVQAVPEGEAARTSTMQDETLNSSVQSIRTIQAPTQVPVVVSPRNQQLHTVTLQTVPLTTVIASTDPSAGTGSQKFILQAIPSSQPMTVLKENVMLQSQKAGSPPSIVLGPAQVQQVLTSNVQTICNGTVSVASSPSFSATAPVVTFSPRSSQLVAHPPGTVITSVIKTQETKTLTQEVEKKESEDHLKENTEKTEQQPQPYVMVVSSSNGFTSQVAMKQNELLEPNSF

SEQ ID NO: 17474 - protein, 591 aa, Homo sapiens
MFGIQESIQRSGSSMKEEPLGSGMNAVRTWMQGAGVLDANTAAQSGVGLARAHFEKQPPSNLRKSNFFHFVLALYDRQGQPVEIERTAFVGFVEKEKEANSEKTNNGIHYRLQLLYSNGIRTEQDFYVRLIDSMTKQAIVYEGQDKNPEMCRVLLTHEIMCSRCCDKKSCGNRNETPSDPVIIDRFFLKFFLKCNQNCLKNAGNPRDMRRFQVVVSTTVNVDGHVLAVSDNMFVHNNSKHGRRARRLDPSEGTPSYLEHATPCIKAISPSEGWTTGGATVIIIGDNFFDGLQVIFGTMLVWSELITPHAIRVQTPPRHIPGVVEVTLSYKSKQFCKGTPGRFIYTALNEPTIDYGFQRLQKVIPRHPGDPERLPKEVILKRAADLVEALYGMPHNNQEIILKRAADIAEALYSVPRNHNQLPALANTSVHAGMMGVNSFSGQLAVNVSEASQATNQGFTRNSSSVSPHGYVPSTTPQQTNYNSVTTSMNGYGSAAMSNLGGSPTFLNGSAANSPYAIVPSSPTMASSTSLPSNCSSSSGIFSFSPANMVSAVKQKSAFAPVVRPQTSPPPTCTSTNGNSLQAISGMIVPPM

SEQ ID NO: 17475 - protein, 560 aa, Homo sapiens
MFGIQESIQRSGSSMKEEPLGSGMNAVRTWMQGAGVLDANTAAQSGVGLARAHFEKQPPSNLRKSNFFHFVLALYDRQGQPVEIERTAFVGFVEKEKEANSEKTNNGIHYRLQLLYSNGIRTEQDFYVRLIDSMTKQAIVYEGQDKNPEMCRVLLTHEIMCRFFLKFFLKCNQNCLKNAGNPRDMRRFQVVVSTTVNVDGHVLAVSDNMFVHNNSKHGRRARRLDPSEATPCIKAISPSEGWTTGGATVIIIGDNFFDGLQVIFGTMLVWSELITPHAIRVQTPPRHIPGVVEVTLSYKSKQFCKGTPGRFIYTALNEPTIDYGFQRLQKVIPRHPGDPERLPKEVILKRAADLVEALYGMPHNNQEIILKRAADIAEALYSVPRNHNQLPALANTSVHAGMMGVNSFSGQLAVNVSEASQATNQGFTRNSSSVSPHGYVPSTTPQQTNYNSVTTSMNGYGSAAMSNLGGSPTFLNGSAANSPYAIVPSSPTMASSTSLPSNCSSSSGIFSFSPANMVSAVKQKSAFAPVVRPQTSPPPTCTSTNGNSLQAISGMIVPPM

SEQ ID NO: 17476 - protein, 442 aa, Homo sapiens [sequence omitted]

SEQ ID NO: 17477 - protein, 441 aa, Homo sapiens
MAGEGDQQDAAHNMGNHLPLLPESEEEDEMEVEDQDSKEAKKPNIINFDTSLPTSHTYLGADMEEFHGRTLHDDDSCQVIPVLPQVMMILIPGQTLPLQLFHPQEVSMVRNLIQKDRTFAVLAYSNVQEREAQFGTTAEIYAYREEQDFGIEIVKVKAIGRQRFKVLELRTQSDGIQQAKVQILPECVLPSTMSAVQLESLNKCQIFPSKPVSREDQCSYKWWQKYQKRKFHCANLTSWPRWLYSLYDAETLMDRIKKQLREWDENLKDDSLPSNPIDFSYRVAACLPIDDVLRIQLLKIGSAIQRLRCELDIMNKCTSLCCKQCQETEITTKNEIFSLSLCGPMAAYVNPHGYVHETLTVYKACNLNLIGRPSTEHSWFPGYAWTVAQCKICASHIGWKFTATKKDMSPQKFWGLTRSALLPTIPDTEDEISPDKVILCL

SEQ ID NO: 17478 - protein, 199 aa, Homo sapiens
MEARDKQVLRSLRLELGAEVLVEGLVLQYLYQEGILTENHIQEINAQTTGLRKTMLLLDILPSRGPKAFDTFLDSLQEFPWVREKLKKAREEAMTDLPAGDRLTGIPSHILNSSPSDRQINQLAQRLGPEWEPMVLSLGLSQTDIYRCKANHPHNVQSQVVEAFIRWRQRFGKQATFQSLHNGLRAVEVDPSLLLHMLE

SEQ ID NO: 17479 - protein, 103 aa, Homo sapiens
MEARDKQVLRSLRLELGAEVLVEGLVLQYLYQEGILTENHIQEINAQTTGLRKTMLLLDILPSRGPKAFDTFLDSLQEFPWVREKLKKAREEAMTDLPAGCWP

SEQ ID NO: 17480 - protein, 167 aa, Homo sapiens
MLVLLAFIIAFHITSAALLFIATVDNAWWVGDEFFADVWRICTNNTNCTVINDSFQEYSTLQAVQATMILSTILCCIAFFIFVLQLFRLKQGERFVLTSIIQLMSCLCVMIAASIYTDRREDIHDKNAKFYPVTREGSYGYSYILAWVAFACTFISGMMYLILRKRK

SEQ ID NO: 17481 - protein, 109 aa, Homo sapiens
MDFSESEKFMVLLWKNFILKRRRCIALVVEMVLTFLFSAALLATRSVITINKNGPFDFAAQPVDEVPFYITASLISPSPLELAYVPSRSTVVQGIIERVKMDLNPQMKG

SEQ ID NO: 17482 - protein, 593 aa, Homo sapiens
MTSAVVDSGGTILELSSNGVENQEESEKVSEYPAVIVEPVPSARLEQGYAAQVLVYDDETYMMQDVAEEQEVETENVETVEASVHSSNAHCTDKTIEAAEALLHMESPTCLRDSRSPVEVFVPPCVSTPEFIHAAMRPDVITETVVEVSTEESEPMDTSPIPTSPDSHEPMKKKKVGRKPKTQQSPISNGSPELGIKKKPREGKGNTTYLWEFLLDLLQDKNTCPRYIKWTQREKGIFKLVDSKAVSKLWGKHKNKPDMNYETMGRALRYYYQRGILAKVEGQRLVYQFKDMPKNIVVIDDDKSETCNEDLAGTTDEKSLERVSLSAESLLKAASSVRSGKNSSPINCSRAEKGVARVVNITSPGHDASSRSPTTTASVSATAAPRTVRVAMQVPVVMTSLGQKISTVAVQSVNAGAPLITSTSPTTATSPKVVIQTIPTVMPASTENGDKITMQPAKIITIPATQLAQCQLQTKSNLTGSGSINIVGTPLAVRALTPVSIAHGTPVMRLSMPTQQASGQTPPRVISAVIKGPEVKSEAVAKKQEHDVKTLQLVEEKPADGNKTVTHVVVVSAPSAIALPVTMKTEGLVTCEK

SEQ ID NO: 17483 - protein, 581 aa, Homo sapiens
MTSAVVDSGGTILELSSNGVENQEESEKVSEYPAVIVEPVPSARLEQGYAAQVLVYDDETYMMQDVAEEQEVETENVETVEASVHSSNAHCTDKTIEAAEALLHMESPTCLRDSRSPEFIHAAMRPDVITETVVEVSTEESEPMDTSPIPTSPDSHEPMKKKKVGRKPKTQQSPISNGSPELGIKKKPREGKGNTTYLWEFLLDLLQDKNTCPRYIKWTQREKGIFKLVDSKAVSKLWGKHKNKPDMNYETMGRALRYYYQRGILAKVEGQRLVYQFKDMPKNIVVIDDDKSETCNEDLAGTTDEKSLERVSLSAESLLKAASSVRSGKNSSPINCSRAEKGVARVVNITSPGHDASSRSPTTTASVSATAAPRTVRVAMQVPVVMTSLGQKISTVAVQSVNAGAPLITSTSPTTATSPKVVIQTIPTVMPASTENGDKITMQPAKIITIPATQLAQCQLQTKSNLTGSGSINIVGTPLAVRALTPVSIAHGTPVMRLSMPTQQASGQTPPRVISAVIKGPEVKSEAVAKKQEHDVKTLQLVEEKPADGNKTVTHVVVVSAPSAIALPVTMKTEGLVTCEK

SEQ ID NO: 17484 - protein, 521 aa, Homo sapiens
MATSLHEGPTNQLDLLIRAVEASVHSSNAHCTDKTIEAAEALLHMESPTCLRDSRSPEFIHAAMRPDVITETVVEVSTEESEPMDTSPIPTSPDSHEPMKKKKVGRKPKTQQSPISNGSPELGIKKKPREGKGNTTYLWEFLLDLLQDKNTCPRYIKWTQREKGIFKLVDSKAVSKLWGKHKNKPDMNYETMGRALRYYYQRGILAKVEGQRLVYQFKDMPKNIVVIDDDKSETCNEDLAGTTDEKSLERVSLSAESLLKAASSVRSGKNSSPINCSRAEKGVARVVNITSPGHDASSRSPTTTASVSATAAPRTVRVAMQVPVVMTSLGQKISTVAVQSVNAGAPLITSTSPTTATSPKVVIQTIPTVMPASTENGDKITMQPAKIITIPATQLAQCQLQTKSNLTGSGSINIVGTPLAVRALTPVSIAHGTPVMRLSMPTQQASGQTPPRVISAVIKGPEVKSEAVAKKQEHDVKTLQLVEEKPADGNKTVTHVVVVSAPSAIALPVTMKTEGLVTCEK

SEQ ID NO: 17485 - protein, 533 aa, Homo sapiens
MATSLHEGPTNQLDLLIRAVEASVHSSNAHCTDKTIEAAEALLHMESPTCLRDSRSPVEVFVPPCVSTPEFIHAAMRPDVITETVVEVSTEESEPMDTSPIPTSPDSHEPMKKKKVGRKPKTQQSPISNGSPELGIKKKPREGKGNTTYLWEFLLDLLQDKNTCPRYIKWTQREKGIFKLVDSKAVSKLWGKHKNKPDMNYETMGRALRYYYQRGILAKVEGQRLVYQFKDMPKNIVVIDDDKSETCNEDLAGTTDEKSLERVSLSAESLLKAASSVRSGKNSSPINCSRAEKGVARVVNITSPGHDASSRSPTTTASVSATAAPRTVRVAMQVPVVMTSLGQKISTVAVQSVNAGAPLITSTSPTTATSPKVVIQTIPTVMPASTENGDKITMQPAKIITIPATQLAQCQLQTKSNLTGSGSINIVGTPLAVRALTPVSIAHGTPVMRLSMPTQQASGQTPPRVISAVIKGPEVKSEAVAKKQEHDVKTLQLVEEKPADGNKTVTHVVVVSAPSAIALPVTMKTEGLVTCEK

SEQ ID NO: 17486 - protein, 504 aa, Homo sapiens
MATSLHEGPTNQLDLLIRAVEASVHSSNAHCTDKTIEAAEALLHMESPTCLRDSRSPVEVFVPPCVSTPEFIHAAMRPDVITETVVEVSTEESEPMDTSPIPTSPDSHEPMKKKKGNTTYLWEFLLDLLQDKNTCPRYIKWTQREKGIFKLVDSKAVSKLWGKHKNKPDMNYETMGRALRYYYQRGILAKVEGQRLVYQFKDMPKNIVVIDDDKSETCNEDLAGTTDEKSLERVSLSAESLLKAASSVRSGKNSSPINCSRAEKGVARVVNITSPGHDASSRSPTTTASVSATAAPRTVRVAMQVPVVMTSLGQKISTVAVQSVNAGAPLITSTSPTTATSPKVVIQTIPTVMPASTENGDKITMQPAKIITIPATQLAQCQLQTKSNLTGSGSINIVGTPLAVRALTPVSIAHGTPVMRLSMPTQQASGQTPPRVISAVIKGPEVKSEAVAKKQEHDVKTLQLVEEKPADGNKTVTHVVVVSAPSAIALPVTMKTEGLVTCEK

SEQ ID NO: 17487 - protein, 199 aa, Homo sapiens
MLLELSEEHKEHLAFLPQVDSAVVAEFGRIAVEFLRRGANPKIYEGAARKLNVSSDTVQHGVEGLTYLLTESSKLMISELDFQDSVFVLGFSEELNKLLLQLYLDNRKEIRTILSELAPSLPSYHNLEWRLDVQLASRSLRQQIKPAVTIKLHLNQNGDHNTKVLQTDPATLLHLVQQLEQALEEMKTNHCRRVVRNIK

SEQ ID NO: 17488 - protein, 169 aa, Homo sapiens
MLLELSEEHKEHLAFLPQVDSAVVAEFGRIAVEFLRRGANPKIYEGAARKLNVSSDTVQHGVEGLTYLLTESSKLMISELDFQDSVFVLGFSEELNKLLLQLYLDNRKEIRTILSELAPSLPSYHNLEWRLDVQLASRSLRQQIKPAVTIKLHLNQNGDHNTKVLGLQA

SEQ ID NO: 17489 - protein, 531 aa, Homo sapiens
MLPITDRLLHLLGLEKTAFRIYAVSTLLLFLLFFLFRLLLRFLRLCRSFYITCRRLRCFPQPPRRNWLLGHLGMYLPNEAGLQDEKKVLDNMHHVLLVWMGPVLPLLVLVHPDYIKPLLGASAAIAPKDDLFYGFLKPWLGDGLLLSKGDKWSRHRRLLTPAFHFDILKPYMKIFNQSADIMHAKWRHLAEGSAVSLDMFEHISLMTLDSLQKCVFSYNSNCQEKMSDYISAIIELSALSVRRQYRLHHYLDFIYYRSADGRRFRQACDMVHHFTTEVIQERRRALRQQGAEAWLKAKQGKTLDFIDVLLLARDEDGKELSDEDIRAEADTFMFEGHDTTSSGISWMLFNLAKYPEYQEKCREEIQEVMKGRELEELEWDDLTQLPFTTMCIKESLRQYPPVTLVSRQCTEDIKLPDGRIIPKGIICLVSIYGTHHNPTVWPDSKVYNPYRFDPDNPQQRSPLAYVPFSAGPRNCIGQSFAMAELRVVVALTLLRFRLSVDRTRKVRRKPELILRTENGLWLKVEPLPPRA

SEQ ID NO: 17490 - protein, 405 aa, Homo sapiens
MNLDGTSGGFPAEEDHHNEERQTKNKRKTKHRHKFSEELLQELKEIFGENCYPDYTTRKTLAIKFDCPVNVIDNWFQNKRARLPPAERRRIFVLQKKHDFPVQAHSFLSCQETQAAAHNYATKQSLSGAQRALMRRAGCSHLEKQWIPSQEMGYNCFSLENQETPSQQVGPQCSYLEKPGIPSQQVGSQCSYLEKLGIPSQQVASQSSYLVTGTEKHPGCAMGYGGDTGSGHSGSGHSTAYHFLSYNSAECLHPPPSSVPYFHGERTETKESQHASPFLLDYAQGAYGVKKDHCLCSFCLSLLGQQQQNDWQYHLQQHQQPQNYLEGMMLQEQLPMDSGPWDLGKQWSSAQSQLQSQLPQNNGKPLCSQLQHMSLQIAADSPLLPLGQDMQERASEQPRTQMQQL

SEQ ID NO: 17491 - protein, 980 aa, Homo sapiens
MATAATSPALKRLDLRDPAALFETHGAEEIRGLERQVRAEIEHKKEELRQMVGERYRDLIEAADTIGQMRRCAVGLVDAVKATDQYCARLRQAGSAAPRPPRAQQPQQPSQEKFYSMAAQIKLLLEIPEKIWSSMEASQCLHATQLYLLCCHLHSLLQLDSSSSRYSPVLSRFPILIRQVAAASHFRSTILHESKMLLKCQGVSDQAVAEALCSIMLLEESSPRQALTDFLLARKATIQKLLNQPHHGAGIKAQICSLVELLATTLKQAHALFYTLPEGLLPDPALPCGLLFSTLETITGQHPAGKGTGVLQEEMKLCSWFKHLPASIVEFQPTLRTLAHPISQEYLKDTLQKWIHMCNEDIKNGITNLLMYVKSMKGLAGIRDAMWELLTNESTNHSWDVLCRRLLEKPLLFWEDMMQQLFLDRLQTLTKEGFDSISSSSKELLVSALQELESSTSNSPSNKHIHFEYNMSLFLWSESPNDLPSDAAWVSVANRGQFASSGLSMKAQAISPCVQNFCSALDSKLKVKLDDLLAYLPSDDSSLPKDVSPTQAKSSAFDRYADAGTVQEMLRTQSVACIKHIVDCIRAELQSIEEGVQGQQDALNSAKLHSVLFMARLCQSLGELCPHLKQCILGKSESSEKPAREFRALRKQGKVKTQEIIPTQAKWQEVKEVLLQQSVMGYQVWSSAVVKVLIHGFTQSLLLDDAGSVLATATSWDELEIQEEAESGSSVTSKIRLPAQPSWYVQSFLFSLCQEINRVGGHALPKVTLQEMLKSCMVQVVAAYEKLSEEKQIKKEGAFPVTQNRALQLLYDLRYLNIVLTAKGDEVKSGRSKPDSRIEKVTDHLEALIDPFDLDVFTPHLNSNLHRLVQRTSVLFGLVTGTENQLAPRSSTFNSQEPHNILPLASSQIRFGLLPLSMTSTRKAKSTRNIETKAQVVPPARSTAGDPTVPGSLFRQLVSEEDNTSAPSLFKLGWLSSMTK

SEQ ID NO: 17492 - protein, 210 aa, Homo sapiens
MQAEGRGTGGSTGDADGPGGPGIPDGPGGNAGGPGEAGATGGRGPRGAGAARASGPRGGAPRGPHGGAASAQDGRCPCGARRPDSRLLELHITMPFSSPMEAELVRRILSRDAAPLPRPGAVLKDFTVSGNLLFMSVRDQDREGAGRMRVVGWGLGSASPEGQKARDLRTPKHKVSEQRPGTPGPPPPEGAQGDGCRGVAFNVMFSAPHI

SEQ ID NO: 17493 - protein, 180 aa, Homo sapiens
MQAEGRGTGGSTGDADGPGGPGIPDGPGGNAGGPGEAGATGGRGPRGAGAARASGPRGGAPRGPHGGAASAQDGRCPCGARRPDSRLLELHITMPFSSPMEAELVRRILSRDAAPLPRPGAVLKDFTVSGNLLFIRLTAADHRQLQLSISSCLQQLSLLMWITQCFLPVFLAQAPSGQRR

SEQ ID NO: 17494 - protein, 114 aa, Homo sapiens
MSLLSSRAARVPGPSSSLCALLVLLLLLTQPGPIASAGPAAAVLRELRCVCLQTTQGVHPKMISNLQVFAIGPQCSKVEVVASLKNGKEICLDPEAPFLKKVIQKILDGGNKEN

SEQ ID NO: 17495 - protein, 153 aa, Homo sapiens
MEGCLRIEEALTLGGACLFAGLAFLWAAFAQHFSAADSPGTEFTPATTTSRLLHVLYVCSCSLVAEKDDFSSPHSHSLLLVSLPEPHFELSEGLRLAFRGSQSSDSIRYRRGGNEGVRPWRAGATGLPPTGKDISVSLAHELYSLLKQLQMSI

SEQ ID NO: 17496 - protein, 745 aa, Homo sapiens
MSLKPRVVDFDETWNKLLTTIKAVVMLEYVERATWNDRFSDIYALCVAYPEPLGERLYTETKIFLENHVRHLHKRVLESEEQVLVMYHRYWEEYSKGADYMDCLYRYLNTQFIKKNKLTEADLQYGYGGVDMNEPLMEIGELALDMWRKLMVEPLQAILIRMLLREIKNDRGGEDPNQKVIHGVINSFVHVEQYKKKFPLKFYQEIFESPFLTETGEYYKQEASNLLQESNCSQYMEKVLGRLKDEEIRCRKYLHPSSYTKVIHECQQRMVADHLQFLHAECHNIIRQEKKNDMANMYVLLRAVSTGLPHMIQELQNHIHDEGLRATSNLTQENMPTLFVESVLEVHGKFVQLINTVLNGDQHFMSALDKALTSVVNYREPKSVCKAPELLAKYCDNLLKKSAKGMTENEVEDRLTSFITVFKYIDDKDVFQKFYARMLAKRLIHGLSMSMDSEEAMINKLKQACGYEFTSKLHRMYTDMSVSADLNNKFNNFIKNQDTVIDLGISFQIYVLQAGAWPLTQAPSSTFAIPQELEKSVQMFELFYSQHFSGRKLTWLHYLCTGEVKMNYLGKPYVAMVTTYQMAVLLAFNNSETVSYKELQDSTQMNEKELTKTIKSLLDVKMINHDSEKEDIDAESSFSLNMNFSSKRTKFKITTSMQKDTPQEMEQTRSAVDEDRKMYLQAAIVRIMKARKVLRHNALIQEVISQSRARFNPSISMIKKCIEVLIDKQYIERSQASADEYSYVA

SEQ ID NO: 17497 - protein, 764 aa, Homo sapiens
MYRVTWSTFWLRFQHYTCTMSLKPRVVDFDETWNKLLTTIKAVVMLEYVERATWNDRFSDIYALCVAYPEPLGERLYTETKIFLENHVRHLHKRVLESEEQVLVMYHRYWEEYSKGADYMDCLYRYLNTQFIKKNKLTEADLQYGYGGVDMNEPLMEIGELALDMWRKLMVEPLQAILIRMLLREIKNDRGGEDPNQKVIHGVINSFVHVEQYKKKFPLKFYQEIFESPFLTETGEYYKQEASNLLQESNCSQYMEKVLGRLKDEEIRCRKYLHPSSYTKVIHECQQRMVADHLQFLHAECHNIIRQEKKNDMANMYVLLRAVSTGLPHMIQELQNHIHDEGLRATSNLTQENMPTLFVESVLEVHGKFVQLINTVLNGDQHFMSALDKALTSVVNYREPKSVCKAPELLAKYCDNLLKKSAKGMTENEVEDRLTSFITVFKYIDDKDVFQKFYARMLAKRLIHGLSMSMDSEEAMINKLKQACGYEFTSKLHRMYTDMSVSADLNNKFNNFIKNQDTVIDLGISFQIYVLQAGAWPLTQAPSSTFAIPQELEKSVQMFELFYSQHFSGRKLTWLHYLCTGEVKMNYLGKPYVAMVTTYQMAVLLAFNNSETVSYKELQDSTQMNEKELTKTIKSLLDVKMINHDSEKEDIDAESSFSLNMNFSSKRTKFKITTSMQKDTPQEMEQTRSAVDEDRKMYLQAAIVRIMKARKVLRHNALIQEVISQSRARFNPSISMIKKCIEVLIDKQYIERSQASADEYSYVA

SEQ ID NO: 17498 - protein, 759 aa, Homo sapiens
MADEAPRKGSFSALVGRTNGLTKPAALAAAPAKPGGAGGSKKLVIKNFRDRPRLPDNYTQDTWRKLHEAVRAVQSSTSIRYNLEELYQAVENLCSHKVSPMLYKQLRQACEDHVQAQILPFREDSLDSVLFLKKINTCWQDHCRQMIMIRSIFLFLDRTYVLQNSTLPSIWDMGLELFRTHIISDKMVQSKTIDGILLLIERERSGEAVDRSLLRSLLGMLSDLQVYKDSFELKFLEETNCLYAAEGQRLMQEREVPEYLNHVSKRLEEEGDRVITYLDHSTQKPLIACVEKQLLGEHLTAILQKGLDHLLDENRVPDLAQMYQLFSRVRGGQQALLQHWSEYIKTFGTAIVINPEKDKDMVQDLLDFKDKVDHVIEVCFQKNERFVNLMKESFETFINKRPNKPAELIAKHVDSKLRAGNKEATDEELERTLDKIMILFRFIHGKDVFEAFYKKDLAKRLLVGKSASVDAEKSMLSKLKHECGAAFTSKLEGMFKDMELSKDIMVHFKQHMQNQSDSGPIDLTVNILTMGYWPTYTPMEVHLTPEMIKLQEVFKAFYLGKHSGRKLQWQTTLGHAVLKAEFKEGKKEFQVSLFQTLVLLMFNEGDGFSFEEIKMATGIEDSELRRTLQSLACGKARVLIKSPKGKEVEDGDKFIFNGEFKHKLFRIKINQIQMKETVEEQVSTTERVFQDRQYQIDAAIVRIMKMRKTLGHNLLVSELYNQLKFPVKPGDLKKRIESLIDRDYMERDKDNPNQYHYVA

SEQ ID NO: 17499 - protein, 659 aa, Homo sapiens
MLYKQLRQACEDHVQAQILPFREDSLDSVLFLKKINTCWQDHCRQMIMIRSIFLFLDRTYVLQNSTLPSIWDMGLELFRTHIISDKMVQSKTIDGILLLIERERSGEAVDRSLLRSLLGMLSDLQVYKDSFELKFLEETNCLYAAEGQRLMQEREVPEYLNHVSKRLEEEGDRVITYLDHSTQKPLIACVEKQLLGEHLTAILQKGLDHLLDENRVPDLAQMYQLFSRVRGGQQALLQHWSEYIKTFGTAIVINPEKDKDMVQDLLDFKDKVDHVIEVCFQKNERFVNLMKESFETFINKRPNKPAELIAKHVDSKLRAGNKEATDEELERTLDKIMILFRFIHGKDVFEAFYKKDLAKRLLVGKSASVDAEKSMLSKLKHECGAAFTSKLEGMFKDMELSKDIMVHFKQHMQNQSDSGPIDLTVNILTMGYWPTYTPMEVHLTPEMIKLQEVFKAFYLGKHSGRKLQWQTTLGHAVLKAEFKEGKKEFQVSLFQTLVLLMFNEGDGFSFEEIKMATGIEDSELRRTLQSLACGKARVLIKSPKGKEVEDGDKFIFNGEFKHKLFRIKINQIQMKETVEEQVSTTERVFQDRQYQIDAAIVRIMKMRKTLGHNLLVSELYNQLKFPVKPGDLKKRIESLIDRDYMERDKDNPNQYHYVA

SEQ ID NO: 17500 - protein, 822 aa, Homo sapiens
MGFSSELCSPQGHGVLQQMQEAELRLLEGMRKWMAQRVKSDREYAGLLHHMSLQDSGGQSRAISPDSPISQSWAEITSQTEGLSRLLRQHAEDLNSGPLSKLSLLIRERQQLRKTYSEQWQQLQQELTKTHSQDIEKLKSQYRALARDSAQAKRKYQEASKDKDRDKAKDKYVRSLWKLFAHHNRYVLGVRAAQLHHQHHHQLLLPGLLRSLQDLHEEMACILKEILQEYLEISSLVQDEVVAIHREMAAAAARIQPEAEYQGFLRQYGSAPDVPPCVTFDESLLEEGEPLEPGELQLNELTVESVQHTLTSVTDELAVATEMVFRRQEMVTQLQQELRNEEENTHPRERVQLLGKRQVLQEALQGLQVALCSQAKLQAQQELLQTKLEHLGPGEPPPVLLLQDDRHSTSSSEQEREGGRTPTLEILKSHISGIFRPKFSLPPPLQLIPEVQKPLHEQLWYHGAIPRAEVAELLVHSGDFLVRESQGKQEYVLSVLWDGLPRHFIIQSLDNLYRLEGEGFPSIPLLIDHLLSTQQPLTKKSGVVLHRAVPKDKWVLNHEDLVLGEQIGRGNFGEVFSGRLRADNTLVAVKSCRETLPPDLKAKFLQEARILKQYSHPNIVRLIGVCTQKQPIYIVMELVQGGDFLTFLRTEGARLRVKTLLQMVGDAAAGMEYLESKCCIHRDLAARNCLVTEKNVLKISDFGMSREEADGVYAASGGLRQVPVKWTAPEALNYGRYSSESDVWSFGILLWETFSLGASPYPNLSNQQTREFVEKGGRLPCPELCPDAVFRLMEQCWAYEPGQRPSFSTIYQELQSIRKRHR

SEQ ID NO: 17501 - protein, 694 aa, Homo sapiens
MGFSSELCSPQGHGVLQQMQEAELRLLEGMRKWMAQRVKSDREYAGLLHHMSLQDSGGQSRAISPDSPISQTHSQDIEKLKSQYRALARDSAQAKRKYQEASKDKDRDKAKDKYVRSLWKLFAHHNRYVLGVRAAQLHHQHHHQLLLPGLLRSLQDLHEEMACILKEILQEYLEISSLVQDEVVAIHREMAAAAARIQPEAEYQGFLRQYGSAPDVPPCVTFDESLLEEGEPLEPGELQLNELTVESVQHTLTSVTDELAVATEMVFRRQEMVTQLQQELRNEEENTHPRERVQLLGKRQVLQEALQGLQVALCSQAKLQAQQELLQTKLEHLGPGEPPPVLLLQDDRHSTSSSEQEREGGRTPTLEILKSHISGIFRPKFSNLYRLEGEGFPSIPLLIDHLLSTQQPLTKKSGVVLHRAVPKDKWVLNHEDLVLGEQIGRGNFGEVFSGRLRADNTLVAVKSCRETLPPDLKAKFLQEARILKQYSHPNIVRLIGVCTQKQPIYIVMELVQGGDFLTFLRTEGARLRVKTLLQMVGDAAAGMEYLESKCCIHRDLAARNCLVTEKNVLKISDFGMSREEADGVYAASGGLRQVPVKWTAPEALNYGRYSSESDVWSFGILLWETFSLGASPYPNLSNQQTREFVEKGGRLPCPELCPDAVFRLMEQCWAYEPGQRPSFSTIYQELQSIRKRHR

SEQ ID NO: 17502 - protein, 764 aa, Homo sapiens
MGFSSELCSPQGHGVLQQMQEAELRLLEGMRKWMAQRVKSDREYAGLLHHMSLQDSGGQSRAISPDSPISQTHSQDIEKLKSQYRALARDSAQAKRKYQEASKDKDRDKAKDKYVRSLWKLFAHHNRYVLGVRAAQLHHQHHHQLLLPGLLRSLQDLHEEMACILKEILQEYLEISSLVQDEVVAIHREMAAAAARIQPEAEYQGFLRQYGSAPDVPPCVTFDESLLEEGEPLEPGELQLNELTVESVQHTLTSVTDELAVATEMVFRRQEMVTQLQQELRNEEENTHPRERVQLLGKRQVLQEALQGLQVALCSQAKLQAQQELLQTKLEHLGPGEPPPVLLLQDDRHSTSSSEQEREGGRTPTLEILKSHISGIFRPKFSLPPPLQLIPEVQKPLHEQLWYHGAIPRAEVAELLVHSGDFLVRESQGKQEYVLSVLWDGLPRHFIIQSLDNLYRLEGEGFPSIPLLIDHLLSTQQPLTKKSGVVLHRAVPKDKWVLNHEDLVLGEQIGRGNFGEVFSGRLRADNTLVAVKSCRETLPPDLKAKFLQEARILKQYSHPNIVRLIGVCTQKQPIYIVMELVQGGDFLTFLRTEGARLRVKTLLQMVGDAAAGMEYLESKCCIHRDLAARNCLVTEKNVLKISDFGMSREEADGVYAASGGLRQVPVKWTAPEALNYGRYSSESDVWSFGILLWETFSLGASPYPNLSNQQTREFVEKGGRLPCPELCPDAVFRLMEQCWAYEPGQRPSFSTIYQELQSIRKRHR

SEQ ID NO: 17503 - protein, 752 aa, Homo sapiens
MGFSSELCSPQGHGVLQQMQEAELRLLEGMRKWMAQRVKSDREYAGLLHHMSLQDSGGQSRAISPDSPISQSWAEITSQTEGLSRLLRQHAEDLNSGPLSKLSLLIRERQQLRKTYSEQWQQLQQELTKTHSQDIEKLKSQYRALARDSAQAKRKYQEASKDKDRDKAKDKYVRSLWKLFAHHNRYVLGVRAAQLHHQHHHQLLLPGLLRSLQDLHEEMACILKEILQEYLEISSLVQDEVVAIHREMAAAAARIQPEAEYQGFLRQYGSAPDVPPCVTFDESLLEEGEPLEPGELQLNELTVESVQHTLTSVTDELAVATEMVFRRQEMVTQLQQELRNEEENTHPRERVQLLGKRQVLQEALQGLQVALCSQAKLQAQQELLQTKLEHLGPGEPPPVLLLQDDRHSTSSSEQEREGGRTPTLEILKSHISGIFRPKFSNLYRLEGEGFPSIPLLIDHLLSTQQPLTKKSGVVLHRAVPKDKWVLNHEDLVLGEQIGRGNFGEVFSGRLRADNTLVAVKSCRETLPPDLKAKFLQEARILKQYSHPNIVRLIGVCTQKQPIYIVMELVQGGDFLTFLRTEGARLRVKTLLQMVGDAAAGMEYLESKCCIHRDLAARNCLVTEKNVLKISDFGMSREEADGVYAASGGLRQVPVKWTAPEALNYGRYSSESDVWSFGILLWETFSLGASPYPNLSNQQTREFVEKGGRLPCPELCPDAVFRLMEQCWAYEPGQRPSFSTIYQELQSIRKRHR

SEQ ID NO: 17504 - protein, 313 aa, Homo sapiens
MPKVKSGAIGRRRGRQEQRRELKSAGGLMFNTGIGQHILKNPLIINSIIDKAALRPTDVVLEVGPGTGNMTVKLLEKAKKVVACELDPRLVAELHKRVQGTPVASKLQVLVGDVLKTDLPFFDTCVANLPYQISSPFVFKLLLHRPFFRCAILMFQREFALRLVAKPGDKLYCRLSINTQLLARVDHLMKVGKNNFRPPPKVESSVVRIEPKNPPPPINFQEWDGLVRITFVRKNKTLSAAFKSSAVQQLLEKNYRIHCSVHNIIIPEDFSIADKIQQILTSTGFSDKRARSMDIDDFIRLLHGFNAEGIHFS

SEQ ID NO: 17505 - protein, 345 aa, Homo sapiens
MEPQKIMPPSKPHPPVVGKVTHHSIELYWDLEKKAKRQGPQEQWFRFSIEEEDPKMHTYGIIYTGYATKHVVEGLEPRTLYRFRLKVTSPSGECEYSPLVSVSTTREPISSEHLHRAVSVNDEDLLVRILQGGRVKVDVPNKFGFTALMVAAQKGYTRLVKILVSNGTDVNLKNGSGKDSLMLACYAGHLDVVKYLRRHGASWQARDLGGCTALHWAADGGHCSVIEWMIKDGCEVDVVDTGSGWTPLMRVSAVSGNQRVASLLIDAGANVNVKDRNGKTPLMVAVLNNHEELVQLLLDKGADASVKNEFGKGVLEMARVFDRQSVVSLLEERKKKQRPKKSCVC

SEQ ID NO: 17506 - protein, 336 aa, Homo sapiens
MEPQKIMPPSKPHPPVVGKVTHHSIELYWDLEKKAKRQGPQEQWFRFSIEEEDPKMHTYGIIYTGYATKHVVEGLEPRTLYRFRLKVTSPSGECEYSPLVSVSTTREPISSEHLHRAVSVNDEDLLVRILQGGRVKVDVPNKFGFTALMVAAQKGYTRLVKILVSNGTDVNLKNGSGKDSLMLACYAGHLDVVKYLRRHGASWQARDLGGCTALHWAADGGHCSVIEWMIKDGCEVDVVDTGSGWTPLMRVSAVSGNQRVASLLIDAGANVNVKDRNGKTPLMVAVLNNHEELVQLLLDKGADASVKNEFGKGVLEMARVFDRQVGMLFLPIKANF

SEQ ID NO: 17507 - protein, 371 aa, Homo sapiens
MEPQKIMPPSKPHPPVVGKVTHHSIELYWDLEKKAKRQGPQEQWFRFSIEEEDPKMHTYGIIYTGYATKHVVEGLEPRTLYRFRLKVTSPSGECEYSPLVSVSTTRPSLSKSLVKIRMVTSVLHGPPTENTGEPISSEHLHRAVSVNDEDLLVRILQGGRVKVDVPNKFGFTALMVAAQKGYTRLVKILVSNGTDVNLKNGSGKDSLMLACYAGHLDVVKYLRRHGASWQARDLGGCTALHWAADGGHCSVIEWMIKDGCEVDVVDTGSGWTPLMRVSAVSGNQRVASLLIDAGANVNVKDRNGKTPLMVAVLNNHEELVQLLLDKGADASVKNEFGKGVLEMARVFDRQSVVSLLEERKKKQRPKKSCVC

SEQ ID NO: 17508 - protein, 302 aa, Homo sapiens
MHYPTALLFLILANGAQAFRICAFNAQRLTLAKVAREQVMDTLVRILARCDIMVLQEVVDSSGSAIPLLLRELNRFDGSGPYSTLSSPQLGRSTYMETYVYFYRSHKTQVLSSYVYNDEDDVFAREPFVAQFSLPSNVLPSLVLVPLHTTPKAVEKELNALYDVFLEVSQHWQSKDVILLGDFNADCASLTKKRLDKLELRTEPGFHWVIADGEDTTVRASTHCTYDRVVLHGERCRSLLHTAAAFDFPTSFQLTEEEALNISDHYPVEVELKLSQAHSVQPLSLTVLLLLSLLSPQLCPAA

SEQ ID NO: 17509 - protein, 412 aa, Homo sapiens
MTLRRRGEKATISIQEHMAIDVCPGPIRPIKQISDYFPRFPRGLPPDAGPRAAAPPDAPARPAVAGAGRRSPSDGAREDDEDVDQLFGAYGSSPGPSPGPSPARPPAKPPEDEPDADGYESDDCTALGTLDFSLLYDQENNALHCTITKAKGLKPMDHNGLADPYVKLHLLPGASKANKLRTKTLRNTLNPTWNETLTYYGITDEDMIRKTLRISVCDEDKFRHNEFIGETRVPLKKLKPNHTKTFSICLEKQLPVDKTEDKSLEERGRILISLKYSSQKQGLLVGIVRCAHLAAMDANGYSDPYVKTYLRPDVDKKSKHKTAVKKKTLNPEFNEEFCYEIKHGDLAKKSLEVTVWDYDIGKSNDFIGGVVLGIHAKGERLKHWFDCLKNKDKRIERWHTLTSELPGAVLSD

SEQ ID NO: 17510 - protein, 1870 aa, Homo sapiens
MARWIPTKRQKYGVAIYNYNASQDVELSLQIGDTVHILEMYEGWYRGYTLQNKSKKGIFPETYIHLKEATVEDLGQHETVIPGELPLVQELTSTLREWAVIWRKLYVNNKLTLFRQLQQMTYSLIEWRSQILSGTLPKDELAELKKKVTAKIDHGNRMLGLDLVVRDDNGNILDPDETSTIALFKAHEVASKRIEEKIQEEKSILQNLDLRGQSIFSTIHTYGLYVNFKNFVCNIGEDAELFMALYDPDQSTFISENYLIRWGSNGMPKEIEKLNNLQAVFTDLSSMDLIRPRVSLVCQIVRVGHMELKEGKKHTCGLRRPFGVAVMDITDIIHGKVDDEEKQHFIPFQQIAMETYIRQRQLIMSPLITSHVIGENEPLTSVLNKVIAAKEVNHKGQGLWVSLKLLPGDLTQVQKNFSHLVDRSTAIARKMGFPEIILPGDVRNDIYVTLIHGEFDKGKKKTPKNVEVTMSVHDEEGKLLEKAIHPGAGYEGISEYKSVVYYQVKQPCWYETVKVSIAIEEVTRCHIRFTFRHRSSQETRDKSERAFGVAFVKLMNPDGTTLQDGRHDLVVYKGDNKKMEDAKFYLTLPGTKMEMEEKELQASKNLVTFTPSKDSTKDSFQIATLICSTKLTQNVDLLGLLNWRSNSQNIKHNLKKLMEVDGGEIVKFLQDTLDALFNIMMEMSDSETYDFLVFDALVFIISLIGDIKFQHFNPVLETYIYKHFSATLAYVKLSKVLNFYVANADDSSKTELLFAALKALKYLFRFIIQSRVLYLRFYGQSKDGDEFNNSIRQLFLAFNMLMDRPLEEAVKIKGAALKYLPSIINDVKLVFDPVELSVLFCKFIQSIPDNQLVRQKLNCMTKIVESTLFRQSECREVLLPLLTDQLSGQLDDNSNKPDHEASSQLLSNILEVLDRKDVGATAVHIQLIMERLLRRINRTVIGMNRQSPHIGSFVACMIALLQQMDDSHYSHYISTFKTRQDIIDFLMETFIMFKDLIGKNVYAKDWMVMNMTQNRVFLRAINQFAEVLTRFFMDQASFELQLWNNYFHLAVAFLTHESLQLETFSQAKRNKIVKKYGDMRKEIGFRIRDMWYNLGPHKIKFIPSMVGPILEVTLTPEVELRKATIPIFFDMMQCEFNFSGNGNFHMFENELITKLDQEVEGGRGDEQYKVLLEKLLLEHCRKHKYLSSSGEVFALLVSSLLENLLDYRTIIMQDESKENRMSCTVNVLNFYKEKKREDIYIRYLYKLRDLHRDCENYTEAAYTLLLHAELLQWSDKPCVPHLLQKDSYYVYTQQELKEKLYQEIISYFDKGKMWEKAIKLSKELAETYESKVFDYEGLGNLLKKRASFYENIIKAMRPQPEYFAVGYYGQGFPSFLRNKIFIYRGKEYERREDFSLRLLTQFPNAEKMTSTTPPGEDIKSSPKQYMQCFTVKPVMSLPPSYKDKPVPEQILNYYRANEVQQFRYSRPFRKGEKDPDNEFATMWIERTTYTTAYTFPGILKWFEVKQISTEEISPLENAIETMELTNERISNCVQQHAWDRSLSVHPLSMLLSGIVDPAVMGGFSNYEKAFFTEKYLQEHPEDQEKVELLKRLIALQMPLLTEGIRIHGEKLTEQLKPLHERLSSCFRELKEKVEKHYGVITLPPNLTERKQSRTGSIVLPYIMSSTLRRLSITSVTSSVVSTSSNSSDNAPSRPGSDGSILEPLLERRASSGARVEDLSLREENSENRISKFKRKDWSLSKSQVIAEKAPEPDLMSPTRKAQRPKSLQLMDNRLSPFHGSSPPQSTPLSPPPLTPKATRTLSSPSLQTDGIAATPVPPPPPPKSKPYEGSQRNSTELAPPLPVRREAKAPPPPPPKARKSGIPTSEPGSQ

SEQ ID NO: 17511 - protein, 350 aa, Homo sapiens
MARWIPTKRQKYGVAIYNYNASQDVELSLQIGDTVHILEMYEGWYRGYTLQNKSKKGIFPETYIHLKEATVEDLGQHETVIPGELPLVQELTSTLREWAVIWRKLYVNNKLTLFRQLQQMTYSLIEWRSQILSGTLPKDELAELKKKVTAKIDHGNRMLGLDLVVRDDNGNILDPDETSTIALFKAHEVASKRIEEKIQEEKSILQNLDLRGQSIFSTIHTYGLYVNFKNFVCNIGEDAELFMALYDPDQSTFISENYLIRWGSNGMPKEIEKLNNLQAVFTDLSSMDLIRPRVSLVCQIVRVGHMELKEGKKHTCGLRRPFGVAVMDITDIIHGKVDDEEKQHFIPFQQ

SEQ ID NO: 17512 - protein, 743 aa, Homo sapiens
MEAAAVTVTRSATRRRRRQLQGLAAPEAGTQEEQEDQEPRPRRRRPGRSIKDEEEETVFREVVSFSPDPLPVRYYDKDTTKPISFYLSSLEELLAWKPRLEDGFNVALEPLACRQPPLSSQRPRTLLCHDMMGGYLDDRFIQGSVVQTPYAFYHWQCIDVFVYFSHHTVTIPPVGWTNTAHRHGVCVLGTFITEWNEGGRLCEAFLAGDERSYQAVADRLVQITQFFRFDGWLINIENSLSLAAVGNMPPFLRYLTTQLHRQVPGGLVLWYDSVVQSGQLKWQDELNQHNRVFFDSCDGFFTNYNWREEHLERMLGQAGERRADVYVGVDVFARGNVVGGRFDTDKSLELIRKHGFSVALFAPGWVYECLEKKDFFQNQDKFWGRLERYLPTHSICSLPFVTSFCLGMGARRVCYGQEEAVGPWYHLSAQEIQPLFGEHRLGGDGRGWVRTHCCLEDAWHGGSSLLVRGVIPPEVGNVAVRLFSLQAPVPPKIYLSMVYKLEGPTDVTVALELTTGDAGSCHIGGISVLNAETSSRHSLRPLRVPPTKLARWVGRCGRQLSGGWVQHCYEVSLRGCLLLDLLVCFSRPPGSREEESFTCRLGEIQVVDAASLLAPLPQVQAVTISHIRWQPSASEREGPPALLQLSCTLHWSFLLSQVRCFRIHCWGGMSDDSPGRELPRPEMPMFLGLAFATQYRIVDLLVEAAGPGQDRRMEFLVEPVPKEGFRVPQAEWGRAVLLYSAPA

SEQ ID NO: 17513 - protein, 377 aa, Homo sapiens
MEAAAVTVTRSATRRRRRQLQGLAAPEAGTQEEQEDQEPRPRRRRPGRSIKDEEEETVFREVVSFSPDPLPVRYYDKDTTKPISFYLSSLEELLAWKPRLEDGFNVALEPLACRQPPLSSQRPRTLLCHDMMGGYLDDRFIQGSVVQTPYAFYHWQCIDVFVYFSHHTVTIPPVGWTNTAHRHGVCVLGTFITEWNEGGRLCEAFLAGDERSYQAVADRLVQITQFFRFDGWLINIENSLSLAAVGNMPPFLRYLTTQLHRQVPGGLVLWYDSVVQSGQLKWQDELNQHNRVFFDSCDGFFTNYNWREEHLERMLGQAGERRADVYVGVDVFARGNVVGGRFDTDKSLELIRKHGFSVALFAPSCSVFPGVGNLLCC

SEQ ID NO: 17514 - protein, 406 aa, Homo sapiens
MEAAAVTVTRSATRRRRRQLQGLAAPEAGTQEEQEDQEPRPRRRRPGRSIKDEEEETVFREVVSFSPDPLPVRYYDKDTTKPISFYLSSLEELLAWKPRLEDGFNVALEPLACRQPPLSSQRPRTLLCHDMMGGYLDDRFIQGSVVQTPYAFYHWQCIDVFVYFSHHTVTIPPVGWTNTAHRHGVCVLGTFITEWNEGGRLCEAFLAGDERSYQAVADRLVQITQFFRFDGWLINIENSLSLAAVGNMPPFLRYLTTQLHRQVPGGLVLWYDSVVQSGQLKWQDELNQHNRVFFDSCDGFFTNYNWREEHLERMLGQAGERRADVYVGVDVFARGNVVGGRFDTDKVGGGFRPRASGPVPPLGPHFLMDLPFPSAPQRNDSSCSSQSGDPVALRNRCPAPAKLCPH

SEQ ID NO: 17515 - protein, 821 aa, Homo sapiens
MPTRVCCCCSALRPRYKRLVDNIFPEDPKDGLVKTDMEKLTFYAVSAPEKLDRIGSYLAERLSRDVVRHRSGYVLIAMEALDQLLMACHSQSIKPFVESFLHMVAKLLESGEPKLQVLGTNSFVKFANIEEDTPSYHRRYDFFVSRFSAMCHSCHSDPEIRTEIRIAGIRGIQGVVRKTVNDELRATIWEPQHMDKIVPSLLFNMQKIEEVDSRIGPPSSPSATDKEENPAVLAENCFRELLGRATFGNMNNAVRPVFAHLDHHKLWDPNEFAVHCFKIIMYSIQAQYSHHVIQEILGHLDARKKDAPRVRAGIIQVLLEAVAIAAKGSIGPTVLEVFNTLLKHLRLSVEFEANDLQGGSVGSVNLNTSSKDNDEKIVQNAIIQTIGFFGSNLPDYQRSEIMMFIMGKVPVFGTSTHTLDISQLGDLGTRRIQIMLLRSLLMVTSGYKAKTIVTALPGSFLDPLLSPSLMEDYELRQLVLEVMHNLMDRHDNRAKLRGIRIIPDVADLKIKREKICRQDTSFMKKNGQQLYRHIYLGCKEEDNVQKNYELLYTSLALITIELANEEVVIDLIRLAIALQDSAIINEDNLPMFHRCGIMALVAAYLNFVSQMIAVPAFCQHVSKVIEIRTMEAPYFLPEHIFRDKCMLPKSLEKHEKDLYFLTNKIAESLGGSGYSVERLSVPYVPQVTDEDRLSRRKSIVDTVSIQVDILSNNVPSDDVVSNTEEITFEALKKAIDTSGMEEQEKEKRRLVIEKFQKAPFEEIAAQCESKANLLHDRLAQILELTIRPPPSPSGTLTITSGHAQYQSVPVYEMKFPDLCVY

SEQ ID NO: 17516 - protein, 785 aa, Homo sapiens
MEKLTFYAVSAPEKLDRIGSYLAERLSRDVVRHRSGYVLIAMEALDQLLMACHSQSIKPFVESFLHMVAKLLESGEPKLQVLGTNSFVKFANIEEDTPSYHRRYDFFVSRFSAMCHSCHSDPEIRTEIRIAGIRGIQGVVRKTVNDELRATIWEPQHMDKIVPSLLFNMQKIEEVDSRIGPPSSPSATDKEENPAVLAENCFRELLGRATFGNMNNAVRPVFAHLDHHKLWDPNEFAVHCFKIIMYSIQAQYSHHVIQEILGHLDARKKDAPRVRAGIIQVLLEAVAIAAKGSIGPTVLEVFNTLLKHLRLSVEFEANDLQGGSVGSVNLNTSSKDNDEKIVQNAIIQTIGFFGSNLPDYQRSEIMMFIMGKVPVFGTSTHTLDISQLGDLGTRRIQIMLLRSLLMVTSGYKAKTIVTALPGSFLDPLLSPSLMEDYELRQLVLEVMHNLMDRHDNRAKLRGIRIIPDVADLKIKREKICRQDTSFMKKNGQQLYRHIYLGCKEEDNVQKNYELLYTSLALITIELANEEVVIDLIRLAIALQDSAIINEDNLPMFHRCGIMALVAAYLNFVSQMIAVPAFCQHVSKVIEIRTMEAPYFLPEHIFRDKCMLPKSLEKHEKDLYFLTNKIAESLGGSGYSVERLSVPYVPQVTDEDRLSRRKSIVDTVSIQVDILSNNVPSDDVVSNTEEITFEALKKAIDTSGMEEQEKEKRRLVIEKFQKAPFEEIAAQCESKANLLHDRLAQILELTIRPPPSPSGTLTITSGHAQYQSVPVYEMKFPDLCVY

SEQ ID NO: 17517 - protein, 777 aa, Homo sapiens
MPTRVCCCCSALRPRYKRLVDNIFPEDPKDGLVKTDMEKLTFYAVSAPEKLDRIGSYLAERLSRDVVRHRSGYVLIAMEALDQLLMACHSQSIKPFVESFLHMVAKLLESGEPKLQVLGTNSFVKFANIEEDTPSYHRRYDFFVSRFSAMCHSCHSDPEIRTEIRIAGIRGIQGVVRKTVNDELRATIWEPQHMDKIVPSLLFNMQKIEEVDSRIGPPSSPSATDKEENPAVLAENCFRELLGRATFGNMNNAVRPVFAHLDHHKLWDPNEFAVHCFKIIMYSIQAQYSHHVIQEILGHLDARKKDAPRVRAGIIQVLLEAVAIAAKGSIGPTVLEVFNTLLKHLRLSVEFEANDLQGGSVGSVNLNTSSKDNDEKIVQNAIIQTIGFFGSNLPDYQRSEIMMFIMGKVPVFGTSTHTLDISQLGDLGTRRIQIMLLRSLLMVTSGYKAKTIVTALPGSFLDPLLSPSLMEDYELRQLVLEVMHNLMDRHDNRAKLRGIRIIPDVADLKIKREKICRQDTSFMKKNGQQLYRHIYLGCKEEDNVQKNYELLYTSLALITIELANEEVVIDLIRLAIALQDSAIINEDNLPMFHRCGIMALVAAYLNFVSQMIAVPAFCNKIAESLGGSGYSVERLSVPYVPQVTDEDRLSRRKSIVDTVSIQVDILSNNVPSDDVVSNTEEITFEALKKAIDTSGMEEQEKEKRRLVIEKFQKAPFEEIAAQCESKANLLHDRLAQILELTIRPPPSPSGTLTITSGHAQYQSVPVYEMKFPDLCVY

SEQ ID NO: 17518 - protein, 325 aa, Homo sapiens
MSLLRSLRVFLVARTGSYPAGSLLRQSPQPRHTFYAGPRLSASASSKELLMKLRRKTGYSFVNCKKALETCGGDLKQAEIWLHKEAQKEGWSKAAKLQGRKTKEGLIGLLQEGNTTVLVEVNCETDFVSRNLKFQLLVQQVALGTMMHCQTLKDQPSAYSKGFLNSSELSGLPAGPDREGSLKDQLALAIGKLGENMILKRAAWVKVPSGFYVGSYVHGAMQSPSLHKLVLGKYGALVICETSEQKTNLEDVGRRLGQHVVGMAPLSVGSLDDEPGGEAETKMLSQPYLLDPSITLGQYVQPQGVSVVDFVRFECGEGEEAAETE

SEQ ID NO: 17519 - protein, 346 aa, Homo sapiens
MSLLRSLRVFLVARTGSYPAGSLLRQSPQPRHTFYAGPRLSASASSKELLMKLRRKTGYSFVNCKKALETCGGDLKQAEIWLHKEAQKEGWSKAAKLQGRKTKEGLIGLLQEGNTTVLVEVNCETDFVSRNLKFQLLVQQVALGTMMHCQTLKDQPSAYSKVQWLTPVNLALWEAEAGGSLEGFLNSSELSGLPAGPDREGSLKDQLALAIGKLGENMILKRAAWVKVPSGFYVGSYVHGAMQSPSLHKLVLGKYGALVICETSEQKTNLEDVGRRLGQHVVGMAPLSVGSLDDEPGGEAETKMLSQPYLLDPSITLGQYVQPQGVSVVDFVRFECGEGEEAAETE

SEQ ID NO: 17520 - protein, 167 aa, Homo sapiens
MSLLRSLRVFLVARTGSYPAGSLLRQSPQPRHTFYAGPRLSASASSKELLMKLRRKTGYSFVNCKKALETCGGDLKQAEIWLHKEAQKEGWSKAAKLQGRKTKEGLIGLLQEGNTTVLVEVNCETDFVSRNLKFQLLVQQVALGTMMHCQTLKDQPSAYSKENWEKT

SEQ ID NO: 17521 - protein, 215 aa, Homo sapiens
MSLLRSLRVFLVARTGSYPAGSLLRQSPQPRHTFYAGPRLSASASSKELLMKLRRKTGYSFVNCKKALETCGGDLKQAEIWLHKEAQKEGWSKAAKLQGRKTKEGLIGLLQEGNTTVLVEVNCETDFVSRNLKFQLLVQQVALGTMMHCQTLKDQPSAYSKGFLNSSELSGLPAGPDREGSLKDQLALAIGLPFQIGAVSELQLPESNFLQNTSS

SEQ ID NO: 17522 - protein, 381 aa, Homo sapiens
MNEKSCSFHSKEELRDGQGERLSAGYSPSYDKDKSVLAFRGIPISELKNHGILQALTTEAYEWEPRVVSTEVVRAQEEWEAVDTIQPETGSQASSEQPGQLISFSEALQHFQTVDLSPFKKRIQPTIRRTGLAALRHYLFGPPKLHQRLREERDLVLTIAQCGLDSQDPVHGRVLQTIYKKLTGSKFDCALHGNHWEDLGFQGANPATDLRGAGFLALLHLLYLVMDSKTLPMAQEIFRLSRHHIQQFPFCLMSVNITHIAIQALREECLSRECNRQQKVIPVVNSFYAATFLHLAHVWRTQRKTISDSGFVLKELEVLAKKSPRRLLKTLELYLARVSKGQASLLGAQKCYGPEAPPFKDLTFTGESDLQSHSSEGVWLI

SEQ ID NO: 17523 - protein, 254 aa, Homo sapiens
MNEKSCSFHSKEELRDGQGERLSAGYSPSYDKDKSVLAFRGIPISELKNHGILQALTTEAYEWEPRVVSTEVVRAQEEWEAVDTIQPETGSQASSEQPGQLISFSEALQHFQTVDLSPFKKRIQPTIRRTGLAALRHYLFGPPKLHQRLREERDLVLTIAQCGLDSQDPVHGRVLQTIYKKLTGSKFDCALHGNHWEDLGFQGANPATDLRGAGFLALLHLLYLVMDSKTLPMAQEIFRLSRHHIQIERNQGKG

SEQ ID NO: 17524 - protein, 161 aa, Homo sapiens
MNEKSCSFHSKEELRDGQGERLSAGYSPSYDKDKSVLAFRGIPISELKNHGILQALTTEAYEWEPRVVSTEVVRAQEEWEAVDTIQPETGSQASSEQPGQLISFSEALQHFQTVDLSPFKKRIQPTIRRTGLAALRHYLFGPPKLHQRLREERDLVLTIAQ

SEQ ID NO: 17525 - protein, 185 aa, Homo sapiens
MNEKSCSFHSKEELRDGQGERLSAGYSPSYDKDKSVLAFRGIPISELKNHGILQALTTEAYEWEPRVVSTEVVRAQEEWEAVDTIQPETGSQASSEQPGQLISFSEALQHFQTVDLSPFKKRIQPTIRRTGLAALRHYLFGPPKLHQRLREERDLVLTIAQCECNASPQGSCCICGWARPCVLTL

SEQ ID NO: 17526 - protein, 391 aa, Homo sapiens
MNEKSCSFHSKEELRDGQGERLSAGYSPSYDKDKSVLAFRGIPISELKNHGILQALTTEAYEWEPRVVSTEVVRAQEEWEAVDTIQPETGSQASSEQPGQLISFSEALQHFQTVDLSPFKKRIQPTIRRTGLAALRHYLFGPPKLHQRLREERDLVLTIAQCGLDSQDPVHGRVLQTIYKKLTGSKFDCALHGNHWEDLGFQGANPATDLRGAGFLALLHLLYLVMDSKTLPMAQEIFRLSRHHIQQFPFCLMSVNITHIAIQALREECLSRECNRQQKVIPVVNSFYAATFLHLAHVWRTQRKTISDSGFVLKGVLFLLGRPRLNAQCPRSREPKVVARLVLAAVLPHPHFLKFQLTKISITHPLESASSPFSALTVALFWSYTYDKHIF

SEQ ID NO: 17527 - protein, 720 aa, Homo sapiens
MPPPSDIVKVAIEWPGANAQLLEIDQKRPLASIIKEVCDGWSLPNPEYYTLRYADGPQLYITEQTRSDIKNGTILQLAISPSRAARQLMERTQSSNMETRLDAMKELAKLSADVTFATEFINMDGIIVLTRLVESGTKLLSHYSEMLAFTLTAFLELMDHGIVSWDMVSITFIKQIAGYVSQPMVDVSILQRSLAILESMVLNSQSLYQKIAEEITVGQLISHLQVSNQEIQTYAIALINALFLKAPEDKRQDMANAFAQKHLRSIILNHVIRGNRPIKTEMAHQLYVLQVLTFNLLEERMMTKMDPNDQAQRDIIFELRRIAFDAESDPSNAPGSGTEKRKAMYTKDYKMLGFTNHINPAMDFTQTPPGMLALDNMLYLAKVHQDTYIRIVLENSSREDKHECPFGRSAIELTKMLCEILQVGELPNEGRNDYHPMFFTHDRAFEELFGICIQLLNKTWKEMRATAEDFNKVMQVVREQITRALPSKPNSLDQFKSKLRSLSYSEILRLRQSERMSQDDFQSPPIVELREKIQPEILELIKQQRLNRLCEGSSFRKIGNRRRQERFWYCRLALNHKVLHYGDLDDNPQGEVTFESLQEKIPVADIKAIVTGKDCPHMKEKSALKQNKEVLELAFSILYDPDETLNFIAPNKYEYCIWIDGLSALLGKDMSSELTKSDLDTLLSMEMKLRLLDLENIQIPEAPPPIPKEPSSYDFVYHYG

SEQ ID NO: 17528 - protein, 632 aa, Homo sapiens
MERTQSSNMETRLDAMKELAKLSADVTFATEFINMDGIIVLTRLVESGTKLLSHYSEMLAFTLTAFLELMDHGIVSWDMVSITFIKQIAGYVSQPMVDVSILQRSLAILESMVLNSQSLYQKIAEEITVGQLISHLQVSNQEIQTYAIALINALFLKAPEDKRQDMANAFAQKHLRSIILNHVIRGNRPIKTEMAHQLYVLQVLTFNLLEERMMTKMDPNDQAQRDIIFELRRIAFDAESDPSNAPGSGTEKRKAMYTKDYKMLGFTNHINPAMDFTQTPPGMLALDNMLYLAKVHQDTYIRIVLENSSREDKHECPFGRSAIELTKMLCEILQVGELPNEGRNDYHPMFFTHDRAFEELFGICIQLLNKTWKEMRATAEDFNKVMQVVREQITRALPSKPNSLDQFKSKLRSLSYSEILRLRQSERMSQDDFQSPPIVELREKIQPEILELIKQQRLNRLCEGSSFRKIGNRRRQERFWYCRLALNHKVLHYGDLDDNPQGEVTFESLQEKIPVADIKAIVTGKDCPHMKEKSALKQNKEVLELAFSILYDPDETLNFIAPNKYEYCIWIDGLSALLGKDMSSELTKSDLDTLLSMEMKLRLLDLENIQIPEAPPPIPKEPSSYDFVYHYG

SEQ ID NO: 17529 - protein, 434 aa, Homo sapiens
MAMQKIFAREILDSRGNPTVEVDLHTAKGRFRAAVPSGASTGIYEALELRDGDKGRYLGKGVLKAVENINNTLGPALLQKKLSVVDQEKVDKFMIELDGTENKSKFGANAILGVSLAVCKAGAAEKGVPLYRHIADLAGNPDLILPVPAFNVINGGSHAGNKLAMQEFMILPVGASSFKEAMRIGAEVYHHLKGVIKAKYGKDATNVGDEGGFAPNILENNEALELLKTAIQAAGYPDKVVIGMDVAASEFYRNGKYDLDFKSPDDPARHITGEKLGELYKSFIKNYPVVSIEDPFDQDDWATWTSFLSGVNIQIVGDDLTVTNPKRIAQAVEKKACNCLLLKVNQIGSVTESIQACKLAQSNGWGVMVSHRSGETEDTFIADLVVGLCTGQIKTGAPCRSERLAKYNQLMRIEEALGDKAIFAGRKFRNPKAK

SEQ ID NO: 17530 - protein, 406 aa, Homo sapiens
MAMQKIFAREILDSRGNPTVEVDLHTAKGRFRAAVPSGASTGIYEALELRDGDKGRYLGKGVLKAVENINNTLGPALLQKKLSVVDQEKVDKFMIELDGTENKSKFGANAILGVSLAVCKAGAAEKGVPLYRHIADLAGNPDLILPVPAFKEAMRIGAEVYHHLKGVIKAKYGKDATNVGDEGGFAPNILENNEALELLKTAIQAAGYPDKVVIGMDVAASEFYRNGKYDLDFKSPDDPARHITGEKLGELYKSFIKNYPVVSIEDPFDQDDWATWTSFLSGVNIQIVGDDLTVTNPKRIAQAVEKKACNCLLLKVNQIGSVTESIQACKLAQSNGWGVMVSHRSGETEDTFIADLVVGLCTGQIKTGAPCRSERLAKYNQLMRIEEALGDKAIFAGRKFRNPKAK

SEQ ID NO: 17531 - protein, 391 aa, Homo sapiens
MAMQKIFAREILDSRGNPTVEVDLHTAKGRFRAAVPSGASTGIYEALELRDGDKGRYLGKAKFGANAILGVSLAVCKAGAAEKGVPLYRHIADLAGNPDLILPVPAFNVINGGSHAGNKLAMQEFMILPVGASSFKEAMRIGAEVYHHLKGVIKAKYGKDATNVGDEGGFAPNILENNEALELLKTAIQAAGYPDKVVIGMDVAASEFYRNGKYDLDFKSPDDPARHITGEKLGELYKSFIKNYPVVSIEDPFDQDDWATWTSFLSGVNIQIVGDDLTVTNPKRIAQAVEKKACNCLLLKVNQIGSVTESIQACKLAQSNGWGVMVSHRSGETEDTFIADLVVGLCTGQIKTGAPCRSERLAKYNQLMRIEEALGDKAIFAGRKFRNPKAK

SEQ ID NO: 17532 - protein, 270 aa, Homo sapiens
MVTAMNVSHEVNQLFQPYNFELSKDMRPFFEEYWATSFPIALIYLVLIAVGQNYMKERKGFNLQGPLILWSFCLAIFSILGAVRMWGIMGTVLLTGGLKQTVCFINFIDNSTVKFWSWVFLLSKVIELGDTAFIILRKRPLIFIHWYHHSTVLVYTSFGYKNKVPAGGWFVTMNFGVHAIMYTYYTLKAANVKPPKMLPMLITSLQILQMFVGAIVSILTYIWRQDQGCHTTMEHLFWSFILYMTYFILFAHFFCQTYIRPKVKAKTKSQ

SEQ ID NO: 17533 - protein, 299 aa, Homo sapiens
MEHFDASLSTYFKALLGPRDTRVKGWFLLDNYIPTFICSVIYLLIVWLGPKYMRNKQPFSCRGILVVYNLGLTLLSLYMFCELVTGVWEGKYNFFCQGTRTAGESDMKIIRVLWWYYFSKLIEFMDTFFFILRKNNHQITVLHVYHHASMLNIWWFVMNWVPCGHSYFGATLNSFIHVLMYSYYGLSSVPSMRPYLWWKKYITQGQLLQFVLTIIQTSCGVIWPCTFPLGWLYFQIGYMISLIALFTNFYIQTYNKKGASRRKDHLKDHQNGSMAAVNGHTNSFSPLENNVKPRKLRKD

SEQ ID NO: 17534 - protein, 326 aa, Homo sapiens
MEHFDASLSTYFKALLGPRDTRVKGWFLLDNYIPTFICSVIYLLIVWLGPKYMRNKQPFSCRGILVVYNLGLTLLSLYMFCESKREQPRRSACASRTDPSTQQQLPENRLVTGVWEGKYNFFCQGTRTAGESDMKIIRVLWWYYFSKLIEFMDTFFFILRKNNHQITVLHVYHHASMLNIWWFVMNWVPCGHSYFGATLNSFIHVLMYSYYGLSSVPSMRPYLWWKKYITQGQLLQFVLTIIQTSCGVIWPCTFPLGWLYFQIGYMISLIALFTNFYIQTYNKKGASRRKDHLKDHQNGSMAAVNGHTNSFSPLENNVKPRKLRKD

SEQ ID NO: 17535 - protein, 88 aa, Homo sapiens
MEHFDASLSTYFKALLGPRGISSSVLRMGPPLHTVVGWLQQLQAAHSEEEEKMFHLCGFKHKEVVSQSSLPAVIPQNSLATIASHAPA

SEQ ID NO: 17536 - protein, 462 aa, Homo sapiens
MSAGGPCPAAAGGGPGGASCSVGAPGGVSMFRWLEVLEKEFDKAFVDVDLLLGEIDPDQADITYEGRQKMTSLSSCFAQLCHKAQSVSQINHKLEAQLVDLKSELTETQAEKVVLEKEVHDQLLQLHSIQLQLHAKTGQSADSGTIKAKLSGPSVEELERELEANKKEKMKEAQLEAEVKLLRKENEALRRHIAVLQAEVYGARLAAKYLDKELAGRVQQIQLLGRDMKGPAHDKLWNQLEAEIHLHRHKTVIRACRGRNDLKRPMQAPPGHDQDSLKKSQGVGPIRKVLLLKEDHEGLGISITGGKEHGVPILISEIHPGQPADRCGGLHVGDAILAVNGVNLRDTKHKEAVTILSQQRGEIEFEVVYVAPEVDSDDENVEYEDESGHRYRLYLDELEGGGNPGASCKDTSGEIKVLQGFNKKAVTDTHENGDLGTASETPLDDGASKLDDLHTLYHKKSY

SEQ ID NO: 17537 - protein, 454 aa, Homo sapiens
MSAGGPCPAAAGGGPGGASCSVGAPGGVSMFRWLEVLEKEFDKAFVDVDLLLGEIDPDQADITYEGRQKMTSLSSCFAQLCHKAQSVSQINHKLEAQLVDLKSELTETQAEKVVLEKEVHDQLLQLHSIQLQLHAKTGQSADSGTIKAKLERELEANKKEKMKEAQLEAEVKLLRKENEALRRHIAVLQAEVYGARLAAKYLDKELAGRVQQIQLLGRDMKGPAHDKLWNQLEAEIHLHRHKTVIRACRGRNDLKRPMQAPPGHDQDSLKKSQGVGPIRKVLLLKEDHEGLGISITGGKEHGVPILISEIHPGQPADRCGGLHVGDAILAVNGVNLRDTKHKEAVTILSQQRGEIEFEVVYVAPEVDSDDENVEYEDESGHRYRLYLDELEGGGNPGASCKDTSGEIKVLQGFNKKAVTDTHENGDLGTASETPLDDGASKLDDLHTLYHKKSY

SEQ ID NO: 17538 - protein, 319 aa, Homo sapiens
MSAGGPCPAAAGGGPGGASCSVGAPGGVSMFRWLEVLEKEFDKAFVDVDLLLGEIDPDQADITYEGRQKMTSLSSCFAQLCHKAQSVSQINHKLEAQLVDLKSELTETQAEKVVLEKEVHDQLLQLHSIQLQLHAKTGQSADSGTIKAKLSGPSVEELERELEANKKEKMKEAQLEAEVKLLRKENEALRRHIAVLQAEVYGARLAAKYLDKELAGRVQQIQLLGRDMKGPAHDKLWNQLEAEIHLHRHKTVIRACRGRNDLKRPMQAPPGHDQDSLKKSQGVGPIRKVLLLKEDHEGLGISITVRSSTSSIIFYSYLV

SEQ ID NO: 17539 - protein, 589 aa, Homo sapiens
MAVARGVGSPEPAPPQLYKWGGCGLGEPGSALERRGAAARGRCGRARAPRLPDSFPRGECPKPGARAPRSVRCGEPLPPASPPPARPQAQRARPRAPHSRRRAMLHLSEFSEPDALLVKSTEGCCAEPSAELPRLPARDAPAATGYPGAGDFLSWALNSCGASGDLADSCFLEGPAPTPPPGLSYSGSFFIQAVPEHPHDPEALFNLMSGILGLAPFPGPEAAASRSPLDAPFPAGSDALLPGPPDLYSPDLGAAPFPEAFWEASPCAGAPSQCLYEPQLSPPDVKPGLRAPPASPALDAVSAFKGPYAPWELLSVGAPGNCGSQGDYQAAPEARFPVIGTKIEDLLSISCPAELPAVPANRLYPSGAYDAFPLAPGDLGEGAEGLPGLLTPPSGEGGSSGDGGEFLASTQPQLSPLGLRSAAAADFPKPLVADIPGSSGVAAPPVPPPPPTPFPQAKARRKGRRGGKCSTRCFCPRPHAKAFACPVESCVRSFARSDELNRHLRIHTGHKPFQCRICLRNFSRSDHLTTHVRTHTGEKPFACDVCGRRFARSDEKKRHSKVHLKQKARAEERLKGLGFYSLGLSFASL

SEQ ID NO: 17540 - protein, 603 aa, Homo sapiens
MRRKEKRLLQAVALVLAALVLLPNVGLWALYRERQPDGTPGGSGAAVAPAAGQGSHSRQKKTFFLGDGQKLKDWHDKEAIRRDAQRVGNGEQGRPYPMTDAERVDQAYRENGFNIYVSDKISLNRSLPDIRHPNCNSKRYLETLPNTSIIIPFHNEGWSSLLRTVHSVLNRSPPELVAEIVLVDDFSDREHLKKPLEDYMALFPSVRILRTKKREGLIRTRMLGASVATGDVITFLDSHCEANVNWLPPLLDRIARNRKTIVCPMIDVIDHDDFRYETQAGDAMRGAFDWEMYYKRIPIPPELQKADPSDPFESPVMAGGLFAVDRKWFWELGGYDPGLEIWGGEQYEISFKVWMCGGRMEDIPCSRVGHIYRKYVPYKVPAGVSLARNLKRVAEVWMDEYAEYIYQRRPEYRHLSAGDVAVQKKLRSSLNCKSFKWFMTKIAWDLPKFYPPVEPPAAAWGEIRNVGTGLCADTKHGALGSPLRLEGCVRGRGEAAWNNMQVFTFTWREDIRPGDPQHTKKFCFDAISHTSPVTLYDCHSMKGNQLWKYRKDKTLYHPVSGSCMDCSESDHRIFMNTCNPSSLTQQWLFEHTNSTVLEKFNRN

SEQ ID NO: 17541 - protein, 541 aa, Homo sapiens
MRRKEKRLLQAVALVLAALVLLPNVGLWALYRERQPDGTPGGSGAAVAPAAGQGSHSRQKKTFFLGDGQKLKDWHDKEAIRRDAQRVGNGEQGRPYPMTDAERVDQAYRENGFNIYVSDKISLNRSLPDIRHPNCNSKRYLETLPNTSIIIPFHNEGWSSLLRTVHSVLNRSPPELVAEIVLVDDFSDRDRIARNRKTIVCPMIDVIDHDDFRYETQAGDAMRGAFDWEMYYKRIPIPPELQKADPSDPFESPVMAGGLFAVDRKWFWELGGYDPGLEIWGGEQYEISFKVWMCGGRMEDIPCSRVGHIYRKYVPYKVPAGVSLARNLKRVAEVWMDEYAEYIYQRRPEYRHLSAGDVAVQKKLRSSLNCKSFKWFMTKIAWDLPKFYPPVEPPAAAWGEIRNVGTGLCADTKHGALGSPLRLEGCVRGRGEAAWNNMQVFTFTWREDIRPGDPQHTKKFCFDAISHTSPVTLYDCHSMKGNQLWKYRKDKTLYHPVSGSCMDCSESDHRIFMNTCNPSSLTQQWLFEHTNSTVLEKFNRN

SEQ ID NO: 17542 - protein, 366 aa, Homo sapiens
MRRKEKRLLQAVALVLAALVLLPNVGLWALYRERQPDGTPGGSGAAVAPAAGQGSHSRQKKTFFLGDGQKLKDWHDKEAIRRDAQRVGNGEQGRPYPMTDAERVDQAYRENGFNIYVSDKISLNRSLPDIRHPNCNSKRYLETLPNTSIIIPFHNEGWSSLLRTVHSVLNRSPPELVAEIVLVDDFSDREHLKKPLEDYMALFPSVRILRTKKREGLIRTRMLGASVATGDVITFLDSHCEANVNWLPPLLDRIARNRKTIVCPMIDVIDHDDFRYETQAGDAMRGAFDWEMYYKRIPIPPELQKADPSDPFESPVMAGGLFAVDRKWFWELGGYDPGLEIWGGEQYEISFKVSQLSRRPVLGTAS

SEQ ID NO: 17543 - protein, 276 aa, Homo sapiens
MLAWRDGELEAETSSSLFLLAMQVWMCGGRMEDIPCSRVGHIYRKYVPYKVPAGVSLARVRTLKRVAEVWMDEYAEYIYQRRPEYRHLSAGDVAVQKKLRSSLNCKSFKWFMTKIAWDLPKFYPPVEPPAAAWGEIRNVGTGLCADTKHGALGSPLRLEGCVRGRGEAAWNNMQVFTFTWREDIRPGDPQHTKKFCFDAISHTSPVTLYDCHSMKGNQLWKYRKDKTLYHPVSGSCMDCSESDHRIFMNTCNPSSLTQQWLFEHTNSTVLEKFNRN

SEQ ID NO: 17544 - protein, 316 aa, Homo sapiens
MTPSEGARAGTGRELEMLDSLLALGGLVLLRDSVEWEGRSLLKALVKKSALCGEQVHILGCEVSEEEFREGFDSDINNRLVYHDFFRDPLNWSKTEEAFPGGPLGALRAMCKRTDPVPVTIALDSLSWLLLRLPCTTLCQVLHAVSHQDSCPGDSSSVGKVSVLGLLHEELHGPGPVGALSSLAQTEVTLGGTMGQASAHILCRRPRQRPTDQTQWFSILPDFSLDLQEGPSVESQPYSDPHIPPVDPTTHLTFNLHLSKKEREARDSLILPFQFSSEKQQALLRPRPGQATSHIFYEPDAYDDLDQEDPDDDLDI

SEQ ID NO: 17545 - protein, 279 aa, Homo sapiens
MTPSEGARAGTGRELEMLDSLLALGGLVLLRDSVEWEGRSLLKALVKKSALCGEQVHILGCEVSEEEFREGFDSDINNRLVYHDFFRDPLNWSKTEEAFPGGPLGALRAMCKRTDPVPVTIALDSLSWLLLRLPCTTLCQVLHAVSHQDSCPGDSSSVGKVSVLGLLHEELHGPGPVGALSSLAQTEVTLGGTMGQASAHILCRRPRQRPTDQTQWFSILPDFSLDLQEGPSVESQPYSDPHIPPVSKNAKARTRKCSLVSGHGRENKSCRGWGWGQGF

SEQ ID NO: 17546 - protein, 179 aa, Homo sapiens
MTPSEGARAGTGRELEMLDSLLALGGLVLLRDSVEWEGRSLLKALVKKSALCGEQVHILGCEVSEEEFREGFDSDINNRLVYHDFFRDPLNWSKTEEAFPGGPLGALRAMCKRTDPVPVTIALDSLSWLLLRLPCTTLCQVLHAVSHQDSCPGETPPSLFPLIHLPLPRSVPLFLSTLE

SEQ ID NO: 17547 - protein, 323 aa, Homo sapiens
MTPSEGARAGTGRELEMLDSLLALGGLVLLRDSVEWEGRSLLKALVKKSALCGEQVHILGCEVSEEEFREGFDSDINNRLVYHDFFRDPLNWSKTEEAFPGGPLGALRAMCKRTDPVPVTIALDSLSWLLLRLPCTTLCQVLHAVSHQDSCPGDSSSVGKVSVLGLLHEELHGPGPVGALSSLAQTEVTLGGTMGQASAHILCRRPRQRPTDQTQWFSILPDFSLDLQEGPSVESQPYSDPHIPPVHPLYLQVDPTTHLTFNLHLSKKEREARDSLILPFQFSSEKQQALLRPRPGQATSHIFYEPDAYDDLDQEDPDDDLDI

SEQ ID NO: 17548 - protein, 357 aa, Homo sapiens
MATPAVPVSAPPATPTPVPAAAPASVPAPTPAPAAAPVPAAAPASSSDPAAAAAATAAPGQTPASAQAPAQTPAPALPGPALPGPFPGGRVVRLHPVILASIVDSYERRNEGAARVIGTLLGTVDKHSVEVTNCFSVPHNESEDEVAVDMEFAKNMYELHKKVSPNELILGWYATGHDITEHSVLIHEYYSREAPNPIHLTVDTSLQNGRMSIKAYVSTLMGVPGRTMGVMFTPLTVKYAYYDTERIGVDLIMKTCFSPNRVIGLSSDLQQVGGASARIQDALSTVLQYAEDVLSGKVSADNTVGRFLMSLVNQVPKIVPDDFETMLNSNINDLLMVTYLANLTQSQIALNEKLVNL

SEQ ID NO: 17549 - protein, 374 aa, Homo sapiens
MSVPAFIDISEEDQAAELRAYLKSKGAEISEENSEGGLHVDLAQIIEACDVCLKEDDKDVESVMNSVVSLLLILEPDKQEALIESLCEKLVKFREGERPSLRLQLLSNLFHGMDKNTPVRYTVYCSLIKVAASCGAIQYIPTELDQVRKWISDWNLTTEKKHTLLRLLYEALVDCKKSDAASKVMVELLGSYTEDNASQARVDAHRCIVRALKDPNAFLFDHLLTLKPVKFLEGELIHDLLTIFVSAKLASYVKFYQNNKDFIDSLGLLHEQNMAKMRLLTFMGMAVENKEISFDTMQQELQIGADDVEAFVIDAVRTKMVYCKIDQTQRKVVVSHSTHRTFGKQQWQQLYDTLNAWKQNLNKVKNSLLSLSDT

SEQ ID NO: 17550 - protein, 242 aa, Homo sapiens
MSVPAFIDISEEDQVRKWISDWNLTTEKKHTLLRLLYEALVDCKKSDAASKVMVELLGSYTEDNASQARVDAHRCIVRALKDPNAFLFDHLLTLKPVKFLEGELIHDLLTIFVSAKLASYVKFYQNNKDFIDSLGLLHEQNMAKMRLLTFMGMAVENKEISFDTMQQELQIGADDVEAFVIDAVRTKMVYCKIDQTQRKVVVSHSTHRTFGKQQWQQLYDTLNAWKQNLNKVKNSLLSLSDT

SEQ ID NO: 17551 - protein, 1523 aa, Homo sapiens
MTSVWKRLQRVGKRAAKFQFVACYHELVLECTKKWQPDKLVVVWTRRNRRICSKAHSWQPGIQNPYRGTVVWMVPENVDISVTLYRDPHVDQYEAKEWTFIIENESKGQRKVLATAEVDLARHAGPVPVQVPVRLRLKPKSVKVVQAELSLTLSGVLLREGRATDDDMQSLASLMSVKPSDVGNLDDFAESDEDEAHGPGAPEARARVPQPDPSRELKTLCEEEEEGQGRPQQAVASPSNAEDTSPAPVSAPAPPARTSRGQGSERANEAGGQVGPEAPRPPETSPEMRSSRQPAQDTAPTPAPRLRKGSDALRPPVPQGEDEVPKASGAPPAGLGSARETQAQACPQEGTEAHGARLGPSIEDKGSGDPFGRQRLKAEEMDTEDRPEASGVDTEPRSGGREANTKRSGVRAGEAEESSAVCQVDAEQRSKVRHVDTKGPEATGVMPEARCRGTPEAPPRGSQGRLGVRTRDEAPSGLSLPPAEPAGHSGQLGDLEGARAAAGQEREGAEVRGGAPGIEGTGLEQGPSVGAISTRPQVSSWQGALLSTAQGAISRGLGGWEAEAGGSGDLETETEVVGLEVLGTQEKEVEGSGFPETRTLEIEILGALEKEAARSRVLESEVAGTAQCEGLETQETEVGVIETPGTETEVLGTQKTEAGGSGVLQTRTTIAETEVLVTQEISGDLGPLKIEDTIQSEMLGTQETEVEASRVPESEAEGTEAKILGTQEITARDSGVREIEAEIAESDILVAQEIEVGLLGVLGIETGAAEGAILGTQEIASRDSGVPGLEADTTGIQVKEVGGSEVPEIATGTAETEILGTQEIASRSSGVPGLESEVAGAQETEVGGSGISGPEAGMAEARVLMTRKTEIIVPEAEKEEAQTSGVQEAETRVGSALKYEALRAPVTQPRVLGSQEAKAEISGVQGSETQVLRVQEAEAGVWGMSEGKSGAWGAQEAEMKVLESPENKSGTFKAQEAEAGVLGNEKGKEAEGSLTEASLPEAQVASGAGAGAPRASSPEKAEEDRRLPGSQAPPALVSSSQSLLEWCQEVTTGYRGVRITNFTTSWRNGLAFCAILHRFYPDKIDYASLDPLNIKQNNKQAFDGFAALGVSRLLEPADMVLLSVPDKLIVMTYLCQIRAFCTGQELQLVQLEGGGGAGTYRVGSAQPSPPDDLDAGGLAQRLRGHGAEGPQEPKEAADRADGAAPGVASRNAVAGRASKDGGAEAPRESRPAEVPAEGLVNGAGAPGGGGVRLRRPSVNGEPGSVPPPRAHGSFSHVRDADLLKKRRSRLRNSSSFSMDDPDAGAMGAAAAEGQAPDPSPAPGPPTAADSQQPPGGSSPSEEPPPSPGEEAGLQRFQDTSQYVCAELQALEQEQRQIDGRAAEVEMQLRSLMESGANKLQEEVLIQEWFTLVNKKNALIRRQDQLQLLMEEQDLERRFELLSRELRAMLAIEDWQKTSAQQHREQLLLEELVSLVNQRDELVRDLDHKERIALEEDERLERGLEQRRRKLSRQLSRRERCVLS

SEQ ID NO: 17552 - protein, 466 aa, Homo sapiens
MTLKASEGESGGSMHTALSDLYLEHLLQKRSRPEAVSHPLNTVTEDMYTNGSPAPGSPAQVKGQEVRKVRLIQFEKVTEEPMGITLKLNEKQSCTVARILHGGMIHRQGSLHVGDEILEINGTNVTNHSVDQLQKAMKETKGMISLKVIPNQQSRLPALQMFMRAQFDYDPKKDNLIPCKEAGLKFATGDIIQIINKDDSNWWQGRVEGSSKESAGLIPSPELQEWRVASMAQSAPSEAPSCSPFGKKKKYKDKYLAKHSSIFDQLDVVSYEEVVRLPAFKRKTLVLIGASGVGRSHIKNALLSQNPEKFVYPVPYTTRPPRKSEEDGKEYHFISTEEMTRNISANEFLEFGSYQGNMFGTKFETVHQIHKQNKIAILDIEPQTLKIVRTAELSPFIVFIAPTDQGTQTEALQQLQKDSEAIRSQYAHYFDLSLVNNGVDETLKKLQEAFDQACSSPQWVPVSWVY

SEQ ID NO: 17553 - protein, 436 aa, Homo sapiens
MESWAVSHPLNTVTEDMYTNGSPAPGSPAQVKGQEVRKVRLIQFEKVTEEPMGITLKLNEKQSCTVARILHGGMIHRQGSLHVGDEILEINGTNVTNHSVDQLQKAMKETKGMISLKVIPNQQSRLPALQMFMRAQFDYDPKKDNLIPCKEAGLKFATGDIIQIINKDDSNWWQGRVEGSSKESAGLIPSPELQEWRVASMAQSAPSEAPSCSPFGKKKKYKDKYLAKHSSIFDQLDVVSYEEVVRLPAFKRKTLVLIGASGVGRSHIKNALLSQNPEKFVYPVPYTTRPPRKSEEDGKEYHFISTEEMTRNISANEFLEFGSYQGNMFGTKFETVHQIHKQNKIAILDIEPQTLKIVRTAELSPFIVFIAPTDQGTQTEALQQLQKDSEAIRSQYAHYFDLSLVNNGVDETLKKLQEAFDQACSSPQWVPVSWVY

SEQ ID NO: 17554 - protein, 446 aa, Homo sapiens
MTLKASEGESGGSMHTALSDLYLEHLLQKRSRPEAVSHPLNTVTEDMYTNGSPAPGSPAQVKGQEVRKVRLIQFEKVTEEPMGITLKLNEKQSCTVARILHGGMIHRQGSLHVGDEILEINGTNVTNHSVDQLQKAMKETKGMISLKVIPNQQSRLPALQEAGLKFATGDIIQIINKDDSNWWQGRVEGSSKESAGLIPSPELQEWRVASMAQSAPSEAPSCSPFGKKKKYKDKYLAKHSSIFDQLDVVSYEEVVRLPAFKRKTLVLIGASGVGRSHIKNALLSQNPEKFVYPVPYTTRPPRKSEEDGKEYHFISTEEMTRNISANEFLEFGSYQGNMFGTKFETVHQIHKQNKIAILDIEPQTLKIVRTAELSPFIVFIAPTDQGTQTEALQQLQKDSEAIRSQYAHYFDLSLVNNGVDETLKKLQEAFDQACSSPQWVPVSWVY

SEQ ID NO: 17555 - protein, 541 aa, Homo sapiens
MFSWMGRQAGGRERAGGADAVQTVTGGLRSLYLRKVLPLEEAYRFHEFHSPALEDADFENKPMILLVGQYSTGKTTFIRYLLEQDFPGMRIGPEPTTDSFIAVMYGETEGSTPGNALVVDPKKPFRKLSRFGNAFLNRFMCSQLPNQVLKSISVIDSPGILSGEKQRISRGYDFCQVLQWFAERVDRIILLFDAHKLDISDEFSEAIKAFRGQDDKIRVVLNKADQVDTQQLMRVYGALMWSLGKVINTPEVLRVYIGSFWAQPLQNTDNRRLFEAEAQDLFRDIQSLPQKAAVRKLNDLIKRARLAKVHAYIISYLKKEMPSVFGKENKKRELISRLPEIYIQLQREYQISAGDFPEVKAMQEQLENYDFTKFHSLKPKLIEAVDNMLSNKISPLMNLISQEETSTPTQLVQGGAFDGTTEGPFNQGYGEGAKEGADEEEWVVAKDKPVYDELFYTLSPINGKISGVNAKKEMVTSKLPNSVLGKIWKLADCDCDGMLDEEEFALAKHLIKIKLDGYELPSSLPPHLVPPSHRKSLPKAD

SEQ ID NO: 17556 - protein, 1298 aa, Homo sapiens
MAAADAEAVPARGEPQQDCCVKTELLGEETPMAADEGSAEKQAGEAHMAADGETNGSCENSDASSHANAAKHTQDSARVNPQDGTNTLTRIAENGVSERDSEAAKQNHVTADDFVQTSVIGSNGYILNKPALQAQPLRTTSTLASSLPGHAAKTLPGGAGKGRTPSAFPQTPAAPPATLGEGSADTEDRKLPAPGADVKVHRARKTMPKSVVGLHAASKDPREVREARDHKEPKEEINKNISDFGRQQLLPPFPSLHQSLPQNQCYMATTKSQTACLPFVLAAAVSRKKKRRMGTYSLVPKKKTKVLKQRTVIEMFKSITHSTVGSKGEKDLGASSLHVNGESLEMDSDEDDSEELEEDDGHGAEQAAAFPTEDSRTSKESMSEADRAQKMDGESEEEQESVDTGEEEEGGDESDLSSESSIKKKFLKRKGKTDSPWIKPARKRRRRSRKKPSGALGSESYKSSAGSAEQTAPGDSTGYMEVSLDSLDLRVKGILSSQAEGLANGPDVLETDGLQEVPLCSCRMETPKSREITTLANNQCMATESVDHELGRCTNSVVKYELMRPSNKAPLLVLCEDHRGRMVKHQCCPGCGYFCTAGNFMECQPESSISHRFHKDCASRVNNASYCPHCGEESSKAKEVTIAKADTTSTVTPVPGQEKGSALEGRADTTTGSAAGPPLSEDDKLQGAASHVPEGFDPTGPAGLGRPTPGLSQGPGKETLESALIALDSEKPKKLRFHPKQLYFSARQGELQKVLLMLVDGIDPNFKMEHQNKRSPLHAAAEAGHVDICHMLVQAGANIDTCSEDQRTPLMEAAENNHLEAVKYLIKAGALVDPKDAEGSTCLHLAAKKGHYEVVQYLLSNGQMDVNCQDDGGWTPMIWATEYKHVDLVKLLLSKGSDINIRDNEENICLHWAAFSGCVDIAEILLAAKCDLHAVNIHGDSPLHIAARENRYDCVVLFLSRDSDVTLKNKEGETPLQCASLNSQVWSALQMSKALQDSAPDRPSPVERIVSRDIARGYERIPIPCVNAVDSEPCPSNYKYVSQNCVTSPMNIDRNITHLQYCVCIDDCSSSNCMCGQLSMRCWYDKDGRLLPEFNMAEPPLIFECNHACSCWRNCRNRVVQNGLRARLQLYRTRDMGWGVRSLQDIPPGTFVCEYVGELISDSEADVREEDSYLFDLDNKDGEVYCIDARFYGNVSRFINHHCEPNLVPVRVFMAHQDLRFPRIAFFSTRLIEAGEQLGFDYGERFWDIKGKLFSCRCGSPKCRHSSAALAQRQASAAQEAQEDGLPDTSSAAAADPL

SEQ ID NO: 17557 - protein, 66 aa, Homo sapiens
MAAADAERHLWLPMKAQQRNRQERPTWLRTVRPMGLVKTAMPAVMQMLQSTLRTAQGSTPRMAPTH

SEQ ID NO: 17558 - protein, 1184 aa, Homo sapiens
MAAADAEAVPARGEPQQDCCVKTELLGEETPMAADEGSAEKQAGEAHMAADGETNGSCENSDASSHANAAKHTQDSARVNPQDGTNTLTRIAENGVSERDSEAAKQNHVTADDFVQTSVIGSNGYILNKPALQAQPLRTTSTLASSLPGHAAKTLPGGAGKGRTPSAFPQTPAAPPATLGEGSADTEDRKLPAPGADVKVHRARKTMPKSVVGLHAASKDPREVREARDHKEPKEEINKNISDFGRQQLLPPFPSLHQSLPQNQCYMATTKSQTACLPFVLAAAVSRKKKRRMGTYSLVPKKKTKVLKQRTVIEMFKSITHSTVGSKGEKDLGASSLHVNGESLEMDSDEDDSEELEEDDGHGAEQAAAFPTEDSRTSKESMSEADRAQKMDGESEEEQESVDTGEEEEGGDESDLSSESSIKKKFLKRKGKTDSPWIKPARKRRRRSRKKPSGALGSESYKSSAGSAEQTAPGDSTGYMEVSLDSLDLRVKGILSSQAEGLANGPDVLETDGLQEVPLCSCRMETPKSREITTLANNQCMATESVDHELGRCTNSVVKYELMRPSNKAPLLVLCEDHRGRMVKHQCCPGCGYFCTAGNFMECQPESSISHRFHKDCASRVNNASYCPHCGEESSKAKEVTIAKADTTSTVTPVPGQEKGSALEGRADTTTGSAAGPPLSEDDKLQGAASHVPEGFDPTGPAGLGRPTPGLSQGPGKETLESALIALDSEKPKKLRFHPKQLYFSARQGELQKVLLMLVDGIDPNFKMEHQNKRSPLHAAAEAGHVDICHMLVQAGANIDTCSEDQRTPLMEAAENNHLEAVKYLIKAGALVDPKDAEGSTCLHLAAKKGHYEVVQYLLSNGQMDVNCQDDGGWTPMIWATEYKHVDLVKLLLSKGSDINIRDNEENICLHWAAFSGCVDIAEILLAAKCDLHAVNIHGDSPLHIAARENRYDCVVLFLSRDSDVTLKNKEGETPLQCASLNSQVWSALQMSKALQDSAPDRPSPVERIVSRDIARGYERIPIPCVNAVDSEPCPSNYKYVSQNCVTSPMNIDRNITHLQYCVCIDDCSSSNCMCGQLSMRCWYDKDGRLLPEFNMAEPPLIFECNHACSCWRNCRNRVVQNGLRARLQLYRTRDMGWGVRSLQDIPPGTFVCEYVGELISDSEADVREEDSYLFDLDNKISSA

SEQ ID NO: 17559 - protein, 808 aa, Homo sapiens
MAAADAEAVPARGEPQQDCCVKTELLGEETPMAADEGSAEKQAGEAHMAADGETNGSCENSDASSHANAAKHTQDSARVNPQDGTNTLTRIAENGVSERDSEAAKQNHVTADDFVQTSVIGSNGYILNKPALQAQPLRTTSTLASSLPGHAAKTLPGGAGKGRTPSAFPQTPAAPPATLGEGSADTEDRKLPAPGADVKVHRARKTMPKSVVGLHAASKDPREVREARDHKEPKEEINKNISDFGRQQLLPPFPSLHQSLPQNQCYMATTKSQTACLPFVLAAAVSRKKKRRMGTYSLVPKKKTKVLKQRTVIEMFKSITHSTVGSKGEKDLGASSLHVNGESLEMDSDEDDSEELEEDDGHGAEQAAAFPTEDSRTSKESMSEADRAQKMDGESEEEQESVDTGEEEEGGDESDLSSESSIKKKFLKRKGKTDSPWIKPARKRRRRSRKKPSGALGSESYKSSAGSAEQTAPGDSTGYMEVSLDSLDLRVKGILSSQAEGLANGPDVLETDGLQEVPLCSCRMETPKSREITTLANNQCMATESVDHELGRCTNSVVKYELMRPSNKAPLLVLCEDHRGRMVKHQCCPGCGYFCTAGNFMECQPESSISHRFHKDCASRVNNASYCPHCGEESSKAKEVTIAKADTTSTVTPVPGQEKGSALEGRADTTTGSAAGPPLSEDDKLQGAASHVPEGFDPTGPAGLGRPTPGLSQGPGKETLESALIALDSEKPKKLRFHPKQLYFSARQGELQKVLLMLVDGIDPNFKMEHQNKRSPLHAAAEAGHVDICHMLVQFCRLGSPRSRGCLW

SEQ ID NO: 17560 - protein, 833 aa, Homo sapiens
MNMEIGHPHEGKDDLGDKRVIMGTKFPMELGIRVGLGKEDSRCGESPVVSNKCEGRMAPPETKFPLSKGLEMGLERQNISRTVMQRGSLGVDSVSASQGTKPSLLPGRMGLENESLLAGYTHERIIQPPLGRVCGSSQAAGSRRAPLASGPEGVEELVGKPAFVMEPRQEMEKESTCVLMKPNTEIKLPVEVDIGLTQAEGPDETKNTEPQMGLVIEPPQCQFAQQHEQRKEAGNIESGVEPPDRIRPIYSGKFFDRTPCWPSAGKVIPVGYRVATCLTEKLPRLITPPEAKKYFNFRYPPAGVERVFYGRANDPQIAPYLTHGIRSKISVLANTLINPQPITTFQQKIKDKKESIYLSNRRAPLGKSHDQAPGLPKGMDTTNTTFGTAVIKEYSAKDVVNPPKSYEEVFKEGNEGHDLYVVSHNDYYAGEAKNRKYNPSSFHRCSVYGVPTPHFNDGRAMAKSLYWLHELQMKRGAKFVSKRADDFKEKFQHKLGRVLDPIAETMNVPPDCTFGACLRPEEYGVGDLIHNRLPDEYLRGKDRQRALIAAVRHHLKKVNYQKFDTLLAAFRHYDKKGDGMIDKDELQEACDQANLSLDDKLLDQLFDYCDVDNDGFINYLEFANFLNWKDKMLLKEYEERVIIKGRKPDCVNPTEANVEEPEQTLLIKPEDIVLKEAGSTEKTLRTLLRPSDKVSNYYKTTSSEINAIVGAIPSTCYPICGVPTIRSDIPAPRIRRISDRTNYGEEGSAYSLLYPTIFARKGVFERDFFKTRSKEEIAEILCNIGVKLSDEEFENVWNLASKKHHRGEVCVENIRNVLDELRHADRIKCKTLM

SEQ ID NO: 17561 - protein, 632 aa, Homo sapiens
MNMEIGHPHEGKDDLGDKRVIMGTKFPMELGIRVGLGKEDSRCGESPVVSNKCEGRMAPPETKFPLSKGLEMGLERQNISRTVMQRGSLGVDSVSASQGTKPSLLPGRMGLENESLLAGYTHERIIQPPLGRVCGSSQAAGSRRAPLASGPEGVEELVGKPAFVMEPRQEMEKESTCVLMKPNTEIKLPVEVDIGLTQAEGPDETKNTEPQMGLVIEPPQCQFAQQHEQRKEAGNIESGVEPPDRIRPIYSGKFFDRTPCWPSAGKVIPVGYRVATCLTEKLPRLITPPEAKKYFNFRYPPAGVERVFYGRANDPQIAPYLTHGIRSKISVLANTLINPQPITTFQQKIKDKKESIYLSNRRAPLGKSHDQAPGLPKGMDTTNTTFGTAVIKEYSAKDVVNPPKSYEEVFKEGNEGHDLYVVSHNDYYAGEAKNRKYNPSSFHRCSVYGVPTPHFNDGRAMAKSLYWLHELQMKRGAKFVSKRADDFKEKFQHKLGRVLDPIAETMNVPPDCTFGACLRPEEYGVGDLIHNRLPDEYLRGKDRQRALIAAVRHHLKKVNYQKFDTLLAAFRHYDKAGVQWRDLGSLQPPPPRFKRFSCLSLPSSWDYRHLPPHPNFRIFSRDGVSPCWPGWS

SEQ ID NO: 17562 - protein, 703 aa, Homo sapiens
MMAHCRIDLLGSSDPPTSASQIAETTDVSHHAGLIEFLALSNSSALASRSVEITEIKLPVEVDIGLTQAEGPDETKNTEPQMGLVIEPPQCQFAQQHEQRKEAGNIESGVEPPDRIRPIYSGKFFDRTPCWPSAGKVIPVGYRVATCLTEKLPRLITPPEAKKYFNFRYPPAGVERVFYGRANDPQIAPYLTHGIRSKISVLANTLINPQPITTFQQKIKDKKESIYLSNRRAPLGKSHDQAPGLPKGMDTTNTTFGTAVIKEYSAKDVVNPPKSYEEVFKEGNEGHDLYVVSHNDYYAGEAKNRKYNPSSFHRCSVYGVPTPHFNDGRAMAKSLYWLHELQMKRGAKFVSKRADDFKEKFQHKLGRVLDPIAETMNVPPDCTFGACLRPEEYGVGDLIHNRLPDEYLRGKDRQRALIAAVRHHLKKVNYQKFDTLLAAFRHYDKKGDGMIDKDELQEACDQANLSLDDKLLDQLFDYCDVDNDGFINYLEFANFLNWKDKMLLKEYEERVIIKGRKPDCVNPTEANVEEPEQTLLIKPEDIVLKEAGSTEKTLRTLLRPSDKVSNYYKTTSSEINAIVGAIPSTCYPICGVPTIRSDIPAPRIRRISDRTNYGEEGSAYSLLYPTIFARKGVFERDFFKTRSKEEIAEILCNIGVKLSDEEFENVWNLASKKHHRGEVCVENIRNVLDELRHADRIKCKTLM

SEQ ID NO: 17563 - protein, 214 aa, Homo sapiens
MSDLEDDETPQLSAHALAALQEFYAEQKQQIEPGEDDKYNIGIIEENWQLSQFWYSQETALQLAQEAIAAVGEGGRIACVSAPSVYQKLRELCRENFSIYIFEYDKRFAMYGEEFIFYDYNNPLDLPERIAAHSFDIVIADPPYLSEECLRKTSETVKYLTRGKILLCTGAIMEEQAAELLGVKMCTFVPRHTRNLANEFRCYVNYDSGLDCGI

SEQ ID NO: 17564 - protein, 699 aa, Homo sapiens
MNPSEMQRKAPPRRRRHRNRAPLTHKMNKMVTSEEQMKLPSTKKAEPPTWAQLKKLTQLATKYLENTKVTQTPESMLLAALMIVSMVVSLPMPAGAAAANYTYWAYVPFPPLIRAVTWMDNPIEVYVNDSVWVPGPTDDHCPAKPEEEGMMINISIGYRYPPICLGRAPGCLMPAVQNWLVEVPTVSPISRFTYHMVSGMSLRPRVNYLQDFSYQRSFKFRPKGKPCPKEIPKESKNTEVLVWEECVANSAVILQNNEFGTIIDWAPRGQFYHNCSGQTQSCPSAQVSPAVDSDLTESLDKHKHKKLQSFYPWEWGEKGISTPRPKIISPVSGPEHPELWRLTVASHHIRIWSGNQTLETRDRKPFYTVDLNSSVTVPLQSCIKPPYMLVVGNIVIKPDSQTITCENCRLLTCIDSTFNWQHRILLVRAREGVWIPVSMDRPWETSPSIHTLTEVLKGVLNRSKRFIFTLIAVIMGLIAVTATAAVAGVALHSSVQSVNFVNDWQKNSTRLWNSQSSIDQKLANQINDLRQTVIWMGDRLMSLEHRFQLQCDWNTSDFSITPQIYNESEHHWDMVRRHLQGREDNLTLDISKLKEQIFEASKAHLNLVPGTEAIAGVADGLANLNPVTWVKTIGSTTIINLILILVCLFCLLLVCRCTQQLRRDSDHRERAMMTMAVLSKRKGGNVGKSKRDQIVTVSV

SEQ ID NO: 17565 - protein, 440 aa, Homo sapiens
MGGLRLLAVALTCCWWPQGSQGKTLRGSFSSTAAQDAQGQRIGHFEFHGDHALLCVRINNIAVAVGKEAKLYLFQAQEWLKLQQSSHGYSCSEKLSKAQLTMTMNQTEHNLTVSQIPSPQTWHVFYADKYTCQDDKENSQVEDIPFEMVLLNPDAEGNPFDHFSAGESGLHEFFFLLVLVYFVIACIYAQSLWQAIKKGGPMHMILKVLTTALLLQAGSALANYIHFSSYSKDGIGVPFMGSLAEFFDIASQIQMLYLLLSLCMGWTIVRMKKSQSRPLQWDSTPASTGIAVFIVMTQSVLLLWEQFEDISHHSYHSHHNLAGILLIVLRICLALSLGCGLYQIITVERSTLKREFYITFAKGCILWFLCHPVLACISVIFSDYQRDKVITIGVILCQSVSMVILYRLFLSHSLYWEVSSLSSVTLPLTISSGHKSRPHF

SEQ ID NO: 17566 - protein, 588 aa, Homo sapiens
MVTPVTWMDNPIEVYVNDSEWVPGPTDDRCPAKPEEEGMMINISIGYRYPPICLGTAPGCLMPAVQNWLVEVPIVSPISRFTYHMVSGMSLRPRVNYLQDFPYQRSLKFRPKGKPCPKEIPKESKNTEVLVWEECVANSAVILQNNEFGTIIDWAPRGQFYHNCSGQTQSCPSAQVSPAVDSDLTESLDKHKHKKLQSFYPWEWGEKGISTPRPKIISPVSGPEHPELWRLTVASHHIRIWSGNQTLETRDRKPFYTVDLNSSLTLPLQSCVKPPYMLVVGNIVIKPDSQTITCENCRLLTCIDSTFNWQHRILLVRAREGVWILVSMDRPWEASPSVHILTEVLKGVLNRSKRFIFTLIAVIMGLIAVTATGAVAGVALHSSVQSVNFVNDWQKNSTRLWNSQSSIDQKLANQINDLRQTVIWMGDRLMSLEHRFQLQCDWNTSDFCITPQIYNESEHHWDMVRHHLQGREDNLTLDISKLKEQIFEASKAHLNLVPGTEAIAGVADGLANLNPVTWVKTIGSTTIINLILILVCLFCLLLVCRCTQQLRRDSDHRERAMMTMAVLSKRKGGNVGKSKRDQIVTVSV

SEQ ID NO: 17567 - protein, 291 aa, Homo sapiens
MSSGADGGGGAAVAARSDKGSPGEDGFVPSALGTREHWDAVYERELQTFREYGDTGEIWFGEESMNRLIRWMQKHKIPLDASVLDIGTGNGVFLVELAKFGFSNITGIDYSPSAIQLSGSIIEKEGLSNIKLKVEDFLNLSTQLSGFHICIDKGTFDAISLNPDNAIEKRKQYVKSLSRVLKVKGFFLITSCNWTKEELLNEFSEGWSTVAGFWLTAALTSWAQAIFSTSASRVGGTTGTHHHAWIIFVFLAETRFCHVVQAGLELLGSSDSPTWPPKVLGLYHARPSLAF

SEQ ID NO: 17568 - protein, 993 aa, Homo sapiens
MAAEWASRFWLWATLLIPAAAVYEDQVGKFDWRQQYVGKVKFASLEFSPGSKKLVVATEKNVIAALNSRTGEILWRHVDKGTAEGAVDAMLLHGQDVITVSNGGRIMRSWETNIGGLNWEITLDSGSFQALGLVGLQESVRYIAVLKKTTLALHHLSSGHLKWVEHLPESDSIHYQMVYSYGSGVVWALGVVPFSHVNIVKFNVEDGEIVQQVRVSTPWLQHLSGACGVVDEAVLVCPDPSSRSLQTLALETEWELRQIPLQSLDLEFGSGFQPRVLPTQPNPVDASRAQFFLHLSPSHYALLQYHYGTLSLLKNFPQTALVSFATTGEKTVAAVMACRNEVQKSSSSEDGSMGSFSEKSSSKDSLACFNQTYTINLYLVETGRRLLDTTITFSLEQSGTRPERLYIQVFLKKDDSVGYRALVQTEDHLLLFLQQLAGKVVLWSREESLAEVVCLEMVDLPLTGAQAELEGEFGKKADGLLGMFLKRLSSQLILLQAWTSHLWKMFYDARKPRSQIKNEINIDTLARDEFNLQKMMVMVTASGKLFGIESSSGTILWKQYLPNVKPDSSFKLMVQRTTAHFPHPPQCTLLVKDKESGMSSLYVFNPIFGKWSQVAPPVLKRPILQSLLLPVMDQDYAKVLLLIDDEYKVTAFPATRNVLRQLHELAPSIFFYLVDAEQGRLCGYRLRKDLTTELSWELTIPPEVQRIVKVKGKRSSEHVHSQGRVMGDRSVLYKSLNPNLLAVVTESTDAHHERTFIGIFLIDGVTGRIIHSSVQKKAKGPVHIVHSENWVVYQYWNTKARRNEFTVLELYEGTEQYNATAFSSLDRPQLPQVLQQSYIFPSSISAMEATITERGITSRHLLIGLPSGAILSLPKALLDPRRPEIPTEQSREENLIPYSPDVQIHAERFINYNQTVSRMRGIYTAPSGLESTCLVVAYGLDIYQTRVYPSKQFDVLKDDYDYVLISSVLFGLVFATMITKRLAQVKLLNRAWR

SEQ ID NO: 17569 - protein, 992 aa, Homo sapiens
MAAEWASRFWLWATLLIPAAAVYEDQVGKFDWRQQYVGKVKFASLEFSPGSKKLVVATEKNVIAALNSRTGEILWRHVDKGTAEGAVDAMLLHGQDVITVSNGGRIMRSWETNIGGLNWEITLDSGSFQALGLVGLQESVRYIAVLKKTTLALHHLSSGHLKWVEHLPESDSIHYQMVYSYGSGVVWALGVVPFSHVNIVKFNVEDGEIVQQVRVSTPWLQHLSGACGVVDEAVLVCPDPSSRSLQTLALETEWELRQIPLQSLDLEFGSGFQPRVLPTQPNPVDASRAQFFLHLSPSHYALLQYHYGTLSLLKNFPQTALVSFATTGEKTVAAVMACRNEVKSSSSEDGSMGSFSEKSSSKDSLACFNQTYTINLYLVETGRRLLDTTITFSLEQSGTRPERLYIQVFLKKDDSVGYRALVQTEDHLLLFLQQLAGKVVLWSREESLAEVVCLEMVDLPLTGAQAELEGEFGKKADGLLGMFLKRLSSQLILLQAWTSHLWKMFYDARKPRSQIKNEINIDTLARDEFNLQKMMVMVTASGKLFGIESSSGTILWKQYLPNVKPDSSFKLMVQRTTAHFPHPPQCTLLVKDKESGMSSLYVFNPIFGKWSQVAPPVLKRPILQSLLLPVMDQDYAKVLLLIDDEYKVTAFPATRNVLRQLHELAPSIFFYLVDAEQGRLCGYRLRKDLTTELSWELTIPPEVQRIVKVKGKRSSEHVHSQGRVMGDRSVLYKSLNPNLLAVVTESTDAHHERTFIGIFLIDGVTGRIIHSSVQKKAKGPVHIVHSENWVVYQYWNTKARRNEFTVLELYEGTEQYNATAFSSLDRPQLPQVLQQSYIFPSSISAMEATITERGITSRHLLIGLPSGAILSLPKALLDPRRPEIPTEQSREENLIPYSPDVQIHAERFINYNQTVSRMRGIYTAPSGLESTCLVVAYGLDIYQTRVYPSKQFDVLKDDYDYVLISSVLFGLVFATMITKRLAQVKLLNRAWR

SEQ ID NO: 17570 - protein, 992 aa, Homo sapiens
MAAEWASRFWLWATLLIPAAAVYEDQVGKFDWRQQYVGKVKFASLEFSPGSKKLVVATEKNVIAALNSRTGEILWRHVDKGTAEGAVDAMLLHGQDVITVSNGGRIMRSWETNIGGLNWEITLDSGSFQALGLVGLQESVRYIAVLKKTTLALHHLSSGHLKWVEHLPESDSIHYQMVYSYGSGVVWALGVVPFSHVNIVKFNVEDGEIVQQVRVSTPWLQHLSGACGVVDEAVLVCPDPSSRSLQTLALETEWELRQIPLQSLDLEFGSGFQPRVLPTQPNPVDASRAQFFLHLSPSHYALLQYHYGTLSLLKNFPQTALVSFATTGEKTVAAVMACRNEVQKSSSSEDGSMGSFSEKSSSKDSLACFNQTYTINLYLVETGRRLLDTTITFSLEQSGTRPERLYIQVFLKKDDSVGYRALVQTEDHLLLFLQQLGKVVLWSREESLAEVVCLEMVDLPLTGAQAELEGEFGKKADGLLGMFLKRLSSQLILLQAWTSHLWKMFYDARKPRSQIKNEINIDTLARDEFNLQKMMVMVTASGKLFGIESSSGTILWKQYLPNVKPDSSFKLMVQRTTAHFPHPPQCTLLVKDKESGMSSLYVFNPIFGKWSQVAPPVLKRPILQSLLLPVMDQDYAKVLLLIDDEYKVTAFPATRNVLRQLHELAPSIFFYLVDAEQGRLCGYRLRKDLTTELSWELTIPPEVQRIVKVKGKRSSEHVHSQGRVMGDRSVLYKSLNPNLLAVVTESTDAHHERTFIGIFLIDGVTGRIIHSSVQKKAKGPVHIVHSENWVVYQYWNTKARRNEFTVLELYEGTEQYNATAFSSLDRPQLPQVLQQSYIFPSSISAMEATITERGITSRHLLIGLPSGAILSLPKALLDPRRPEIPTEQSREENLIPYSPDVQIHAERFINYNQTVSRMRGIYTAPSGLESTCLVVAYGLDIYQTRVYPSKQFDVLKDDYDYVLISSVLFGLVFATMITKRLAQVKLLNRAWR

SEQ ID NO: 17571 - protein, 971 aa, Homo sapiens
MAAEWASRFWLWATLLIPAAAVYEDQVGKFDWRQQYVGKVKFASLEFSPGSKKLVVATEKNVIAALNSRTGEIYVITVSNGGRIMRSWETNIGGLNWEITLDSGSFQALGLVGLQESVRYIAVLKKTTLALHHLSSGHLKWVEHLPESDSIHYQMVYSYGSGVVWALGVVPFSHVNIVKFNVEDGEIVQQVRVSTPWLQHLSGACGVVDEAVLVCPDPSSRSLQTLALETEWELRQIPLQSLDLEFGSGFQPRVLPTQPNPVDASRAQFFLHLSPSHYALLQYHYGTLSLLKNFPQTALVSFATTGEKTVAAVMACRNEVQKSSSSEDGSMGSFSEKSSSKDSLACFNQTYTINLYLVETGRRLLDTTITFSLEQSGTRPERLYIQVFLKKDDSVGYRALVQTEDHLLLFLQQLAGKVVLWSREESLAEVVCLEMVDLPLTGAQAELEGEFGKKADGLLGMFLKRLSSQLILLQAWTSHLWKMFYDARKPRSQIKNEINIDTLARDEFNLQKMMVMVTASGKLFGIESSSGTILWKQYLPNVKPDSSFKLMVQRTTAHFPHPPQCTLLVKDKESGMSSLYVFNPIFGKWSQVAPPVLKRPILQSLLLPVMDQDYAKVLLLIDDEYKVTAFPATRNVLRQLHELAPSIFFYLVDAEQGRLCGYRLRKDLTTELSWELTIPPEVQRIVKVKGKRSSEHVHSQGRVMGDRSVLYKSLNPNLLAVVTESTDAHHERTFIGIFLIDGVTGRIIHSSVQKKAKGPVHIVHSENWVVYQYWNTKARRNEFTVLELYEGTEQYNATAFSSLDRPQLPQVLQQSYIFPSSISAMEATITERGITSRHLLIGLPSGAILSLPKALLDPRRPEIPTEQSREENLIPYSPDVQIHAERFINYNQTVSRMRGIYTAPSGLESTCLVVAYGLDIYQTRVYPSKQFDVLKDDYDYVLISSVLFGLVFATMITKRLAQVKLLNRAWR

SEQ ID NO: 17572 - protein, 346 aa, Homo sapiens
MCEGPSRISGPIPPDPTLCPDNYRRPTSAQGRLEGNALKLDLLTSDRALDTTAPRGPCIGPGAGEILERGQRGVGDVLLQLEGISLGPGASLKRKDPKDHEKENLRRIREIQKRFREQERSREQGQPRPLKALWRSPKYDKVESRVKAQLQEPGPASGTESAHFLRAHSRCGPGLPPPHVSSPQPTPPGPEAKEPGLGVDFIRHNARAAKRAPRRHSCSLQVLAQVLEQQRQAQEHYNATQKGHVPHYLLERRDLWRREAEARKQSQPDPAMPPGHTRMPENQRLETLTKLLQSQSQLLRELVLLPAGADSLRAQSHRAELDRKLVQVEEAIKIFSRPKVFVKMDD

SEQ ID NO: 17573 - protein, 228 aa, Homo sapiens
MDAKVRRAKMARVLQLEPQTSACLLSLLCPALQEPGPASGTESAHFLRAHSRCGPGLPPPHVSSPQPTPPGPEAKEPGLGVDFIRHNARAAKRAPRRHSCSLQVLAQVLEQQRQAQEHYNATQKGHVPHYLLERRDLWRREAEARKQSQPDPAMPPGHTRMPENQRLETLTKLLQSQSQLLRELVLLPAGADSLRAQSHRAELDRKLVQVEEAIKIFSRPKVFVKMDD

SEQ ID NO: 17574 - protein, 354 aa, Homo sapiens
MGSGASAEDKELAKRSKELEKKLQEDADKEAKTVKLLLLGAGESGKSTIVKQMKIIHQDGYSPEECLEFKAIIYGNVLQSILAIIRAMTTLGIDYAEPSCADDGRQLNNLADSIEEGTMPPELVEVIRRLWKDGGVQACFERAAEYQLNDSASYYLNQLERITDPEYLPSEQDVLRSRVKTTGIIETKFSVKDLNFRMFDVGGQRSERKKWIHCFEGVTCIIFCAALSAYDMVLVEDDEVNRMHESLHLFNSICNHKFFAATSIVLFLNKKDLFEEKIKKVHLSICFPEYDGNNSYDDAGNYIKSQFLDLNMRKDVKEIYSHMTCATDTQNVKFVFDAVTDIIIKENLKDCGLF

SEQ ID NO: 17575 - protein, 285 aa, Homo sapiens
MTTLTHRARRTEISKNSEKKMESEEDSNWEKSPDNEDSGDSKDIRLTLMEEVLLLGLKDKEGYTSFWNDCISSGLRGGILIELAMRGRIYLEPPTMRKKRLLDRKVLLKSDSPTGDVLLDETLKHIKATEPTETVQTWIELLTGETWNPFKLQYQLRNVRERIAKNLVEKGILTTEKQNFLLFDMTTHPVTNTTEKQRLVKKLQDSVLERWVNDPQRMDKRTLALLVLAHSSDVLENVFSSLTDDKYDVAMNRAKDLVELDPEVEGTKPSATEMIWAVLAAFNKS

SEQ ID NO: 17576 - protein, 241 aa, Homo sapiens
MTTLTHRARRTEISKNSEKKMESEEDSNWEKSPDNEDSGDSKDIRLTLMEEVLLLGLKDKEVLLKSDSPTGDVLLDETLKHIKATEPTETVQTWIELLTGETWNPFKLQYQLRNVRERIAKNLVEKGILTTEKQNFLLFDMTTHPVTNTTEKQRLVKKLQDSVLERWVNDPQRMDKRTLALLVLAHSSDVLENVFSSLTDDKYDVAMNRAKDLVELDPEVEGTKPSATEMIWAVLAAFNKS

SEQ ID NO: 17577 - protein, 340 aa, Homo sapiens
MGPPHSGPGGVRVGALLLLGVLGLVSGLSLEPVYWNSANKRFQAEGGYVLYPQIGDRLDLLCPRARPPGPHSSPNYEFYKLYLVGGAQGRRCEAPPAPNLLLTCDRPDLDLRFTIKFQEYSPNLWGHEFRSHHDYYIIATSDGTREGLESLQGGVCLTRGMKVLLRVGQSPRGGAVPRKPVSEMPMERDRGAAHSLEPGKENLPGDPTSNATSRGAEGPLPPPSMPAVAGAAGGLALLLLGVAGAGGAMCWRRRRAKPSESRHPGPGSFGRGGSLGLGGGGGMGPREAEPGELGIALRGGGAADPPFCPHYEKVSGDYGHPVYIVQDGPPQSPPNIYYKV

SEQ ID NO: 17578 - protein, 438 aa, Homo sapiens
MAVSEIKPKLKLNPLTKVPISHNKRDRDLPGSLQCQLQHKEKKLSASQMAAFQDAYNFFYKDKTGCIDFHGLMCTVAKLGMNLTKHDVYNELKCADIDRDGKVNFSDFIKVLTDKNLFLKAVVPEKETCLDLAGNPGILLFEILSRLLETSALPRKSIIEIVSYFQRKFQHTGPGMLWSPYTMGYGKRTLKPDICTPPSSSMAAFANAARIAIMKEKDLFKFLEELKRCNSGSDSPYSKIPIFPLFPNVDGVVMGKPFKDMQKLEMLRIKEPLHFFEDYFFHKRDWKTQAANIKSMDPASGYSNNIFTIDQMLKKKQTCTVADATAIKQHVKRATDTYNLGIALEHRKEMLNLWQKIRGDLIGMDSRNESFYDTFSTYTWSWNVCQELLSPKDLRLYDAYVNRNSSHNSRSSSSSDTSECYTDSGRKRKRKGLKGFQQ

SEQ ID NO: 17579 - protein, 490 aa, Homo sapiens
MKELMPHLTFNGNGKINVNSIMEGLKKFKPKGMVTLHKLKTANDIKDRVTGHMAVSEIKPKLKLNPLTKVPISHNKRDRDLPGSLQCQLQHKEKKLSASQMAAFQDAYNFFYKDKTGCIDFHGLMCTVAKLGMNLTKHDVYNELKCADIDRDGKVNFSDFIKVLTDKNLFLKAVVPEKETCLDLAGNPGILLFEILSRLLETSALPRKSIIEIVSYFQRKFQHTGPGMLWSPYTMGYGKRTLKPDICTPPSSSMAAFANAARIAIMKEKDLFKFLEELKRCNSGSDSPYSKIPIFPLFPNVDGVVMGKPFKDMQKLEMLRIKEPLHFFEDYFFHKRDWKTQAANIKSMDPASGYSNNIFTIDQMLKKKQTCTVADATAIKQHVKRATDTYNLGIALEHRKEMLNLWQKIRGDLIGMDSRNESFYDTFSTYTWSWNVCQELLSPKDLRLYDAYVNRNSSHNSRSSSSSDTSECYTDSGRKRKRKGLKGFQQ

SEQ ID NO: 17580 - protein, 572 aa, Homo sapiens
MDDDYEAYHSLFLSLLGLCPSKTPINENAPVFDPEPVIAHCFKQFQQKDFRLPQTRRRIIMVPRKEDQTPLNPASQPQAPPKPIPSFKVLEARDIQEQPEDRKTWLSQRSKLRQELESFGDVKRWLENKPSITPSEAKVLHMIHEEQSAQPNASQATTRTTRKKAPRLSRLSRQMVPQLQLPEPPALSVMYSYLHSRKIKILEIFHKVGQGENQRITREEFIAAVKAVGVPLKNQEVEDIVIYLSSLGKHNTITMDILANTYKQWSMAQQRSSLATAREHYILAKHRDSLKGPLKKQEVDSAPQLPKVDLLTVPAVDTQMETRPMTLEEMEEVGKRYRERQRQHKLTIPSIQYTEQCHLVRCGNRHFDEHCLPSTIHGDMRELIDSARRHNFLVYLQCWKLCKSYGLPLTEDILMKALLYPGDKIIFQMDKVCPIRQPGGYYSDWKVFSPNLALLRSQGPGKSKRTDKKTPKKSKKMRFKEFEEFTRKLKVKRSSGLQQTHPNSFWPGHLLDKLQLYLPTVATDRSLALFSCVQHQPHVYPATYHPDHWWPLRNKNYMTHAHYDAAKVYYIN

SEQ ID NO: 17581 - protein, 863 aa, Homo sapiens
MARRSSFQSCQIISLFTFAVGVNICLGFTAHRIKRAEGWEEGPPTVLSDSPWTNISGSCKGRCFELQEAGPPDCRCDNLCKSYTSCCHDFDELCLKTARGWECTKDRCGEVRNEENACHCSEDCLARGDCCTNYQVVCKGESHWVDDDCEEIKAAECPAGFVRPPLIIFSVDGFRASYMKKGSKVMPNIEKLRSCGTHSPYMRPVYPTKTFPNLYTLATGLYPESHGIVGNSMYDPVFDATFHLRGREKFNHRWWGGQPLWITATKQGVKAGTFFWSVVIPHERRILTILQWLTLPDHERPSVYAFYSEQPDFSGHKYGPFGPEMTNPLREIDKIVGQLMDGLKQLKLHRCVNVIFVGDHGMEDVTCDRTEFLSNYLTNVDDITLVPGTLGRIRSKFSNNAKYDPKAIIANLTCKKPDQHFKPYLKQHLPKRLHYANNRRIEDIHLLVERRWHVARKPLDVYKKPSGKCFFQGDHGFDNKVNSMQTVFVGYGSTFKYKTKVPPFENIELYNVMCDLLGLKPAPNNGTHGSLNHLLRTNTFRPTMPEEVTRPNYPGIMYLQSDFDLGCTCDDKVEPKNKLDELNKRLHTKGSTEERHLLYGRPAVLYRTRYDILYHTDFESGYSEIFLMPLWTSYTVSKQAEVSSVPDHLTSCVRPDVRVSPSFSQNCLAYKNDKQMSYGFLFPPYLSSSPEAKYDAFLVTNMVPMYPAFKRVWNYFQRVLVKKYASERNGVNVISGPIFDYDYDGLHDTEDKIKQYVEGSSIPVPTHYYSIITSCLDFTQPADKCDGPLSVSSFILPHRPDNEESCNSSEDESKWVEELMKMHTARVRDIEHLTSLDFFRKTSRSYPEILTLKTYLHTYESEI

SEQ ID NO: 17582 - protein, 915 aa, Homo sapiens
MARRSSFQSCQIISLFTFAVGVNICLGFTAHRIKRAEGWEEGPPTVLSDSPWTNISGSCKGRCFELQEAGPPDCRCDNLCKSYTSCCHDFDELCLKTARGWECTKDRCGEVRNEENACHCSEDCLARGDCCTNYQVVCKGESHWVDDDCEEIKAAECPAGFVRPPLIIFSVDGFRASYMKKGSKVMPNIEKLRSCGTHSPYMRPVYPTKTFPNLYTLATGLYPESHGIVGNSMYDPVFDATFHLRGREKFNHRWWGGQPLWITATKQGVKAGTFFWSVVIPHERRILTILQWLTLPDHERPSVYAFYSEQPDFSGHKYGPFGPEESSYGSPFTPAKRPKRKVAPKRRQERPVAPPKKRRRKIHRMDHYAAETRQDKMTNPLREIDKIVGQLMDGLKQLKLHRCVNVIFVGDHGMEDVTCDRTEFLSNYLTNVDDITLVPGTLGRIRSKFSNNAKYDPKAIIANLTCKKPDQHFKPYLKQHLPKRLHYANNRRIEDIHLLVERRWHVARKPLDVYKKPSGKCFFQGDHGFDNKVNSMQTVFVGYGSTFKYKTKVPPFENIELYNVMCDLLGLKPAPNNGTHGSLNHLLRTNTFRPTMPEEVTRPNYPGIMYLQSDFDLGCTCDDKVEPKNKLDELNKRLHTKGSTEERHLLYGRPAVLYRTRYDILYHTDFESGYSEIFLMPLWTSYTVSKQAEVSSVPDHLTSCVRPDVRVSPSFSQNCLAYKNDKQMSYGFLFPPYLSSSPEAKYDAFLVTNMVPMYPAFKRVWNYFQRVLVKKYASERNGVNVISGPIFDYDYDGLHDTEDKIKQYVEGSSIPVPTHYYSIITSCLDFTQPADKCDGPLSVSSFILPHRPDNEESCNSSEDESKWVEELMKMHTARVRDIEHLTSLDFFRKTSRSYPEILTLKTYLHTYESEI

SEQ ID NO: 17583 - protein, 888 aa, Homo sapiens
MARRSSFQSCQIISLFTFAVGVNICLGFTAHRIKRAEGWEEGPPTVLSDSPWTNISGSCKGRCFELQEAGPPDCRCDNLCKSYTSCCHDFDELCLKTARGWECTKDRCGEVRNEENACHCSEDCLARGDCCTNYQVVCKGESHWVDDDCEEIKAAECPAGFVRPPLIIFSVDGFRASYMKKGSKVMPNIEKLRSCGTHSPYMRPVYPTKTFPNLYTLATGLYPESHGIVGNSMYDPVFDATFHLRGREKFNHRWWGGQPLWITATKQGVKAGTFFWSVVIPHERRILTILQWLTLPDHERPSVYAFYSEQPDFSGHKYGPFGPEMTNPLREIDKIVGQLMDGLKQLKLHRCVNVIFVGDHGMEDVTCDRTEFLSNYLTNVDDITLVPGTLGRIRSKFSNNAKYDPKAIIANLTCKKPDQHFKPYLKQHLPKRLHYANNRRIEDIHLLVERRWHVARKPLDVYKKPSGKCFFQGDHGFDNKVNSMQTVFVGYGSTFKYKTKVPPFENIELYNVMCDLLGLKPAPNNGTHGSLNHLLRTNTFRPTMPEEVTRPNYPGIMYLQSDFDLGCTCDDKVEPKNKLDELNKRLHTKGSTEAETRKFRGSRNENKENINGNFEPRKERHLLYGRPAVLYRTRYDILYHTDFESGYSEIFLMPLWTSYTVSKQAEVSSVPDHLTSCVRPDVRVSPSFSQNCLAYKNDKQMSYGFLFPPYLSSSPEAKYDAFLVTNMVPMYPAFKRVWNYFQRVLVKKYASERNGVNVISGPIFDYDYDGLHDTEDKIKQYVEGSSIPVPTHYYSIITSCLDFTQPADKCDGPLSVSSFILPHRPDNEESCNSSEDESKWVEELMKMHTARVRDIEHLTSLDFFRKTSRSYPEILTLKTYLHTYESEI

SEQ ID NO: 17584 - protein, 500 aa, Homo sapiens
MGTARWLALGSLFALAGLLEGRLVGEEEAGFGECDKFFYAGTPPAGLAADSHVKICQRAEGAERFATLYSTRDRIPVYSAFRAPRPAPGGAEQRWLVEPQIDDPNSNLEEAINEAEAITSVNSLGSKQALNTDYLDSDYQRGQLYPFSLSSDVQVATFTLTNSAPMTQSFQERWYVNLHSLMDRALTPQCGSGEDLYILTGTVPSDYRVKDKVAVPEFVWLAACCAVPGGGWAMGFVKHTRDSDIIEDVMVKDLQKLLPFNPQLFQNNCGETEQDTEKMKKILEVVNQIQDEERMVQSQKSSSPLSSTRSKRSTLLPPEASEGSSSFLGKLMGFIATPFIKLFQLIYYLVVAILKNIVYFLWCVTKQVINGIESCLYRLGSATISYFMAIGEELVSIPWKVLKVVAKVIRALLRILCCLLKAICRVLSIPVRVLVDVATFPVYTMGAIPIVCKDIALGLGGTVSLLFDTAFGTLGGLFQVVFSVCKRIGYKVTFDNSGEL

SEQ ID NO: 17585 - protein, 932 aa, Homo sapiens
MSEAGGRGCGSPVPQRARWRLVAATAAFCLVSATSVWTAGAEPMSREEKQKLGNQVLEMFDHAYGNYMEHAYPADELMPLTCRGRVRGQEPSRGDVDDALGKFSLTLIDSLDTLVVLNKTKEFEDAVRKVLRDVNLDNDVVVSVFETNIRVLGGLLGGHSLAIMLKEKGEYMQWYNDELLQMAKQLGYKLLPAFNTTSGLPYPRINLKFGIRKPEARTGTETDTCTACAGTLILEFAALSRFTGATIFEEYARKALDFLWEKRQRSSNLVGVTINIHTGDWVRKDSGVGAGIDSYYEYLLKAYVLLGDDSFLERFNTHYDAIMRYISQPPLLLDVHIHKPMLNARTWMDALLAFFPGLQVLKGDIRPAIETHEMLYQVIKKHNFLPEAFTTDFRVHWAQHPLRPEFAESTYFLYKATGDPYYLEVGKTLIENLNKYARVPCGFAAMKDVRTGSHEDRMDSFFLAEMFKYLYLLFADKEDIIFDIEDYIFTTEAHLLPLWLSTTNQSISKKNTTSEYTELDDSNFDWTCPNTQILFPNDPLYAQSIREPLKNVVDKSCPRGIIRVEESFRSGAKPPLRARDFMATNPEHLEILKKMGVSLIHLKDGRVQLVQHAIQAASSIDAEDGLRFMQEMIELSSQQQKEQQLPPRAVQIVSHPFFGRVVLTAGPAQFGLDLSKHKETRGFVASSKPSNGCSELTNPEAVMGKIALIQRGQCMFAEKARNIQNAGAIGGIVIDDNEGSSSDTAPLFQMAGDGKDTDDIKIPMLFLFSKEGSIILDAIREYEEVEVLLSDKAKDRDPEMENEEQPSSENDSQNQSGEQISSSSQEVDLVDQESSEENSLNSHPESLSLADMDNAASISPSEQTSNPTENHETTNLNGECTDLDNQLQEQSETEEDSNPNVSWGKKVQPIDSILADWNEDIEAFEMMEKDEL

SEQ ID NO: 17586 - protein, 905 aa, Homo sapiens
MSREEKQKLGNQVLEMFDHAYGNYMEHAYPADELMPLTCRGRVRGQEPSRGDVDDALGKFSLTLIDSLDTLVVLNKTKEFEDAVRKVLRDVNLDNDVVVSVFETNIRVLGGLLGGHSLAIMLKEKGEYMQWYNDELLQMAKQLGYKLLPAFNTTSGLPYPRINLKFGIRKPEARTGTETDTCTACAGTLILEFAALSRFTGATIFEEYARKALDFLWEKRQRSSNLVGVTINIHTGDWVRKDSGVGAGIDSYYEYLLKAYVLLGDDSFLERFNTHYDAIMRYISQPPLLLDVHIHKPMLNARTWMDALLAFFPGLQVLKGDIRPAIETHEMLYQVIKKHNFLPEAFTTDFRVHWAQHPLRPEFAESTYFLYKATGDPYYLEVGKTLIENLNKYARVPCGFAAMKDVRTGSHEDRMDSFFLAEMFKYLYLLFADKEDIIFDIEDYIFTTEAHLLPLWLSTTNQSISKKNTTSEYTELDDSNFDWTCPNTQILFPNDPLYAQSIREPLKNVVDKSCPRGIIRVEESFRSGAKPPLRARDFMATNPEHLEILKKMGVSLIHLKDGRVQLVQHAIQAASSIDAEDGLRFMQEMIELSSQQQKEQQLPPRAVQIVSHPFFGRVVLTAGPAQFGLDLSKHKETRGFVASSKPSNGCSELTNPEAVMGKIALIQRGQCMFAEKARNIQNAGAIGGIVIDDNEGSSSDTAPLFQMAGDGKDTDDIKIPMLFLFSKEGSIILDAIREYEEVEVLLSDKAKDRAAILKGKMIPSYIINSNPEMENEEQPSSENDSQNQSGEQISSSSQEVDLVDQESSEENSLNSHPESLSLADMDNAASISPSEQTSNPTENHETTNLNGECTDLDNQLQEQSETEEDSNPNVSWGKKVQPIDSILADWNEDIEAFEMMEKDEL

SEQ ID NO: 17587 - protein, 177 aa, Homo sapiens
MPAWGALFLLWATAEATKDCPSPCTCRALETMGLWVDCRGHGLTALPALPARTRHLLLANNSLQSVPPGAFDHLPQLQTLDVTQNPWHCDCSLTYLRLWLEDRTPEALLQVRCASPSLAAHGPLGRLTGYQLGSCGWQLQASWVRPGVLWDVALVAVAALGLALLAGLLCATTEALD

SEQ ID NO: 17588 - protein, 284 aa, Homo sapiens
MPRYAQLVMGPAGSGKSTYCATMVQHCEALNRSVQVVNLDPAAEHFNYSVMADIRELIEVDDVMEDDSLRFGPNGGLVFCMEYFANNFDWLENCLGHVEDDYILFDCPGQIELYTHLPVMKQLVQQLEQWEFRVCGVFLVDSQFMVESFKFISGILAALSAMISLEIPQVNIMTKMDLLSKKAKKEIEKFLDPDMYSLLEDSTSDLRSKKFKKLTKAICGLIDDYSMVRFLPYDQSDEESMNIVLQHIDFAIQYGEDLEFKEPKEREDESSSMFDEYFQECQDE

SEQ ID NO: 17589 - protein, 294 aa, Homo sapiens
MPRYAQLVMGPAGSGKVRICGDKERKSTYCATMVQHCEALNRSVQVVNLDPAAEHFNYSVMADIRELIEVDDVMEDDSLRFGPNGGLVFCMEYFANNFDWLENCLGHVEDDYILFDCPGQIELYTHLPVMKQLVQQLEQWEFRVCGVFLVDSQFMVESFKFISGILAALSAMISLEIPQVNIMTKMDLLSKKAKKEIEKFLDPDMYSLLEDSTSDLRSKKFKKLTKAICGLIDDYSMVRFLPYDQSDEESMNIVLQHIDFAIQYGEDLEFKEPKEREDESSSMFDEYFQECQDE

SEQ ID NO: 17590 - protein, 323 aa, Homo sapiens
MLPKTRGAFHFSIPDPQHICKSRGSPYRSNVCTQTTDRSTWRKDAELYLLSVITQSTYCATMVQHCEALNRSVQVVNLDPAAEHFNYSVMADIRELIEVDDVMEDDSLRFGPNGGLVFCMEYFANNFDWLENCLGHVEDDYILFDCPGQIELYTHLPVMKQLVQQLEQWEFRVCGVFLVDSQFMVESFKFISGILAALSAMISLEIPQVNIMTKMDLLSKKAKKEIEKFLDPDMYSLLEDSTSDLRSKKFKKLTKAICGLIDDYSMVRFLPYDQSDEESMNIVLQHIDFAIQYGEDLEFKEPKEREDESSSMFDEYFQECQDE

SEQ ID NO: 17591 - protein, 395 aa, Homo sapiens
MAVTDSLSRAATVLATVLLLSFGSVAASHIEDQAEQFFRSGHTNNWAVLVCTSRFWFNYRHVANTLSVYRSVKRLGIPDSHIVLMLADDMACNPRNPKPATVFSHKNMELNVYGDDVEVDYRSYEVTVENFLRVLTGRIPPSTPRSKRLLSDDRSNILIYMTGHGGNGFLKFQDSEEITNIELADAFEQMWQKRRYNELLFIIDTCQGASMYERFYSPNIMALASSQVGEDSLSHQPDPAIGVHLMDRYTFYVLEFLEEINPASQTNMNDLFQVCPKSLCVSTPGHRTDLFQRDPKNVLITDFFGSVRKVEITTETIKLQQDSEIMESSYKEDQMDEKLMEPLKYAEQLPVAQIIHQKPKLKDWHPPGGFILGLWALIIMVFFKTYGIKHMKFIF

SEQ ID NO: 17592 - protein, 319 aa, Homo sapiens
MAVTDSLSRAATVLATVLLLSFGSVAASHIEDQAEQFFRSGHTNNWAVLVTVENFLRVLTGRIPPSTPRSKRLLSDDRSNILIYMTGHGGNGFLKFQDSEEITNIELADAFEQMWQKRRYNELLFIIDTCQGASMYERFYSPNIMALASSQVGEDSLSHQPDPAIGVHLMDRYTFYVLEFLEEINPASQTNMNDLFQVCPKSLCVSTPGHRTDLFQRDPKNVLITDFFGSVRKVEITTETIKLQQDSEIMESSYKEDQMDEKLMEPLKYAEQLPVAQIIHQKPKLKDWHPPGGFILGLWALIIMVFFKTYGIKHMKFIF

SEQ ID NO: 17593 - protein, 455 aa, Homo sapiens
MSFLIDSSIMITSQILFFGFGWLFFMRQLFKDYEIRQYVVQVIFSVTFAFSCTMFELIIFEILGVLNSSSRYFHWKMNLCVILLILVFMVPFYIGYFIVSNIRLLHKQRLLFSCLLWLTFMYFFWKLGDPFPILSPKHGILSIEQLISRVGVIGVTLMALLSGFGAVNCPYTYMSYFLRNVTDTDILALERRLLQTMDMIISKKKRMAMARRTMFQKGEVHNKPSGFWGMIKSVTTSASGSENLTLIQQEVDALEELSRQLFLETADLYATKERIEYSKTFKGKYFNFLGYFFSIYCVWKIFMATINIVFDRVGKTDPVTRGIEITVNYLGIQFDVKFWSQHISFILVGIIIVTSIRGLLITLTKFFYAISSSKSSNVIVLLLAQIMGMYFVSSVLLIRMSMPLEYRTIITEVLGELQFNFYHRWFDVIFLVSALSSILFLYLAHKQAPEKQMAP

SEQ ID NO: 17594 - protein, 335 aa, Homo sapiens
MYFFWKLGDPFPILSPKHGILSIEQLISRVGVIGVTLMALLSGFGAVNCPYTYMSYFLRNVTDTDILALERRLLQTMDMIISKKKRMAMARRTMFQKGEVHNKPSGFWGMIKSVTTSASGSENLTLIQQEVDALEELSRQLFLETADLYATKERIEYSKTFKGKYFNFLGYFFSIYCVWKIFMATINIVFDRVGKTDPVTRGIEITVNYLGIQFDVKFWSQHISFILVGIIIVTSIRGLLITLTKFFYAISSSKSSNVIVLLLAQIMGMYFVSSVLLIRMSMPLEYRTIITEVLGELQFNFYHRWFDVIFLVSALSSILFLYLAHKQAPEKQMAP

SEQ ID NO: 17595 - protein, 430 aa, Homo sapiens
MRQLFKDYEIRQYVVQVIFSVTFAFSCTMFELIIFEILGVLNSSSRYFHWKMNLCVILLILVFMVPFYIGYFIVSNIRLLHKQRLLFSCLLWLTFMYFFWKLGDPFPILSPKHGILSIEQLISRVGVIGVTLMALLSGFGAVNCPYTYMSYFLRNVTDTDILALERRLLQTMDMIISKKKRMAMARRTMFQKGEVHNKPSGFWGMIKSVTTSASGSENLTLIQQEVDALEELSRQLFLETADLYATKERIEYSKTFKGKYFNFLGYFFSIYCVWKIFMATINIVFDRVGKTDPVTRGIEITVNYLGIQFDVKFWSQHISFILVGIIIVTSIRGLLITLTKFFYAISSSKSSNVIVLLLAQIMGMYFVSSVLLIRMSMPLEYRTIITEVLGELQFNFYHRWFDVIFLVSALSSILFLYLAHKQAPEKQMAP

SEQ ID NO: 17596 - protein, 124 aa, Homo sapiens
MSFLIDSSIMITSQILFFGFGWLFFMRQLFKDYEIRQYVVQVIFSVTFAFSCTMFELIIFEILGVLNSSSRYFHWKMNLCVILLILVFMVPFYIGYFIVSNIRLLLSPLSQCINNDCFFPVSYG

SEQ ID NO: 17597 - protein, 455 aa, Homo sapiens; identical to SEQ ID NO: 17593

SEQ ID NO: 17598 - protein, 553 aa, Homo sapiens
MAAVSLRLGDLVWGKLGRYPPWPGKIVNPPKDLKKPRGKKCFFVKFFGTEDHAWIKVEQLKPYHAHKEEMIKINKGKRFQQAVDAVEEFLRRAKGKDQTSSHNSSDDKNRRNSSEERSRPNSGDEKRKLSLSEGKVKKNMGEGKKRVSSGSSERGSKSPLKRAQEQSPRKRGRPPKDEKDLTIPESSTVKGMMAGPMAAFKWQPTASEPVKDADPHFHHFLLSQTEKPAVCYQAITKKLKICEEETGSTSIQAADSTAVNGSITPTDKKIGFLGLGLMGSGIVSNLLKMGHTVTVWNRTAEKCDLFIQEGARLGRTPAEVVSTCDITFACVSDPKAAKDLVLGPSGVLQGIRPGKCYVDMSTVDADTVTELAQVIVSRGGRFLEAPVSGNQQLSNDGMLVILAAGDRGLYEDCSSCFQAMGKTSFFLGEVGNAAKMMLIVNMVQGSFMATIAEGLTLAQVTGQSQQTLLDILNQGQLASIFLDQKCQNILQGNFKPDFYLKYIQKDLRLAIALGDAVNHPTPMAAAANEVYKRAKALDQSDNDMSAVYRAYIH

SEQ ID NO: 17599 - protein, 536 aa, Homo sapiens
MAAVSLRLGDLVWGKLGRYPPWPGKIVNPPKDLKKPRGKKCFFVKFFGTEDHAWIKVEQLKPYHAHKEEMIKINKGKRFQQAVDAVEEFLRRAKGKDQTSSHNSSDDKNRRNSSEERSRPNSGDEKRKLSLSEGKVKKNMGEGKKRVSSGSSERGSKSPLKRAQEQSPRKRGRPPKDEKDLTIPESSTVKGMMAGPMAAFKWQPTASEPVKDADPHFHHFLLSQTEKETGSTSIQAADSTAVNGSITPTDKKIGFLGLGLMGSGIVSNLLKMGHTVTVWNRTAEKCDLFIQEGARLGRTPAEVVSTCDITFACVSDPKAAKDLVLGPSGVLQGIRPGKCYVDMSTVDADTVTELAQVIVSRGGRFLEAPVSGNQQLSNDGMLVILAAGDRGLYEDCSSCFQAMGKTSFFLGEVGNAAKMMLIVNMVQGSFMATIAEGLTLAQVTGQSQQTLLDILNQGQLASIFLDQKCQNILQGNFKPDFYLKYIQKDLRLAIALGDAVNHPTPMAAAANEVYKRAKALDQSDNDMSAVYRAYIH

SEQ ID NO: 17600 - protein, 472 aa, Homo sapiens
MAAVSLRLGDLVWGKLGRYPPWPGKIVNPPKDLKKPRGKKCFFVKFFGTEDHAWIKVEQLKPYHAHKEEMIKINKGKRFQQAVDAVEEFLRRAKGKDQDLTIPESSTVKGMMAGPMAAFKWQPTASEPVKDADPHFHHFLLSQTEKPAVCYQAITKKLKICEEETGSTSIQAADSTAVNGSITPTDKKIGFLGLGLMGSGIVSNLLKMGHTVTVWNRTAEKCDLFIQEGARLGRTPAEVVSTCDITFACVSDPKAAKDLVLGPSGVLQGIRPGKCYVDMSTVDADTVTELAQVIVSRGGRFLEAPVSGNQQLSNDGMLVILAAGDRGLYEDCSSCFQAMGKTSFFLGEVGNAAKMMLIVNMVQGSFMATIAEGLTLAQVTGQSQQTLLDILNQGQLASIFLDQKCQNILQGNFKPDFYLKYIQKDLRLAIALGDAVNHPTPMAAAANEVYKRAKALDQSDNDMSAVYRAYIH

SEQ ID NO: 17601 - protein, 547 aa, Homo sapiens
MAAVSLRLGDLVWGKLGRYPPWPGKIVNPPKDLKKPRGKKCFFVKFFGTEDHAWIKVEQLKPYHAHKEEMIKINKGKRFQQAVDAVEEFLRRAKGKDQTSSHNSSDDKNRRNSSEERSRPNSGDEKRKLSLSEGKVKKNMGEGKKRVSSGSSERGSKSPLKRAQEQSPRKRGRPPKDEKDLTIPESSTVKGMMAGPMAAFKWQPTASEPVKDADPHFHHFLLSQTEKPAVCYQAITKKLKICEEETGSTSIQAADSTAVNGSITPTDKKIGFLGLGLMGSGIVSNLLKMGHTVTVWNRTAEKEGARLGRTPAEVVSTCDITFACVSDPKAAKDLVLGPSGVLQGIRPGKCYVDMSTVDADTVTELAQVIVSRGGRFLEAPVSGNQQLSNDGMLVILAAGDRGLYEDCSSCFQAMGKTSFFLGEVGNAAKMMLIVNMVQGSFMATIAEGLTLAQVTGQSQQTLLDILNQGQLASIFLDQKCQNILQGNFKPDFYLKYIQKDLRLAIALGDAVNHPTPMAAAANEVYKRAKALDQSDNDMSAVYRAYIH

SEQ ID NO: 17602 - protein, 484 aa, Homo sapiens
MIKINKGKRFQQAVDAVEEFLRRAKGKDQTSSHNSSDDKNRRNSSEERSRPNSGDEKRKLSLSEGKVKKNMGEGKKRVSSGSSERGSKSPLKRAQEQSPRKRGRPPKDEKDLTIPESSTVKGMMAGPMAAFKWQPTASEPVKDADPHFHHFLLSQTEKPAVCYQAITKKLKICEEETGSTSIQAADSTAVNGSITPTDKKIGFLGLGLMGSGIVSNLLKMGHTVTVWNRTAEKCDLFIQEGARLGRTPAEVVSTCDITFACVSDPKAAKDLVLGPSGVLQGIRPGKCYVDMSTVDADTVTELAQVIVSRGGRFLEAPVSGNQQLSNDGMLVILAAGDRGLYEDCSSCFQAMGKTSFFLGEVGNAAKMMLIVNMVQGSFMATIAEGLTLAQVTGQSQQTLLDILNQGQLASIFLDQKCQNILQGNFKPDFYLKYIQKDLRLAIALGDAVNHPTPMAAAANEVYKRAKALDQSDNDMSAVYRAYIH

SEQ ID NO: 17603 - protein, 476 aa, Homo sapiens
MADSKEGVLPLTAASTAPISFGFTRTSARRRLADSGDGAGPSPEEKDFLKTVEGRELQSVKPQEAPKELVIPLIQNGHRRQPPARPPGPSTDTGALADGVVSQAVKELIAESKKSLEERENAGVDPTLAIPMIQKGCTPSGEGADSEPRAETVPEEANYEAVPVEAYGLAMLRGMGWKPGEGIGRTFNQVVKPRVNSLRPKGLGLGANLTEAQALTPTGPSRMPRPDEEQEKDKEDQPQGLVPGGAVVVLSGPHRGLYGKVEGLDPDNVRAMVRLAVGSRVVTVSEYYLRPVSQQEFDKNTLDLRQQNGTASSRKTLWNQELYIQQDNSERKRKHLPDRQDGPAAKSEKAAPRSQHWLHRDLRVRFVDNMYKGGQYYNTKMIIEDVLSPDTCVCRTDEGRVLEGLREDMLETLVPKAEGDRVMVVLGPQTGRVGHLLSRDRARSRALVQLPRENQVVELHYDAICQYMGPSDTDDD

SEQ ID NO: 17604 - protein, 410 aa, Homo sapiens
MRACISLVLAVLCGLAWAGKIESCASRCNEKFNRDAACQCDRRCLWHGNCCEDYEHLCTEDHKESEPLPQLEEETEEALASNLYSAPTSCQGRCYEAFDKHHQCHCNARCQEFGNCCKDFESLCSDHEVSHSSDAITKEEIQSISEKIYRADTNKAQKEDIVLNSQNCISPSETRNQVDRCPKPLFTYVNEKLFSKPTYAAFINLLNNYQRATGHGEHFSAQELAEQDAFLREIMKTAVMKELYSFLHHQNRYGSEQEFVDDLKNMWFGLYSRGNEEGDSSGFEHVFSGEVKKGKVTGFHNWIRFYLEEKEGLVDYYSHIYDGPWDSYPDVLAMQFNWDGYYKEVGSAFIGSSPEFEFALYSLCFIARPGKVCQLSLGGYPLAVRTYTWDKSTYGNGKKYIATAYIVSST

SEQ ID NO: 17605 - protein, 369 aa, Homo sapiens
MRACISLVLAVLCGLAWAEDHKESEPLPQLEEETEEALASNLYSAPTSCQGRCYEAFDKHHQCHCNARCQEFGNCCKDFESLCSDHEVSHSSDAITKEEIQSISEKIYRADTNKAQKEDIVLNSQNCISPSETRNQVDRCPKPLFTYVNEKLFSKPTYAAFINLLNNYQRATGHGEHFSAQELAEQDAFLREIMKTAVMKELYSFLHHQNRYGSEQEFVDDLKNMWFGLYSRGNEEGDSSGFEHVFSGEVKKGKVTGFHNWIRFYLEEKEGLVDYYSHIYDGPWDSYPDVLAMQFNWDGYYKEVGSAFIGSSPEFEFALYSLCFIARPGKVCQLSLGGYPLAVRTYTWDKSTYGNGKKYIATAYIVSST

SEQ ID NO: 17606 - protein, 347 aa, Homo sapiens
MRACISLVLAVLCGLAWADLYSAPTSCQGRCYEAFDKHHQCHCNARCQEFGNCCKDFESLCSDHEVSHSSDAITKEEIQSISEKIYRADTNKAQKEDIVLNSQNCISPSETRNQVDRCPKPLFTYVNEKLFSKPTYAAFINLLNNYQRATGHGEHFSAQELAEQDAFLREIMKTAVMKELYSFLHHQNRYGSEQEFVDDLKNMWFGLYSRGNEEGDSSGFEHVFSGEVKKGKVTGFHNWIRFYLEEKEGLVDYYSHIYDGPWDSYPDVLAMQFNWDGYYKEVGSAFIGSSPEFEFALYSLCFIARPGKVCQLSLGGYPLAVRTYTWDKSTYGNGKKYIATAYIVSST

SEQ ID NO: 17607 - protein, 572 aa, Homo sapiens
MECLYYFLGFLLLAARLPLDAAKRFHDVLGNERPSAYMREHNQLNGWSSDENDWNEKLYPVWKRGDMRWKNSWKGGRVQAVLTSDSPALVGSNITFAVNLIFPRCQKEDANGNIVYEKNCRNEAGLSADPYVYNWTAWSEDSDGENGTGQSHHNVFPDGKPFPHHPGWRRWNFIYVFHTLGQYFQKLGRCSVRVSVNTANVTLGPQLMEVTVYRRHGRAYVPIAQVKDVYVVTDQIPVFVTMFQKNDRNSSDETFLKDLPIMFDVLIHDPSHFLNYSTINYKWSFGDNTGLFVSTNHTVNHTYVLNGTFSLNLTVKAAAPGPCPPPPPPPRPSKPTPSLATTLKSYDSNTPGPAGDNPLELSRIPDENCQINRYGHFQATITIVEGILEVNIIQMTDVLMPVPWPESSLIDFVVTCQGSIPTEVCTIISDPTCEITQNTVCSPVDVDEMCLLTVRRTFNGSGTYCVNLTLGDDTSLALTSTLISVPDRDPASPLRMANSALISVGCLAIFVTVISLLVYKKHKEYNPIENSPGNVVRSKGLSVFLNRAKAVFFPGNQEKDPLLKNQEFKGVS

SEQ ID NO: 17608 - protein, 560 aa, Homo sapiens
MECLYYFLGFLLLAARLPLDAAKRFHDVLGNERPSAYMREHNQLNGWSSDENDWNEKLYPVWKRGDMRWKNSWKGGRVQAVLTSDSPALVGSNITFAVNLIFPRCQKEDANGNIVYEKNCRNEAGLSADPYVYNWTAWSEDSDGENGTGQSHHNVFPDGKPFPHHPGWRRWNFIYVFHTLGQYFQKLGRCSVRVSVNTANVTLGPQLMEVTVYRRHGRAYVPIAQVKDVYVVTDQIPVFVTMFQKNDRNSSDETFLKDLPIMFDVLIHDPSHFLNYSTINYKWSFGDNTGLFVSTNHTVNHTYVLNGTFSLNLTVKAAAPGPCPPPPPPPRPSKPTPSLGPAGDNPLELSRIPDENCQINRYGHFQATITIVEGILEVNIIQMTDVLMPVPWPESSLIDFVVTCQGSIPTEVCTIISDPTCEITQNTVCSPVDVDEMCLLTVRRTFNGSGTYCVNLTLGDDTSLALTSTLISVPDRDPASPLRMANSALISVGCLAIFVTVISLLVYKKHKEYNPIENSPGNVVRSKGLSVFLNRAKAVFFPGNQEKDPLLKNQEFKGVS

SEQ ID NO: 17609 - protein, 480 aa, Homo sapiens
MKRSVAVWLLVGLSLGVPQFGKGDICDPNPCENGGICLPGLADGSFSCECPDGFTDPNCSSVVEVASDEEEPTSAGPCTPNPCHNGGTCEISEAYRGDTFIGYVCKCPRGFNGIHCQHNINECEVEPCKNGGICTDLVANYSCECPGEFMGRNCQYKCSGPLGIEGGIISNQQITASSTHRALFGLQKWYPYYARLNKKGLINAWTAAENDRWPWIQINLQRKMRVTGVITQGAKRIGSPEYIKSYKIAYSNDGKTWAMYKVKGTNEDMVFRGNIDNNTPYANSFTPPIKAQYVRLYPQVCRRHCTLRMELLGCELSGCSEPLGMKSGHIQDYQITASSIFRTLNMDMFTWEPRKARLDKQGKVNAWTSGHNDQSQWLQVDLLVPTKVTGIITQGAKDFGHVQFVGSYKLAYSNDGEHWTVYQDEKQRKDKVFQGNFDNDTHRKNVIDPPIYARHIRILPWSWYGRITLRSELLGCTEEE

SEQ ID NO: 17610 - protein, 470 aa, Homo sapiens
MKRSVAVWLLVGLSLGVPQFGKGDICDPNPCENGGICLPGLADGSFSCECPDGFTDPNCSSVVEVGPCTPNPCHNGGTCEISEAYRGDTFIGYVCKCPRGFNGIHCQHNINECEVEPCKNGGICTDLVANYSCECPGEFMGRNCQYKCSGPLGIEGGIISNQQITASSTHRALFGLQKWYPYYARLNKKGLINAWTAAENDRWPWIQINLQRKMRVTGVITQGAKRIGSPEYIKSYKIAYSNDGKTWAMYKVKGTNEDMVFRGNIDNNTPYANSFTPPIKAQYVRLYPQVCRRHCTLRMELLGCELSGCSEPLGMKSGHIQDYQITASSIFRTLNMDMFTWEPRKARLDKQGKVNAWTSGHNDQSQWLQVDLLVPTKVTGIITQGAKDFGHVQFVGSYKLAYSNDGEHWTVYQDEKQRKDKVFQGNFDNDTHRKNVIDPPIYARHIRILPWSWYGRITLRSELLGCTEEE

SEQ ID NO: 17611 - protein, 751 aa, Homo sapiens
MRLLGAAAVAALGRGRAPASLGWQRKQVNWKACRWSSSGVIPNEKIRNIGISAHIDSGKTTLTERVLYYTGRIAKMHEVKGKDGVGAVMDSMELERQRGITIQSAATYTMWKDVNINIIDTPGHVDFTIEVERALRVLDGAVLVLCAVGGVQCQTMTVNRQMKRYNVPFLTFINKLDRMGSNPARALQQMRSKLNHNAAFMQIPMGLEGNFKGIVDLIEERAIYFDGDFGQIVRYGEIPAELRAAATDHRQELIECVANSDEQLGEMFLEEKIPSISDLKLAIRRATLKRSFTPVFLGSALKNKGVQPLLDAVLEYLPNPSEVQNYAILNKEDDSKEKTKILMNSSRDNSHPFVGLAFKLEVGRFGQLTYVRSYQGELKKGDTIYNTRTRKKVRLQRLARMHADMMEDVEEVYAGDICALFGIDCASGDTFTDKANSGLSMESIHVPDPVISIAMKPSNKNDLEKFSKGIGRFTREDPTFKVYFDTENKETVISGMGELHLEIYAQRLEREYGCPCITGKPKVAFRETITAPVPFDFTHKKQSGGAGQYGKVIGVLEPLDPEDYTKLEFSDETFGSNIPKQFVPAVEKGFLDACEKGPLSGHKLSGLRFVLQDGAHHMVDSNEISFIRAGEGALKQALANATLCILEPIMAVEVVAPNEFQGQVIAGINRRHGVITGQDGVEDYFTLYADVPLNDMFGYSTELRSCTEGKGEYTMEYSRYQPCLPSTQEDVINKYLEATGQLPVKKGKAKN

SEQ ID NO: 17612 - protein, 770 aa, Homo sapiens
MRLLGAAAVAALGRGRAPASLGWQRKQVNWKACRWSSSGVIPNEKIRNIGISAHIDSGKTTLTERVLYYTGRIAKMHEVKGKDGVGAVMDSMELERQRGITIQSAATYTMWKDVNINIIDTPGHVDFTIEVERALRVLDGAVLVLCAVGGVQCQTMTVNRQMKRYNVPFLTFINKLDRMGSNPARALQQMRSKLNHNAAFMQIPMGLEGNFKGIVDLIEERAIYFDGDFGHFLRDFLPLLWNWDRRSGSQIVRYGEIPAELRAAATDHRQELIECVANSDEQLGEMFLEEKIPSISDLKLAIRRATLKRSFTPVFLGSALKNKGVQPLLDAVLEYLPNPSEVQNYAILNKEDDSKEKTKILMNSSRDNSHPFVGLAFKLEVGRFGQLTYVRSYQGELKKGDTIYNTRTRKKVRLQRLARMHADMMEDVEEVYAGDICALFGIDCASGDTFTDKANSGLSMESIHVPDPVISIAMKPSNKNDLEKFSKGIGRFTREDPTFKVYFDTENKETVISGMGELHLEIYAQRLEREYGCPCITGKPKVAFRETITAPVPFDFTHKKQSGGAGQYGKVIGVLEPLDPEDYTKLEFSDETFGSNIPKQFVPAVEKGFLDACEKGPLSGHKLSGLRFVLQDGAHHMVDSNEISFIRAGEGALKQALANATLCILEPIMAVEVVAPNEFQGQVIAGINRRHGVITGQDGVEDYFTLYADVPLNDMFGYSTELRSCTEGKGEYTMEYSRYQPCLPSTQEDVINKYLEATGQLPVKKGKAKN

SEQ ID NO: 17613 - protein, 1411 aa, Homo sapiens
MLRRILQRTPGRVGSQGSDLDSSATPINTVDVNNESSSEGFICPQCMKSLGSADELFKHYEAVHDAGNDSGHGGESNLALKRDDVTLLRQEVQDLQASLKEEKWYSEELKKELEKYQGLQQQEAKPDGLVTDSSAELQSLEQQLEEAQTENFNIKQMKDLFEQKAAQLATEIADIKSKYDEERSLREAAEQKVTRLTEELNKEATVIQDLKTELLQRPGIEDVAVLKKELVQVQTLMDNMTLERERESEKLKDECKKLQSQYASSEATISQLRSELAKGPQEVAVYVQELQKLKSSVNELTQKNQTLTENLLKKEQDYTKLEEKHNEESVSKKNIQATLHQKDLDCQQLQSRLSASETSLHRIHVELSEKGEATQKLKEELSEVETKYQHLKAEFKQLQQQREEKEQHGLQLQSEINQLHSKLLETERQLGEAHGRLKEQRQLSSEKLMDKEQQVADLQLKLSRLEEQLKEKVTNSTELQHQLDKTKQQHQEQQALQQSTTAKLREAQNDLEQVLRQIGDKDQKIQNLEALLQKSKENISLLEKEREDLYAKIQAGEGETAVLNQLQEKNHTLQEQVTQLTEKLKNQSESHKQAQENLHDQVQEQKAHLRAAQDRVLSLETSVNELNSQLNESKEKVSQLDIQIKAKTELLLSAEAAKTAQRADLQNHLDTAQNALQDKQQELNKITTQLDQVTAKLQDKQEHCSQLESHLKEYKEKYLSLEQKTEELEGQIKKLEADSLEVKASKEQALQDLQQQRQLNTDLELRATELSKQLEMEKEIVSSTRLDLQKKSEALESIKQKLTKQEEEKKILKQDFETLSQETKIQHEELNNRIQTTVTELQKVKMEKEALMTELSTVKDKLSKVSDSLKNSKSEFEKENQKGKAAILDLEKTCKELKHQLQVQMENTLKEQKELKKSLEKEKEASHQLKLELNSMQEQLIQAQNTLKQNEKEEQQLQGNINELKQSSEQKKKQIEALQGELKIAVLQKTELENKLQQQLTQAAQELAAEKEKISVLQNNYEKSQETFKQLQSDFYGRESELLATRQDLKSVEEKLSLAQEDLISNRNQIGNQNKLIQELKTAKATLEQDSAKKEQQLQERCKALQDIQKEKSLKEKELVNEKSKLAEIEEIKCRQEKEITKLNEELKSHKLESIKEITNLKDAKQLLIQQKLELQGKADSLKAAVEQEKRNQQILKDQVKKEEEELKKEFIEKEAKLHSEIKEKEVGMKKHEENEAKLTMQITALNENLGTVKKEWQSSQRRVSELEKQTDDLRGEIAVLEATVQNNQDERRALLERCLKGEGEIEKLQTKVLELQRKLDNTTAAVQELGRENQSLQIKHTQALNRKWAEDNEVQNCMACGKGFSVTVRRHHCRQCGNIFCAECSAKNALTPSSKKPVRVCDACFNDLQG

SEQ ID NO: 17614 - protein, 463 aa, Homo sapiens
MGKEKTHINIVVIGHVDSGKSTTTGHLIYKCGGIDKRTIEKFEKEAAEMGKGSFKYAWVLDKLKAERERGITIDISLWKFETTKYYITIIDAPGHRDFIKNMITGTSQADCAVLIVAAGVGEFEAGISKNGQTREHALLAYTLGVKQLIVGVNKMDSTEPAYSEKRYDEIVKEVSAYIKKIGYNPATVPFVPISGWHGDNMLEPSPNMPWFKGWKVERKEGNASGVSLLEALDTILPPTRPTDKPLRLPLQDVYKIGGIGTVPVGRVETGILRPGMVVTFAPVNITTEVKSVEMHHEALSEALPGDNVGFNVKNVSVKDIRRGNVCGDSKSDPPQEAAQFTSQVIILNHPGQISAGYSPVIDCHTAHIACKFAELKEKIDRRSGKKLEDNPKSLKSGDAAIVEMVPGKPMCVESFSQYPPLGRFAVRDMRQTVAVGVIKNVEKKSGGAGKVTKSAQKAQKAGK

SEQ ID NO: 17615 - protein, 362 aa, Homo sapiens
MTQELSFQKFIEQSDLLGELKYDFNEKDEFRHTETQRPFVFNYYENVLEKNSKRYQALGHLLEQYIYELLEKVCKLEKVYIPPEADKEEPRSFFFMSEKALTNHHSALLILLQDHGVFRAGQWSQQAIIHHGLQHGSQIPCIQMALQAHYDVIVLNPNDNFVEPKVEKEWKGLLTQNIESSSLKMVQGGSFFSLQHPPKCIPKRCSNTPEEHTAYIWDYFISKTEGKDIAFIVHGYGGLVFMDLLVRRRWEVMSKVYAVALIDSEHHVGHQLGSDVQLLAWIKHHCREWVTSPKPLDKPAATVFKKEFPMVSAGTEKYILAPSSSLQSIFKYFKKALKARTTINFSRMPIVTRSSTKRKQSA

SEQ ID NO: 17616 - protein, 47 aa, Homo sapiens
MLASGAESQDRYRNTPSSRIFTPGFRPTPATTPEPGIYMFNMEPSQP

SEQ ID NO: 17617 - protein, 212 aa, Homo sapiens
MNIFRLTGDLSHLAAIVILLLKIWKTRSCAGISGKSQLLFALVFTTRYLDLFTSFISLYNTSMKVIYLACSYATVYLIYLKFKATYDGNHDTFRVEFLVVPVGGLSFLVNHDFSPLEILWTFSIYLESVAILPQLFMISKTGEAETITTHYLFFLGLYRALYLVNWIWRFYFEGFFDLIAVVAGVVQTILYCDFFYLYITKVLKGKKLSLPA

SEQ ID NO: 17618 - protein, 186 aa, Homo sapiens
MNIFRLTGDLSHLAAIVILLLKIWKTRSCAGISGKSQLLFALVFTTRYLDLFTSFISLYNTSMKVIYLACSYATVYLIYLKFKATYDGNHDTFRVEFLVVPVGGLSFLVNHDFSPLEYSRERSSVCQHKCQRPSPASVLQGARTEFLPQQRHKMLDTENQKLNSFVADSHQWLCKNAEEKSQKVSV

SEQ ID NO: 17619 - protein, 362 aa, Homo sapiens
MARLRDCLPRLMLTLRSLLFWSLVYCYCGLCASIHLLKLLWSLGKGPAQTFRRPAREHPPACLSDPSLGTHCYVRIKDSGLRFHYVAAGERGKPLMLLLHGFPEFWYSWRYQLREFKSEYRVVALDLRGYGETDAPIHRQNYKLDCLITDIKDILDSLGYSKCVLIGHDWGGMIAWLIAICYPEMVMKLIVINFPHPNVFTEYILRHPAQLLKSSYYYFFQIPWFPEFMFSINDFKVLKHLFTSHSTGIGRKGCQLTTEDLEAYIYVFSQPGALSGPINHYRNIFSCLPLKHHMVTTPTLLLWGENDAFMEVEMAEVTKIYVKNYFRLTILSEASHWLQQDQPDIVNKLIWTFLKEETRKKD

SEQ ID NO: 17620 - protein, 241 aa, Homo sapiens
MEDCCMLPYYTAQSSPAMGMFNTSMGKLQRQLYKGEYTIFRYAPMFESDFIQISKRGEVIDVHNRARMVTMGIVRTSPCLTLPDVMLLARPAAVCDNARCGPATQKRESPPAEILELTRLLPLMFVKITIHNSVKKQLHLKLATGRSFYLQLCPPSDASEDLFVHWENLVYILRPPVEAYSDTRAILAGNTLDSSVLEEVQRSPVGYAMKFCEEKEQFRISRLHMNAEMFGSTYCDYTIEI

SEQ ID NO: 17621 - protein, 1005 aa, Homo sapiens
MAPARGRLPPALWVVTAAAAAATCVSAARGEVNLLDTSTIHGDWGWLTYPAHGWDSINEVDESFQPIHTYQVCNVMSPNQNNWLRTSWVPRDGARRVYAEIKFTLRDCNSMPGVLGTCKETFNLYYLESDRDLGASTQESQFLKIDTIAADESFTGADLGVRRLKLNTEVRSVGPLSKRGFYLAFQDIGACLAILSLRIYYKKCPAMVRNLAAFSEAVTGADSSSLVEVRGQCVRHSEERDTPKMYCSAEGEWLVPIGKCVCSAGYEERRDACVACELGFYKSAPGDQLCARCPPHSHSAAPAAQACHCDLSYYRAALDPPSSACTRPPSAPVNLISSVNGTSVTLEWAPPLDPGGRSDITYNAVCRRCPWALSRCEACGSGTRFVPQQTSLVQASLLVANLLAHMNYSFWIEAVNGVSDLSPEPRRAAVVNITTNQAAPSQVVVIRQERAGQTSVSLLWQEPEQPNGIILEYEIKYYEKDKEMQSYSTLKAVTTRATVSGLKPGTRYVFQVRARTSAGCGRFSQAMEVETGKPRPRYDTRTIVWICLTLITGLVVLLLLLICKKRHCGYSKAFQDSDEEKMHYQNGQAPPPVFLPLHHPPGKLPEPQFYAEPHTYEEPGRAGRSFTREIEASRIHIEKIIGSGDSGEVCYGRLRVPGQRDVPVAIKALKAGYTERQRRDFLSEASIMGQFDHPNIIRLEGVVTRGRLAMIVTEYMENGSLDTFLRTHDGQFTIMQLVGMLRGVGAGMRYLSDLGYVHRDLAARNVLVDSNLVCKVSDFGLSRVLEDDPDAAYTTTGGKIPIRWTAPEAIAFRTFSSASDVWSFGVVMWEVLAYGERPYWNMTNRDVISSVEEGYRLPAPMGCPHALHQLMLDCWHKDRAQRPRFSQIVSVLDALIRSPESLRATATVSRCPPPAFVRSCFDLRGGSGGGGGLTVGDWLDSIRMGRYRDHFAAGGYSSLGMVLRMNAQDVRALGITLMGHQKKILGSIQTMRAQLTSTQGPRRHL

SEQ ID NO: 17622 - protein, 495 aa, Homo sapiens
MAPARGRLPPALWVVTAAAAAATCVSAARGEVNLLDTSTIHGDWGWLTYPAHGWDSINEVDESFQPIHTYQVCNVMSPNQNNWLRTSWVPRDGARRVYAEIKFTLRDCNSMPGVLGTCKETFNLYYLESDRDLGASTQESQFLKIDTIAADESFTGADLGVRRLKLNTEVRSVGPLSKRGFYLAFQDIGACLAILSLRIYYKKCPAMVRNLAAFSEAVTGADSSSLVEVRGQCVRHSEERDTPKMYCSAEGEWLVPIGKCVCSAGYEERRDACVACELGFYKSAPGDQLCARCPPHSHSAAPAAQACHCDLSYYRAALDPPSSACTRPPSAPVNLISSVNGTSVTLEWAPPLDPGGRSDITYNAVCRRCPWALSRCEACGSGTRFVPQQTSLVQASLLVANLLAHMNYSFWIEAVNGVSDLSPEPRRAAVVNITTNQAGRRRNSVPQRPGPPASPASDPSRDQSSAGDVLWAFRQVPLWPCAPHQDPELEALHCL

SEQ ID NO: 17623 - protein, 330 aa, Homo sapiens
MRCCHICKLPGRVMGIRVLRLSLVVILVLLLVAGALTALLPSVKEDKMLMLRREIKSQGKSTMDSFTLIMQTYNRTDLLLKLLNHYQAVPNLHKVIVVWNNIGEKAPDELWNSLGPHPIPVIFKQQTANRMRNRLQVFPELETNAVLMVDDDTLISTPDLVFAFSVWQQFPDQIVGFVPRKHVSTSSGIYSYGSFEMQAPGSGNGDQYSMVLIGASFFNSKYLELFQRQPAAVHALIDDTQNCDDIAMNFIIAKHIGKTSGIFVKPVNMDNLEKETNSGYSGMWHRAEHALQRSYCINKLVNIYDSMPLRYSNIMISQFGFPYANYKRKI

SEQ ID NO: 17624 - protein, 426 aa, Homo sapiens
MAVQAALLSTHPFVPFGFGGSPDGLGGAFGALDKGCCFEDDETGAPAGALLSGAEGGDVREATRDLLSFIDSASSNIKLALDKPGKSKRKVNHRKYLQKQIKRCSGLMGAAPPGPPSPSAADTPAKRPLAAPSAPTVAAPAHGKAAPRREASQAAAAASLQSRSLAALFDSLRHVPGGAEPAGGEVAAPAAGLGGAGTGGAGGDVAGPAGATAIPGARKVPLRARNLPPSFFTEPSRAGGGGCGPSGPDVSLGDLEKGAEAVEFFELLGPDYGAGTEAAVLLAAEPLDVFPAGASVLRGPPELEPGLFEPPPAVVGNLLYPEPWSVPGCSPTKKSPLTAPRGGLTLNEPLSPLYPAAADSPGGEDGRGHLASFAPFFPDCALPPPPPPHQVSYDYSAGYSRTAYSSLWRSDGVWEGAPGEEGAHRD

SEQ ID NO: 17625 - protein, 1036 aa, Homo sapiens
MGGCEVREFLLQFGFFLPLLTAWPGDCSHVSNNQVVLLDTTTVLGELGWKTYPLNGWDAITEMDEHNRPIHTYQVCNVMEPNQNNWLRTNWISRDAAQKIYVEMKFTLRDCNSIPWVLGTCKETFNLFYMESDESHGIKFKPNQYTKIDTIAADESFTQMDLGDRILKLNTEIREVGPIERKGFYLAFQDIGACIALVSVRVFYKKCPFTVRNLAMFPDTIPRVDSSSLVEVRGSCVKSAEERDTPKLYCGADGDWLVPLGRCICSTGYEEIEGSCHACRPGFYKAFAGNTKCSKCPPHSLTYMEATSVCQCEKGYFRAEKDPPSMACTRPPSAPRNVVFNINETALILEWSPPSDTGGRKDLTYSVICKKCGLDTSQCEDCGGGLRFIPRHTGLINNSVIVLDFVSHVNYTFEIEAMNGVSELSFSPKPFTAITVTTDQDAPSLIGVVRKDWASQNSIALSWQAPAFSNGAILDYEIKYYEKEHEQLTYSSTRSKAPSVIITGLKPATKYVFHIRVRTATGYSGYSQKFEFETGDETSDMAAEQGQILVIATAAVGGFTLLVILTLFFLITGRCQWYIKAKMKSEEKRRNHLQNGHLRFPGIKTYIDPDTYEDPSLAVHEFAKEIDPSRIRIERVIGAGEFGEVCSGRLKTPGKREIPVAIKTLKGGHMDRQRRDFLREASIMGQFDHPNIIRLEGVVTKRSFPAIGVEAFCPSFLRAGFLNSIQAPHPVPGGGSLPPRIPAGRPVMIVVEYMENGSLDSFLRKHDGHFTVIQLVGMLRGIASGMKYLSDMGYVHRDLAARNILVNSNLVCKVSDFGLSRVLEDDPEAAYTTTGGKIPIRWTAPEAIAYRKFSSASDAWSYGIVMWEVMSYGERPYWEMSNQDVILSIEEGYRLPAPMGCPASLHQLMLHCWQKERNHRPKFTDIVSFLDKLIRNPSALHTLVEDILVMPESPGEVPEYPLFVTVGDWLDSIKMGQYKNNFVAAGFTTFDLISRMSIDDIRRIGVILIGHQRRIVSSIQTLRLHMMHIQEKGFHV

SEQ ID NO: 17626 - protein, 334 aa, Homo sapiens
MKDSPFQVTKLYWLNEKWDFIASASDMAAEQGQILVIATAAVGGFTLLVILTLFFLITGRCQWYIKAKMKSEEKRRNHLQNGHLRFPGIKTYIDPDTYEDPSLAVHEFAKEIDPSRIRIERVIGAGEFGEVCSGRLKTPGKREIPVAIKTLKGGHMDRQRRDFLREASIMGQFDHPNIIRLEGVVTKRSFPAIGVEAFCPSFLRAGFLNSIQAPHPVPGGGSLPPRIPAGRPVMIVVEYMENGSLDSFLRKHDGHFTVIQLVGMLRGIASGMKYLSDMGYVHRDLAARNILVNSNLVCKVSDFGLSRVLEDDPEAAYTTTDLFQTLTLNLCYSA

SEQ ID NO: 17627 - protein, 398 aa, Homo sapiens
MKDSPFQVTKLYWLNEKWDFIASASDMAAEQGQILVIATAAVGGFTLLVILTLFFLITGRCQWYIKAKMKSEEKRRNHLQNGHLRFPGIKTYIDPDTYEDPSLAVHEFAKEIDPSRIRIERVIGAGEFGEVCSGRLKTPGKREIPVAIKTLKGGHMDRQRRDFLREASIMGQFDHPNIIRLEGVVTKRSFPAIGVEAFCPSFLRAGFLNSIQAPHPVPGGGSLPPRIPAGRPVMIVVEYMENGSLDSFLRKHDGHFTVIQLVGMLRGIASGMKYLSDMGYVHRDLAARNILVNSNLVCKVSDFGLSRVLEDDPEAAYTTTRPTNHNKEQSELVKEDGLESLCEQCESSSGYGTGLVLMWKRNRRAMGASGQTRKQCDKRDNPPTDLFQTLTLNLCYSA

SEQ ID NO: 17628 - protein, 500 aa, Homo sapiens
MAESQLNCLDEAHVNEKVTEAQAAFYYCERRRAALEALLGGGEQAYRERLKEEQLRDFLSSPERQALRAAWSPYEDAVPAANARGKSKAKAKAPAPAPAESGESLAYWPDRSDTEVPPLDLGWTDTGFYRGVSRVTLFTHPPKDEKAPHLKQVVRQMIQQAQKVIAVVMDLFTDGDIFQDIVDAACKRRVPVYIILDEAGVKYFLEMCQDLQLTDFRIRNIRVRSVTGVGFYMPMGRIKGTLSSRFLMVDGDKVATGSYRFTWSSSHVDRNLLLLLTGQNVEPFDTEFRELYAISEEVDLYRQLSLAGRVGLHYSSTVARKLINPKYALVSGCRHPPGEMMRWAARQQREAGGNPEGQEEGASGGESAWRLESFLKDLVTVEQVLPPVEPIPLGELSQKDGRMVSHMHRDLKPKSREAPSRNGMGEAARGEAAPARRFSSRLFSRRAKRPAAPNGMASSVSTETSEVEFLTGKRPNENSSADISGKTSPSSAKPSNCVIS

SEQ ID NO: 17629 - protein, 332 aa, Homo sapiens
MDLFTDGDIFQDIVDAACKRRVPVYIILDEAGVKYFLEMCQDLQLTDFRIRNIRVRSVTGVGFYMPMGRIKGTLSSRFLMVDGDKVATGSYRFTWSSSHVDRNLLLLLTGQNVEPFDTEFRELYAISEEVDLYRQLSLAGRVGLHYSSTVARKLINPKYALVSGCRHPPGEMMRWAARQQREAGGNPEGQEEGASGGESAWRLESFLKDLVTVEQVLPPVEPIPLGELSQKDGRMVSHMHRDLKPKSREAPSRNGMGEAARGEAAPARRFSSRLFSRRAKRPAAPNGMASSVSTETSEVEFLTGKRPNENSSADISGKTSPSSAKPSNCVIS

SEQ ID NO: 17630 - protein, 1250 aa, Homo sapiens
MEASRRFPEAEALSPEQAAHYLRYVKEAKEATKNGDLEEAFKLFNLAKDIFPNEKVLSRIQKIQEALEELAEQGDDEFTDVCNSGLLLYRELHNQLFEHQKEGIAFLYSLYRDGRKGGILADDMGLGKTVQIIAFLSGMFDASLVNHVLLIMPTNLINTWVKEFIKWTPGMRVKTFHGPSKDERTRNLNRIQQRNGVIITTYQMLINNWQQLSSFRGQEFVWDYVILDEAHKIKTSSTKSAICARAIPASNRLLLTGTPIQNNLQELWSLFDFACQGSLLGTLKTFKMEYENPITRAREKDATPGEKALGFKISENLMAIIKPYFLRRTKEDVQKKKSSNPEARLNEKNPDVDAICEMPSLSRKNDLIIWIRLVPLQEEIYRKFVSLDHIKELLMETRSPLAELGVLKKLCDHPRLLSARACCLLNLGTFSAQDGNEGEDSPDVDHIDQVTDDTLMEESGKMIFLMDLLKRLRDEGHQTLVFSQSRQILNIIERLLKNRHFKTLRIDGTVTHLLEREKRINLFQQNKDYSVFLLTTQVGGVGLTLTAATRVVIFDPSWNPATDAQAVDRVYRIGQKENVVVYRLITCGTVEEKIYRRQVFKDSLIRQTTGEKKNPFRYFSKQELRELFTIEDLQNSVTQLQLQSLHAAQRKSDIKLDEHIAYLQSLGIAGISDHDLMYTCDLSVKEELDVVEESHYIQQRVQKAQFLVEFESQNKEFLMEQQRTRNEGAWLREPVFPSSTKKKCPKLNKPQPQPSPLLSTHHTQEEDISSKMASVVIDDLPKEGEKQDLSSIKVNVTTLQDGKGTGSADSIATLPKGFGSVEELCTNSSLGMEKSFATKNEAVQKETLQEGPKQEALQEDPLESFNYVLSKSTKADIGPNLDQLKDDEILRHCNPWPIISITNESQNAESNVSIIEIADDLSASHSALQDAQASEAKLEEEPSASSPQYACDFNLFLEDSADNRQNFSSQSLEHVEKENSLCGSAPNSRAGFVHSKTCLSWEFSEKDDEPEEVVVKAKIRSKARRIVSDGEDEDDSFKDTSSINPFNTSLFQFSSVKQFDASTPKNDISPPGRFFSSQIPSSVNKSMNSRRSLASRRSLINMVLDHVEDMEERLDDSSEAKGPEDYPEEGVEESSGEASKYTEEDPSGETLSSENKSSWLMTSKPSALAQETSLGAPEPLSGEQLVGSPQDKAAEATNDYETLVKRGKELKECGKIQEALNCLVKALDIKSADPEVMLLTLSLYKQLNNN

SEQ ID NO: 17631 - protein, 585 aa, Homo sapiens
MALLSEGLDEVPAACLSPCGPPNPTELFSESRRLALEELVAGGPEAFAAFLRRERLARFLNPDEVHAILRAAERPGEEGAAAAAAAEDSFGSSHDCSSGTYFPEQSDLEPPLLELGWPAFYQGAYRGATRVETHFQPRGAGEGGPYGCKDALRQQLRSAREVIAVVMDVFTDIDIFRDLQEICRKQGVAVYILLDQALLSQFLDMCMDLKVHPEQEKLMTVRTITGNIYYARSGTKIIGKVHEKFTLIDGIRVATGSYSFTWTDGKLNSSNLVILSGQVVEHFDLEFRILYAQSKPISPKLLSHFQSSNKFDHLTNRKPQSKELTLGNLLRMRLARLSSTPRKADLDPEMPAEGKAERKPHDCESSTVSEEDYFSSHRDELQSRKAIDAATQTEPGEEMPGLSVSEVGTQTSITTACAGTQTAVITRIASSQTTIWSRSTTTQTDMDENILFPRGTQSTEGSPVSKMSVSRSSSLKSSSSVSSQGSVASSTGSPASIRTTDFHNPGYPKYLGTPHLELYLSDSLRNLNKERQFHFAGIRSRLNHMLAMLSRRTLFTENHLGLHSGNFSRVNLLAVRDVALYPSYQ

SEQ ID NO: 17632 - protein, 569 aa, Homo sapiens
MALLSEGLDEVPAACLSPCGPPNPTELFSESRRLALEELVAGGPEAFAAFLRRERLARFLNPDEVHAILRAAERPGEEGAAAAAAAEDSFGSSHDCSSGTYFPEQSDLEPPLLELGWPAFYQGAGEGGPYGCKDALRQQLRSAREVIAVVMDVFTDIDIFRDLQEICRKQGVAVYILLDQALLSQFLDMCMDLKVHPEQEKLMTVRTITGNIYYARSGTKIIGKVHEKFTLIDGIRVATGSYSFTWTDGKLNSSNLVILSGQVVEHFDLEFRILYAQSKPISPKLLSHFQSSNKFDHLTNRKPQSKELTLGNLLRMRLARLSSTPRKADLDPEMPAEGKAERKPHDCESSTVSEEDYFSSHRDELQSRKAIDAATQTEPGEEMPGLSVSEVGTQTSITTACAGTQTAVITRIASSQTTIWSRSTTTQTDMDENILFPRGTQSTEGSPVSKMSVSRSSSLKSSSSVSSQGSVASSTGSPASIRTTDFHNPGYPKYLGTPHLELYLSDSLRNLNKERQFHFAGIRSRLNHMLAMLSRRTLFTENHLGLHSGNFSRVNLLAVRDVALYPSYQ

SEQ ID NO: 17633 - protein, 1037 aa, Homo sapiens
MRGSGPRGAGRRRPPSGGGDTPITPASLAGCYSAPRRAPLWTCLLLCAALRTLLASPSNEVNLLDSRTVMGDLGWIAFPKNGWEEIGEVDENYAPIHTYQVCKVMEQNQNNWLLTSWISNEGASRIFIELKFTLRDCNSLPGGLGTCKETFNMYYFESDDQNGRNIKENQYIKIDTIAADESFTELDLGDRVMKLNTEVRDVGPLSKKGFYLAFQDVGACIALVSVRVYYKKCPSVVRHLAVFPDTITGADSSQLLEVSGSCVNHSVTDEPPKMHCSAEGEWLVPIGKCMCKAGYEEKNGTCQVCRPGFFKASPHIQSCGKCPPHSYTHEEASTSCVCEKDYFRRESDPPTMACTRPPSAPRNAISNVNETSVFLEWIPPADTGGRKDVSYYIACKKCNSHAGVCEECGGHVRYLPRQSGLKNTSVMMVDLLAHTNYTFEIEAVNGVSDLSPGARQYVSVNVTTNQAAPSPVTNVKKGKIAKNSISLSWQEPDRPNGIILEYEIKYFEKDQETSYTIIKSKETTITAEGLKPASVYVFQIRARTAAGYGVFSRRFEFETTPVFAASSDQSQIPVIAVSVTVGVILLAVVIGVLLSGSCCECGCGRASSLCAVAHPSLIWRCGYSKAKQDPEEEKMHFHNGHIKLPGVRTYIDPHTYEDPNQAVHEFAKEIEASCITIERVIGAGEFGEVCSGRLKLPGKRELPVAIKTLKVGYTEKQRRDFLGEASIMGQFDHPNIIHLEGVVTKSKPVMIVTEYMENGSLDTFLKKNDGQFTVIQLVGMLRGISAGMKYLSDMGYVHRDLAARNILINSNLVCKVSDFGLSRVLEDDPEAAYTTRGGKIPIRWTAPEAIAFRKFTSASDVWSYGIVMWEVVSYGERPYWEMTNQDVIKAVEEGYRLPSPMDCPAALYQLMLDCWQKERNSRPKFDEIVNMLDKLIRNPSSLKTLVNASCRVSNLLAEHSPLGSGAYRSVGEWLEAIKMGRYTEIFMENGYSSMDAVAQVTLEDLRRLGVTLVGHQKKIMNSLQEMKVQLVNGMVPL

SEQ ID NO: 17634 - protein, 1015 aa, Homo sapiens
MRGSGPRGAGRRRPPSGGGDTPITPASLAGCYSAPRRAPLWTCLLLCAALRTLLASPSNEVNLLDSRTVMGDLGWIAFPKNGWEEIGEVDENYAPIHTYQVCKVMEQNQNNWLLTSWISNEGASRIFIELKFTLRDCNSLPGGLGTCKETFNMYYFESDDQNGRNIKENQYIKIDTIAADESFTELDLGDRVMKLNTEVRDVGPLSKKGFYLAFQDVGACIALVSVRVYYKKCPSVVRHLAVFPDTITGADSSQLLEVSGSCVNHSVTDEPPKMHCSAEGEWLVPIGKCMCKAGYEEKNGTCQVCRPGFFKASPHIQSCGKCPPHSYTHEEASTSCVCEKDYFRRESDPPTMACTRPPSAPRNAISNVNETSVFLEWIPPADTGGRKDVSYYIACKKCNSHAGVCEECGGHVRYLPRQSGLKNTSVMMVDLLAHTNYTFEIEAVNGVSDLSPGARQYVSVNVTTNQAAPSPVTNVKKGKIAKNSISLSWQEPDRPNGIILEYEIKYFEKDQETSYTIIKSKETTITAEGLKPASVYVFQIRARTAAGYGVFSRRFEFETTPVFAASSDQSQIPVIAVSVTVGVILLAVVIGVLLSGRRCGYSKAKQDPEEEKMHFHNGHIKLPGVRTYIDPHTYEDPNQAVHEFAKEIEASCITIERVIGAGEFGEVCSGRLKLPGKRELPVAIKTLKVGYTEKQRRDFLGEASIMGQFDHPNIIHLEGVVTKSKPVMIVTEYMENGSLDTFLKKNDGQFTVIQLVGMLRGISAGMKYLSDMGYVHRDLAARNILINSNLVCKVSDFGLSRVLEDDPEAAYTTRGGKIPIRWTAPEAIAFRKFTSASDVWSYGIVMWEVVSYGERPYWEMTNQDVIKAVEEGYRLPSPMDCPAALYQLMLDCWQKERNSRPKFDEIVNMLDKLIRNPSSLKTLVNASCRVSNLLAEHSPLGSGAYRSVGEWLEAIKMGRYTEIFMENGYSSMDAVAQVTLEDLRRLGVTLVGHQKKIMNSLQEMKVQLVNGMVPL

SEQ ID NO: 17635 - protein, 969 aa, Homo sapiens
MGDLGWIAFPKNGWEEIGEVDENYAPIHTYQVCKVMEQNQNNWLLTSWISNEGASRIFIELKFTLRDCNSLPGGLGTCKETFNMYYFESDDQNGRNIKENQYIKIDTIAADESFTELDLGDRVMKLNTEVRDVGPLSKKGFYLAFQDVGACIALVSVRVYYKKCPSVVRHLAVFPDTITGADSSQLLEVSGSCVNHSVTDEPPKMHCSAEGEWLVPIGKCMCKAGYEEKNGTCQVCRPGFFKASPHIQSCGKCPPHSYTHEEASTSCVCEKDYFRRESDPPTMACTRPPSAPRNAISNVNETSVFLEWIPPADTGGRKDVSYYIACKKCNSHAGVCEECGGHVRYLPRQSGLKNTSVMMVDLLAHTNYTFEIEAVNGVSDLSPGARQYVSVNVTTNQAAPSPVTNVKKGKIAKNSISLSWQEPDRPNGIILEYEIKYFEKDQETSYTIIKSKETTITAEGLKPASVYVFQIRARTAAGYGVFSRRFEFETTPVSVAASSDQSQIPVIAVSVTVGVILLAVVIGVLLSGSCCECGCGRASSLCAVAHPSLIWRCGYSKAKQDPEEEKMHFHNGHIKLPGVRTYIDPHTYEDPNQAVHEFAKEIEASCITIERVIGAGEFGEVCSGRLKLPGKRELPVAIKTLKVGYTEKQRRDFLGEASIMGQFDHPNIIHLEGVVTKSKPVMIVTEYMENGSLDTFLKKNDGQFTVIQLVGMLRGISAGMKYLSDMGYVHRDLAARNILINSNLVCKVSDFGLSRVLEDDPEAAYTTRGGKIPIRWTAPEAIAFRKFTSASDVWSYGIVMWEVVSYGERPYWEMTNQDVIKAVEEGYRLPSPMDCPAALYQLMLDCWQKERNSRPKFDEIVNMLDKLIRNPSSLKTLVNASCRVSNLLAEHSPLGSGAYRSVGEWLEAIKMGRYTEIFMENGYSSMDAVAQVTLEDLRRLGVTLVGHQKKIMNSLQEMKVQLVNGMVPL

SEQ ID NO: 17636 - protein, 747 aa, Homo sapiens
MFGGPGPGVLGAQGMAGPLRGRVEELKLPWWRESSPLVLRHSEAARLAADALLERGEAAYLRVISEERELPFLSALDVDYMTSHVRGGPELSEAQGQEASGPDRLSLLSEVTSGTYFPMASDIDPPDLDLGWPEVPQATGFSPTQAVVHFQRDKAKNIKDLLRFLFSQAHTVVAVVMDIFTDMELLCDLMEASSRRGVPVYLLLAQEHLRHFLEMCYKMDLNGEHLPNMRVRSTCGDTYCSKAGRRFTGQALEKFVLIDCEQVVAGSYSFTWLCSQAHTSMVLQLRGRIVEDFDREFRCLYAESQPVEGFCGGEDPLSPRALRPPPVALAFRPDVPSPTSSLPSSTSLSSIKQSPLMGRSSYLALPGGGDCSDTGVVSSSLGPARREASGQPSLHRQLSDPNHGSPPGLYRANLGKLGAYPWSQSSPALNHNSTSPLTLAVGSPLLPRSRPLLQFHRGAPALSRFPENGLPGSQEPSPLRGRWVPGTTLETVEEKEKKASPSQSRGQLDLLVPFPRAREVGDPDSGVTPNSGPLRPGEQAPEDRRLSPSQADSQLDLLSRALGTGGAPELGSLRPGDRALEDRRLSLNQSRGQSDLLMQYPKAQGSRVPLETNSSARPARRAPDERRQTLGHSQLDLITKFGPFRGEGPGPNGLPISSPARTAGAGSGDEKRLTLGHSKLDLITKYHQLHGARQGTEPGGPKGGHLNGGNSDLVRDEKRLTLGHSKLDLITKYNKSKFKQLRSRFES

SEQ ID NO: 17637 - protein, 339 aa, Homo sapiens
MTDRSPFETDMLTLTRYVMEKGRQAKGTGELTQLLNSMLTAIKAISSAVRKAGLAHLYGIAGSVNVTGDEVKKLDVLSNSLVINMVQSSYSTCVLVSEENKDAIITAKEKRGKYVVCFDPLDGSSNIDCLASIGTIFAIYRKTSEDEPSEKDALQCGRNIVAAGYALYGSATLVALSTGQGVDLFMLDPALGEFVLVEKDVKIKKKGKIYSLNEGYAKYFDAATTEYVQKKKFPEDGSAPYGARYVGSMVADVHRTLVYGGIFLYPANQKSPKGKLRLLYECNPVAYIIEQAGGLATTGTQPVLDVKPEAIHQRVPLILGSPEDVQEYLTCVQKNQAGS

SEQ ID NO: 17638 - protein, 115 aa, Homo sapiens
MGGCPVRKRRRNGSKEGNHHSTQPKRNKRNPIFQDSQDTEFSWSDNERSSSRINIPERASGPEGNLNQIVTEPDANFPQFLHEGLSKPVYVINWFMSFGPEIKLNTSQQGRNQAV

SEQ ID NO: 17639 - protein, 116 aa, Homo sapiens
MGGCPVRKRRRNGSKEGNHHSTQPKRNKRNPIFQDSQDTEVFSWSDNERSSSRINIPERASGPEGNLNQIVTEPDANFPQFLHEGLSKPVYVINWFMSFGPEIKLNTSQQGRNQAV

SEQ ID NO: 17640 - protein, 116 aa, Homo sapiens
MGGCPVRKRRRNGSKEGNHHSTQPKRNKRNPIFQDSQDTEVFSWSDNERSSSRINIPERASGPEGNLNQIVTEPDANFPQFLHEGYVPCQGLYSHINQTLKEAHFNSLQQRGQAPT

SEQ ID NO: 17641 - protein, 112 aa, Homo sapiens
MTCRKRRRNGSKEGNHHSTQPKRNKRNPIFQDSQDTEFSWSDNERSSSRINIPERASGPEGNLNQIVTEPDANFPQFLHEGYVPCQGLYSHINQTLKEAHFNSLQQRGQAPT

SEQ ID NO: 17642 - protein, 46 aa, Homo sapiens
MGGCPVRKRRRNGSKEGNHHSTQPKRNKRNPIFQDSQDTEVAIFME

SEQ ID NO: 17643 - protein, 114 aa, Homo sapiens
MLVLWLKRRRNGSKEGNHHSTQPKRNKRNPIFQDSQDTEFSWSDNERSSSRINIPERASGPEGNLNQIVTEPDANFPQFLHEGYVPCQGLYSHINQTLKEAHFNSLQQRGQAPT

SEQ ID NO: 17644 - protein, 169 aa, Homo sapiens
MLPSTMFLVHLPLSTNRLHCLRNTSLESYLCSFVHLNHPLHISDRVILISLHEAVRFSFAFSFPRGTLSIAYCLMSSVSTSSEAIMSTELLANYCHSSLHVCICISSFPNETGNHDSFPGAVVSISDQPTDQCKLAAKELPLRNLLECRFFDCMGEEDLINLGVIGTER

SEQ ID NO: 17645 - protein, 169 aa, Homo sapiens
MLPSTMFLVHLPLSTNRLHCLRNTSLESCLCSFVHLNHPLHISDPVILISLHEAVRFSFAFSFPRGTLSIAYCLMSSVSTSSEAIMSTELLANYCHSSLHVCICISSFPNETGNHDSFPGAVVSISDQPTDQCKLAAKELPLRNLLECRFFDCMGEEDLINLGVIGTER

SEQ ID NO: 17646 - protein, 133 aa, Homo sapiens
MGSSGLLSLLVLFVLLANVQGPGLTDWLFPRRCPKIREECEFQERDVCTKDRQCQDNKKCCVFSCGKKCLDLKQDVCEMPKETGPCLAYFLHWWYDKKDNTCSMFVYGGCQGNNNNFQSKANCLNTCKNKRFP

SEQ ID NO: 17647 - protein, 117 aa, Homo sapiens
MLSKAHGCKTALSLGRCPKIREECEFQERDVCTKDRQCQDNKKCCVFSCGKKCLDLKQDVCEMPKETGPCLAYFLHWWYDKKDNTCSMFVYGGCQGNNNNFQSKANCLNTCKNKRFP

SEQ ID NO: 17648 - protein, 179 aa, Homo sapiens
MGSSGLLSLLVLFVLLANVQGPGLTDWLFPRRCPKIREECEFQERDVCTKDRQCQDNKKCCVFSCGKKCLDLKQDVCEMPKETGPCLAYFLHWWYDKKDNTCSMFVYGGCQGNNNNFQSKANCLNTCKNKQPCPKIKVECEVEEIDQCTKPRDCPENMKCCPFSRGKKCLDFRKASLST

SEQ ID NO: 17649 - protein, 349 aa, Homo sapiens
MEAVKAEAWEGAAVAQDLLALGYGGVPGAASRGASCPDFRGLCVRLAAELATLGALEQQREAGAEVLSAGDGPGAEEDFLRQLGSLLRELHCPDRALCGGDGAAALREPGAGLRLLRFLCSELQATRLLCLRSLLDPSPRPPLGEGVVEGAGMVQELDLTLQALGLPRPAPGTPASQLLQELHAKISELQPSLPPGSLQPLLSCSLDAPRWEALESLSQSLRDQYRCRRCLLLKRLDLTTSAFHWSDRAEAQGEAMRAVLIPIREVLTPESDISIAHVLAARADLSCLVPATSVAVRRGTCCAINKVLMGNVPDRGGRPNELEPPMPTWRSRREDGGPQCWGRKKKKKK

SEQ ID NO: 17650 - protein, 267 aa, Homo sapiens
MEAVKAEAWEGAAVAQDLLALGYGGVPGAASRGASCPDFRGLCVRLAAELATLGALEQQREAGAEVLSAGDGPGAEEDFLRQLGSLLRELHCPDRALCGGDGAAALREPGAGLRLLRFLCSELQATRLLCLRSLLDPSPRPPLGEGVVEGAGMVQELDLTLQALGLPRPAPGTPASQLLQELHAKEALESLSQSLRDQYRCRRCLLLKRLDLTTSAFHWSDRAEVLMGNVPDRGGRPNELEPPMPTWRSRREDGGPQCWGRKKKKKK

SEQ ID NO: 17651 - protein, 122 aa, Homo sapiens
MSAEYGQRQQPGGRGGRSSGNKKSKKRCRRKESYSMYIYKVLKQVHPDIGISAKAMSIMNSFVNDVFEQLACEAARLAQYSGRTTLTSREVQTAVRLLLPGELAKHAVSEGTKAVTKYTSSK

SEQ ID NO: 17652 - protein, 579 aa, Homo sapiens
MVQYELWAALPGASGVALACCFVAAAVALRWSGRRTARGAVVRARQRQRAGLENMDRAAQRFRLQNPDLDSEALLALPLPQLVQKLHSRELAPEAVLFTYVGKAWEVNKGTNCVTSYLADCETQLSQAPRQGLLYGVPVSLKECFTYKGQDSTLGLSLNEGVPAECDSVVVHVLKLQGAVPFVHTNVPQSMFSYDCSNPLFGQTVNPWKSSKSPGGSSGGEGALIGSGGSPLGLGTDIGGSIRFPSSFCGICGLKPTGNRLSKSGLKGCVYGQEAVRLSVGPMARDVESLALCLRALLCEDMFRLDPTVPPLPFREEVYTSSQPLRVGYYETDNYTMPSPAMRRAVLETKQSLEAAGHTLVPFLPSNIPHALETLSTGGLFSDGGHTFLQNFKGDFVDPCLGDLVSILKLPQWLKGLLAFLVKPLLPRLSAFLSNMKSRSAGKLWELQHEIEVYRKTVIAQWRALDLDVVLTPMLAPALDLNAPGRATGAVSYTMLYNCLDFPAGVVPVTTVTAEDEAQMEHYRGYFGDIWDKMLQKGMKKSVGLPVAVQCVALPWQEELCLRFMREVERLMTPEKQSS

SEQ ID NO: 17653 - protein, 165 aa, Homo sapiens
MDAPRRDMELLSNSLAAYAHIRANPESFGLYFVLGVCFGLLLTLCLLVISISWAPRPRPRGPAQRRDPRSSTLEPEDDDEDEEDTVTRLGPDDTLPGPELSAEPDGPLNVNVFTSAEELERAQRLEERERILREIWRTGQPDLLGTGTLGPSPTATGTLGRMHYY

SEQ ID NO: 17654 - protein, 546 aa, Homo sapiens
MDPKAGGGGEEDDCVDSGAETGGSDYSHLSSTSSELSVEEAQDPFLVSIHIIADPGESQPLQEAIDNVLAWIHPDLPLFRVSERRASRRRRKPPKGAQPALAVVLFLQEEYGEEQILQLHRTLQQPPWRHHHTEQVHGRFLPYLPCSQDFFTLAPGTPLWAIRPVHYGKEIVRFTVYCRYDNYADSLRFYQLILRRSPSQKKADFCIFPIFSNLDVDIQFSLKRLPCDQCPVPTDSSVLEFRVRDIGELVPLLPNPCSPISEGRWQTEDHDGNKILLQAQRVHKKFPKPGRVHHASEKKRHSTPLPSTAVPSHTPGSSQQSPLNSPHPGPIRTGLPPGHQQEFAGRANSTPNPPWSFQRSKSLFCLPTGGPSLASSAEPQWFSNTGAPGHRASEWRHGHLLSIDDLEGAQETDVDTGLRLSSSDLSVVSAYSAPSRFCSTVETPLPSERCSSHWAAHKDSREGPLPTVSRVTTEASWASLPFFTKRSSSSSATARAAPPAPSTSTLTDSSPQLPCDTPKVKQTDGDMPPPPGSAGPGDNDMEEFYI

SEQ ID NO: 17655 - protein, 582 aa, Homo sapiens
MDPKAGGGGEEDDCVDSGAETGGSDYSHLSSTSNGFSTWRMPCCLFLYCTHGDKEKGRWSLQVEHTWPSGELSVEEAQDPFLVSIHIIADPGESQPLQEAIDNVLAWIHPDLPLFRVSERRASRRRRKPPKGAQPALAVVLFLQEEYGEEQILQLHRTLQQPPWRHHHTEQVHGRFLPYLPCSQDFFTLAPGTPLWAIRPVHYGKEIVRFTVYCRYDNYADSLRFYQLILRRSPSQKKADFCIFPIFSNLDVDIQFSLKRLPCDQCPVPTDSSVLEFRVRDIGELVPLLPNPCSPISEGRWQTEDHDGNKILLQAQRVHKKFPKPGRVHHASEKKRHSTPLPSTAVPSHTPGSSQQSPLNSPHPGPIRTGLPPGHQQEFAGRANSTPNPPWSFQRSKSLFCLPTGGPSLASSAEPQWFSNTGAPGHRASEWRHGHLLSIDDLEGAQETDVDTGLRLSSSDLSVVSAYSAPSRFCSTVETPLPSERCSSHWAAHKDSREGPLPTVSRVTTEASWASLPFFTKRSSSSSATARAAPPAPSTSTLTDSSPQLPCDTPKVKQTDGDMPPPPGSAGPGDNDMEEFYI

SEQ ID NO: 17656 - protein, 301 aa, Homo sapiens
MDPKAGGGGEEDDCVDSGAETGGSDYSHLSSTSSELSVEEAQDPFLVSIHIIADPGESQPLQEAIDNVLAWIHPDLPLFRVSERRASRRRRKPPKGAQPALAVVLFLQEEYGEEQILQLHRTLQQPPWRHHHTEQVHGRFLPYLPCSQDFFTLAPGTPLWAIRPVHYGKEIVRFTVYCRYDNYADSLRFYQLILRRSPSQKKADFCIFPIFSNLDVDIQFSLKRLPCDQCPVPTDSSVLEFRVRDIGELVPLLPNPCSPISEGRWQTEDHDGNKILLQVLGGRLSVCLGDLRNQLALPQTL

SEQ ID NO: 17657 - protein, 2120 aa, Homo sapiens
MRSFKRVNFGTLLSSQKEAEELLPALKEFLSNPPAGFPSSRSDAERRQACDAILRACNQQLTAKLACPRHLGSLLELAELACDGYLVSTPQRPPLYLERILFVLLRNAAAQGSPEATLRLAQPLHACLVQCSREAAPQDYEAVARGSFSLLWKGAEALLERRAAFAARLKALSFLVLLEDESTPCEVPHFASPTACRAVAAHQLFDASGHGLNEADADFLDDLLSRHVIRALVGERGSSSGLLSPQRALCLLELTLEHCRRFCWSRHHDKAISAVEKAHSYLRNTNLAPSLQLCQLGVKLLQVGEEGPQAVAKLLIKASAVLSKSMEAPSPPLRALYESCQFFLSGLERGTKRRYRLDAILSLFAFLGGYCSLLQQLRDDGVYGGSSKQQQSFLQMYFQGLHLYTVVVYDFAQGCQIVDLADLTQLVDSCKSTVVWMLEALEGLSGQELTDHMGMTASYTSNLAYSFYSHKLYAEACAISEPLCQHLGLVKPGTYPEVPPEKLHRCFRLQVESLKKLGKQAQGCKMVILWLAALQPCSPEHMAEPVTFWVRVKMDAARAGDKELQLKTLRDSLSGWDPETLALLLREELQAYKAVRADTGQERFNIICDLLELSPEETPAGAWARATHLVELAQVLCYHDFTQQTNCSALDAIREALQLLDSVRPEAQARDQLLDDKAQALLWLYICTLEAKMQEGIERDRRAQAPGNLEEFEVNDLNYEDKLQEDRFLYSNIAFNLAADAAQSKCLDQALALWKELLTKGQAPAVRCLQQTAASLQILAALYQLVAKPMQALEVLLLLRIVSERLKDHSKAAGSSCHITQLLLTLGCPSYAQLHLEEAASSLKHLDQTTDTYLLLSLTCDLLRSQLYWTHQKVTKGVSLLLSVLRDPALQKSSKAWYLLRVQVLQLVAAYLSLPSNNLSHSLWEQLCAQGWQTPEIALIDSHKLLRSIILLLMGSDILSTQKAAVETSFLDYGENLVQKWQVLSEVLSCSEKLVCHLGRLGSVSEAKAFCLEALKLTTKLQIPRQCALFLVLKGELELARNDIDLCQSDLQQVLFLLESCTEFGGVTQHLDSVKKVHLQKGKQQAQVPCPPQLPEEELFLRGPALELVATVAKEPGPIAPSTNSSPVLKTKPQPIPNFLSHSPTCDCSLCASPVLTAVCLRWVLVTAGVRLAMGHQAQGLDLLQVVLKGCPEAAERLTQALQASLNHKTPPSLVPSLLDEILAQAYTLLALEGLNQPSNESLQKVLQSGLKFVAARIPHLEPWRASLLLIWALTKLGGLSCCTTQLFASSWGWQPPLIKSVPGSEPSKTQGQKRSGRGRQKLASAPLRLNNTSQKGLEGRGLPCTPKPPDRIRQAGPHVPFTVFEEVCPTESKPEVPQAPRVQQRVQTRLKVNFSDDSDLEDPVSAEAWLAEEPKRRGTASRGRGRARKGLSLKTDAVVAPGSAPGNPGLNGRSRRAKKVASRHCEERRPQRASDQARPGPEIMRTIPEEELTDNWRKMSFEILRGSDGEDSASGGKTPAPGPEAASGEWELLRLDSSKKKLPSPCPDKESDKDLGPRLRLPSAPVATGLSTLDSICDSLSVAFRGISHCPPSGLYAHLCRFLALCLGHRDPYATAFLVTESVSITCRHQLLTHLHRQLSKAQKHRGSLEIADQLQGLSLQEMPGDVPLARIQRLFSFRALESGHFPQPEKESFQERLALIPSGVTVCVLALATLQPGTVGNTLLLTRLEKDSPPVSVQIPTGQNKLHLRSVLNEFDAIQKAQKENSSCTDKREWWTGRLALDHRMEVLIASLEKSVLGCWKGLLLPSSEEPGPAQEASRLQELLQDCGWKYPDRTLLKIMLSGAGALTPQDIQALAYGLCPTQPERAQELLNEAVGRLQGLTVPSNSHLVLVLDKDLQKLPWESMPSLQALPVTRLPSFRFLLSYSIIKEYGASPVLSQGVDPRSTFYVLNPHNNLSSTEEQFRANFSSEAGWRGVVGEVPRPEQVQEALTKHDLYIYAGHGAGARFLDGQAVLRLSCRAVALLFGCSSAALAVRGNLEGAGIVLKYIMAGCPLFLGNLWDVTDRDIDRYTEALLQGWLGAGPGAPLLYYVNQARQAPRLKYLIGAAPIAYGLPVSLR

SEQ ID NO: 17658 - protein, 1795 aa, Homo sapiens
MEAPSPPLRALYESCQFFLSGLERGTKRRYRLDAILSLFAFLGGYCSLLQQLRDDGVYGGSSKQQQSFLQMYFQGLHLYTVVVYDFAQGCQIVDLADLTQLVDSCKSTVVWMLEALEGLSGQELTDHMGMTASYTSNLAYSFYSHKLYAEACAISEPLCQHLGLVKPGTYPEVPPEKLHRCFRLQVESLKKLGKQAQGCKMVILWLAALQPCSPEHMAEPVTFWVRVKMDAARAGDKELQLKTLRDSLSGWDPETLALLLREELQAYKAVRADTGQERFNIICDLLELSPEETPAGAWARATHLVELAQVLCYHDFTQQTNCSALDAIREALQLLDSVRPEAQARDQLLDDKAQALLWLYICTLEAKMQEGIERDRRAQAPGNLEEFEVNDLNYEDKLQEDRFLYSNIAFNLAADAAQSKCLDQALALWKELLTKGQAPAVRCLQQTAASLQILAALYQLVAKPMQALEVLLLLRIVSERLKDHSKAAGSSCHITQLLLTLGCPSYAQLHLEEAASSLKHLDQTTDTYLLLSLTCDLLRSQLYWTHQKVTKGVSLLLSVLRDPALQKSSKAWYLLRVQVLQLVAAYLSLPSNNLSHSLWEQLCAQGWQTPEIALIDSHKLLRSIILLLMGSDILSTQKAAVETSFLDYGENLVQKWQVLSEVLSCSEKLVCHLGRLGSVSEAKAFCLEALKLTTKLQIPRQCALFLVLKGELELARNDIDLCQSDLQQVLFLLESCTEFGGVTQHLDSVKKVHLQKGKQQAQVPCPPQLPEEELFLRGPALELVATVAKEPGPIAPSTNSSPVLKTKPQPIPNFLSHSPTCDCSLCASPVLTAVCLRWVLVTAGVRLAMGHQAQGLDLLQVVLKGCPEAAERLTQALQASLNHKTPPSLVPSLLDEILAQAYTLLALEGLNQPSNESLQKVLQSGLKFVAARIPHLEPWRASLLLIWALTKLGGLSCCTTQLFASSWGWQPPLIKSVPGSEPSKTQGQKRSGRGRQKLASAPLRLNNTSQKGLEGRGLPCTPKPPDRIRQAGPHVPFTVFEEVCPTESKPEVPQAPRVQQRVQTRLKVNFSDDSDLEDPVSAEAWLAEEPKRRGTASRGRGRARKGLSLKTDAVVAPGSAPGNPGLNGRSRRAKKVASRHCEERRPQRASDQARPGPEIMRTIPEEELTDNWRKMSFEILRGSDGEDSASGGKTPAPGPEAASGEWELLRLDSSKKKLPSPCPDKESDKDLGPRLRLPSAPVATGLSTLDSICDSLSVAFRGISHCPPSGLYAHLCRFLALCLGHRDPYATAFLVTESVSITCRHQLLTHLHRQLSKAQKHRGSLEIADQLQGLSLQEMPGDVPLARIQRLFSFRALESGHFPQPEKESFQERLALIPSGVTVCVLALATLQPGTVGNTLLLTRLEKDSPPVSVQIPTGQNKLHLRSVLNEFDAIQKAQKENSSCTDKREWWTGRLALDHRMEVLIASLEKSVLGCWKGLLLPSSEEPGPAQEASRLQELLQDCGWKYPDRTLLKIMLSGAGALTPQDIQALAYGLCPTQPERAQELLNEAVGRLQGLTVPSNSHLVLVLDKDLQKLPWESMPSLQALPVTRLPSFRFLLSYSIIKEYGASPVLSQGVDPRSTFYVLNPHNNLSSTEEQFRANFSSEAGWRGVVGEVPRPEQVQEALTKHDLYIYAGHGAGARFLDGQAVLRLSCRAVALLFGCSSAALAVRGNLEGAGIVLKYIMAGCPLFLGNLWDVTDRDIDRYTEALLQGWLGAGPGAPLLYYVNQARQAPRLKYLIGAAPIAYGLPVSLR

SEQ ID NO: 17659 - protein, 527 aa, Homo sapiens
MLMLFVFGVLLHEVSLSGQNEAPPNTHSIPGEPLYNYASIRLPEEHIPFFLHNNRHIATVCRKDSLCPYKKHLEKLKYCWGYEKSCKPEFRFGYPVCSYVDMGWTDTLESAEDIFWKQADFGYARERLEEMHVLCQPKETSDSSLVCSRYLQYCRATNLYLDLRNIKRNHDRFKEDFFQSGEIGGHCKLDIRTLTSEGQRKSPLQSWFAELQSYTQLNFRPIEDAKCDIVIEKPTYFMKLDAGVNMYHHFCDFINLYITQHVNNSFSTDVYIVMWDTSSYGYGDLFSDTWNAFTDYDVIHLKTYDSKRVCFKEAVFSLLPRMRYGLFYNTPLISGCQNTGLFRAFAQHVLHRLNITQEGPKDGKIRVTILARSTEYRKILNQNELVNALKTVSTFEVQIVDYKYRELGFLDQLRITHNTDIFIGMHGAGLTHLLFLPDWAAVFELYNCEDERCYLDLARLRGVHYITWRRQNKVFPQDKGHHPTLGEHPKFTNYSFDVEEFMYLVLQAADHVLQHPKWPFKKKHDEL

SEQ ID NO: 17660 - protein, 208 aa, Homo sapiens
MLMLFVFGVLLHEVSLSGQNEAPPNTHSIPGEPLYNYASIRLPEEHIPFFLHNNRHIATVCRKDSLCPYKKHLEKLKYCWGYEKSCKPEFRFGYPVCSYVDMGWTDTLESAEDIFWKQADFGYARERLEEMHVLCQPKETSDSSLVCSRYLQYCRATNLYLDLRNIKRNHDRFKEDFFQSGEIGGHCKLDIRTLTSEGQRKSPLQSWC

SEQ ID NO: 17661 - protein, 443 aa, Homo sapiens
MLMLFVFGVLLHEVSLSGQNEAPPNTHSIPGEPLYNYASIRLPEEHIPFFLHNNRHIATVCRKDSLCPYKKHLEKLKYCWGYEKSCKPEFRFGYPVCSYVDMGWTDTLESAEDIFWKQADFGYARERLEEMHVLCQPKETSDSSLVCSRYLQYCRATNLYLDLRNIKRNHDRFKEDFFQSGEIGGHCKLDIRTLTSEGQRKSPLQSWFAELQSYTQLNFRPIEDAKCDIVIEKPTYFMKLDAGVNMYHHFCDFINLYITQHVNNSFSTDVYIVMWDTDGKIRVTILARSTEYRKILNQNELVNALKTVSTFEVQIVDYKYRELGFLDQLRITHNTDIFIGMHGAGLTHLLFLPDWAAVFELYNCEDERCYLDLARLRGVHYITWRRQNKVFPQDKGHHPTLGEHPKFTNYSFDVEEFMYLVLQAADHVLQHPKWPFKKKHDEL

SEQ ID NO: 17662 - protein, 344 aa, Homo sapiens
MHPKEGAEQHVFSPVPGAPTPPPNRCGRLVLGPRLPAAGTPGPGIRAAAARHALPLWGGGATRRGRRPAGAAGGGVAARAGALGAARCRPPEAGRHRGGRRGPGPAGAGPVARGGGAGGRGGGAGRGGAGPRGHVLVQVPEAGAGRRALLGRYCQQTPAPGAERELRPAPPTGASASGRPRRPRRRASRAFCPRPCALPGRPGLTLLCRPRCRRQPRLRLPTDSLDPYSAPGRLPAHSVACPSDLVSAHPVLSFFPTAPASRASALRLPPGAPFALRVPLDLRVPPFAGPLAARPRAADGFNSPTPPWLGFVSSFSCSNSLKKTQNDPTNETSVFANPRQQCAT

SEQ ID NO: 17663 - protein, 40 aa, Homo sapiens
MPGAFSQNSSKRRAVLPRSHRVAGRGPAEAGCLPGAPAGS

SEQ ID NO: 17664 - protein, 804 aa, Homo sapiens
MAENSESLGTVPEHERILQEIESTDTACVGPTLRSVYDDQPNAHKKFMEKLDACIRNHDKEIEKMCNFHHQGFVDAITELLKVRTDAEKLKVQVTDTNRRFQDAGKEVIVHTEDIIRCRIQQRNITTVVEKLQLCLPVLEMYSKLKEQMSAKRYYSALKTMEQLENVYFPWVSQYRFCQLMIENLPKLREDIKEISMSDLKDFLESIRKHSDKIGETAMKQAQHQKTFSVSLQKQNKMKFGKNMYINRDRIPEERNETVLKHSLEEEDENEEEILTVQDLVDFSPVYRCLHIYSVLGDEETFENYYRKQRKKQARLVLQPQSNMHETVDGYRRYFTQIVGFFVVEDHILHVTQGLVTRAYTDELWNMALSKIIAVLRAHSSYCTDPDLVLELKNLTVIFADTLQGYGFPVNRLFDLLFEIRDQYNETLLKKWAGVFRDIFEEDNYSPIPVVNEEEYKIVISKFPFQDPDLEKQSFPKKFPMSQSVPHIYIQVKEFIYASLKFSESLHRSSTEIDDMLRKSTNLLLTRTLSSCLLNLIRKPHIGLTELVQIIINTTHLEQACKYLEDFITNITNISQETVHTTRLYGLSTFKDARHAAEGEIYTKLNQKIDEFVQLADYDWTMSEPDGRASGYLMDLINFLRSIFQVFTHLPGKVAQTACMSACQHLSTSLMQMLLDSELKQISMGAVQQFNLDVIQCELFASSEPVPGFQGDTLQLAFIDLRQLLDLFMVWDWSTYLADYGQPASKYLRVNPNTALTLLEKMKDTSKKNNIFAQFRKNDRDKQKLIETVVKQLRSLVNGMSQHM

SEQ ID NO: 17665 - protein, 799 aa, Homo sapiens
MLEEETDQTYENVLAEIQSFELPVEATLRSVYDDQPNAHKKFMEKLDACIRNHDKEIEKMCNFHHQGFVDAITELLKVRTDAEKLKVQVTDTNRRFQDAGKEVIVHTEDIIRCRIQQRNITTVVEKLQLCLPVLEMYSKLKEQMSAKRYYSALKTMEQLENVYFPWVSQYRFCQLMIENLPKLREDIKEISMSDLKDFLESIRKHSDKIGETAMKQAQHQKTFSVSLQKQNKMKFGKNMYINRDRIPEERNETVLKHSLEEEDENEEEILTVQDLVDFSPVYRCLHIYSVLGDEETFENYYRKQRKKQARLVLQPQSNMHETVDGYRRYFTQIVGFFVVEDHILHVTQGLVTRAYTDELWNMALSKIIAVLRAHSSYCTDPDLVLELKNLTVIFADTLQGYGFPVNRLFDLLFEIRDQYNETLLKKWAGVFRDIFEEDNYSPIPVVNEEEYKIVISKFPFQDPDLEKQSFPKKFPMSQSVPHIYIQVKEFIYASLKFSESLHRSSTEIDDMLRKSTNLLLTRTLSSCLLNLIRKPHIGLTELVQIIINTTHLEQACKYLEDFITNITNISQETVHTTRLYGLSTFKDARHAAEGEIYTKLNQKIDEFVQLADYDWTMSEPDGRASGYLMDLINFLRSIFQVFTHLPGKVAQTACMSACQHLSTSLMQMLLDSELKQISMGAVQQFNLDVIQCELFASSEPVPGFQGDTLQLAFIDLRQLLDLFMVWDWSTYLADYGQPASKYLRVNPNTALTLLEKMKDTSKKNNIFAQFRKNDRDKQKLIETVVKQLRSLVNGMSQHM

SEQ ID NO: 17666 - protein, 696 aa, Homo sapiens
MSAENNQLSGASPPHPPTTPQYSTQNLPSEKEDTEVELDEESLQDESPFSPEGESLEDKEYLEEEEDLEEEEYLGKEEYLKEEEYLGKEEHLEEEEYLEKAGYLEEEEYIEEEEYLGKEGYLEEEEYLGKEEHLEEEEYLGKEGYLEKEDYIEEVDYLGKKAYLEEEEYLGKKSYLEEEKALEKEENLEEEEALEKEENLDGKENLYKKYLKEPKASYSSQTMLLRDARSPDAGPSQVTTFLTVPLTFATPSPVSESATESSELLLTLYRRSQASQTDWCYDRTAVKSLKSKSETEQETTTKLAPEEHVNTKVQQKKEENVLEFASKENFWDGITDESIDKLEVEDLDENFLNSSYQTVFKTIIKEMAAHNELEEDFDIPLTKLLESENRWKLVIMLKKNYEKFKETILRIKRRREAQKLTEMTSFTFHLMSKPTPEKPETEEIQKPQRVVHHRKKLERDKEWIQKKTVVHQGDGKLILYPNKNVYQILFPDGTGQIHYPSGNLAMLILYAKMKKFTYIILEDSLEGRIRALINNSGNATFYDENSDIWLNLSSNLGYYFPKDKRQKAWNWWNLNIHVHAPPVQPISLKINEYIQVQIRSQDKIIFCFTYEQKQICLNLGTRYKFVIPEVLSEMKKKTILEAEPGPTAQKIRVLLGKMNRLLNYATTPDLENFIEAVSISLMDNKYLKKMLSKLWF

SEQ ID NO: 17667 - protein, 690 aa, Homo sapiens
MSAENNQLSGASPPHPPTTPQYSTQNLPSEKEDTEVELDEESLQDESPFSPEGESLEDKEYLEEEEDLEEEEYLGKEEYLKEEEYLGKEEHLEEEEYLEKAGYLEEEEYIEEEEYLGKEGYLEEEEYLGKEEHLGKEGYLEKEDYIEEVDYLGKKAYLEEEEYLGKKSYLEEEKALEKEENLEEEEALEKEENLDGKENLYKKYLKEPKASYSSQTMLLRDARSPDAGPSQVTTFLTVPLTFATPSPVSESATESSELLLTLYRRSQASQTDWCYDRTAVKSLKSKSETEQETTTKLAPEEHVNTKVQQKKEENVLEFASKENFWDGITDESIDKLEVEDLDENFLNSSYQTVFKTIIKEMAAHNELEEDFDIPLTKLLESENRWKLVIMLKKNYEKFKETILRIKRRREAQKLTEMTSFTFHLMSKPTPEKPETEEIQKPQRVVHHRKKLERDKEWIQKKTVVHQGDGKLILYPNKNVYQILFPDGTGQIHYPSGNLAMLILYAKMKKFTYIILEDSLEGRIRALINNSGNATFYDENSDIWLNLSSNLGYYFPKDKRQKAWNWWNLNIHVHAPPVQPISLKINEYIQVQIRSQDKIIFCFTYEQKQICLNLGTRYKFVIPEVLSEMKKKTILEAEPGPTAQKIRVLLGKMNRLLNYATTPDLENFIEAVSISLMDNKYLKKMLSKLWF

SEQ ID NO: 17668 - protein, 1419 aa, Homo sapiens
MAEGLERVRISASELRGILATLAPQAGSRENMKELKEARPRKDNRRPDLEIYKPGLSRLRNKPKIKEPPGSEEFKDEIVNDRDCSAVENGTQPVKDVCKELNNQEQNGPIDPENNRGQESFPRTAGQEDRSLKIIKRTKKPDLQIYQPGRRLQTVSKESASRVEEEEVLNQVEQLRVEEDECRGNVAKEEVANKPDRAEIEKSPGGGRVGAAKGEKGKRMGKGEGVRETHDDPARGRPGSAKRYSRSDKRRNRYRTRSTSSAGSNNSAEGAGLTDNGCRRRRQDRTKERPRLKKQVSVSSTDSLDEDRIDEPDGLGPRRSSERKRHLERNWSGRGEGEQKNSAKEYRGTLRVTFDAEAMNKESPMVRSARDDMDRGKPDKGLSSGGKGSEKQESKNPKQELRGRGRGILILPAHTTLSVNSAGSPESAPLGPRLLFGSGSKGSRSWGRGGTTRRLWDPNNPDQKPALKTQTPQLHFLDTDDEVSPTSWGDSRQAQASYYKFQNSDNPYYYPRTPGPASQYPYTGYNPLQYPVGPTNGVYPGPYYPGYPTPSGQYVCSPLPTSTMSPEEVEQHMRNLQQQELHRLLRVADNQELQLSNLLSRDRISPEGLEKMAQLRAELLQLYERCILLDIEFSDNQNVDQILWKNAFYQVIEKFRQLVKDPNVENPEQIRNRLLELLDEGSDFFDSLLQKLQVTYKFKLEDYMDGLAIRSKPLRKTVKYALISAQRCMICQGDIARYREQASDTANYGKARSWYLKAQHIAPKNGRPYNQLALLAVYTRRKLDAVYYYMRSLAASNPILTAKESLMSLFEETKRKAEQMEKKQHEEFDLSPDQWRKGKKSTFRHVGDDTTRLEIWIHPSHPRSSQGTESGKDSEQENGLGSLSPSDLNKRFILSFLHAHGKLFTRIGMETFPAVAEKVLKEFQVLLQHSPSPIGSTRMLQLMTINMFAVHNSQLKDCFSEECRSVIQEQAAALGLAMFSLLVRRCTCLLKESAKAQLSSPEDQDDQDDIKVSSFVPDLKELLPSVKVWSDWMLGYPDTWNPPPTSLDLPSHVAVDVWSTLADFCNILTAVNQSEVPLYKDPDDDLTLLILEEDRLLSGFVPLLAAPQDPCYVEKTSDKVIAADCKRVTVLKYFLEALCGQEEPLLAFKGGKYVSVAPVPDTMGKEMGSQEGTRLEDEEEDVVIEDFEEDSEAEGSGGEDDIRELRAKKLALARKIAEQQRRQEKIQAVLEDHSQMRQMELEIRPLFLVPDTNGFIDHLASLARLLESRKYILVVPLIVINELDGLAKGQETDHRAGGYARVVQEKARKSIEFLEQRFESRDSCLRALTSRGNELESIAFRSEDITGQLGNNDDLILSCCLHYCKDKAKDFMPASKEEPIRLLREVVLLTDDRNLRVKALTRNVPVRDIPAFLTWAQVG

SEQ ID NO: 17669 - protein, 330 aa, Homo sapiens
MRFRLCHQRGCCPHERENTCTCKMIISSLQVIAADCKRVTVLKYFLEALCGQEEPLLAFKGGKYVSVAPVPDTMGKEMGSQEGTRLEDEEEDVVIEDFEEDSEAEGSGGEDDIRELRAKKLALARKIAEQQRRQEKIQAVLEDHSQMRQMELEIRPLFLVPDTNGFIDHLASLARLLESRKYILVVPLIVINELDGLAKGQETDHRAGGYARVVQEKARKSIEFLEQRFESRDSCLRALTSRGNELESIAFRSEDITGQLGNNDDLILSCCLHYCKDKAKDFMPASKEEPIRLLREVVLLTDDRNLRVKALTRNVPVRDIPAFLTWAQVG

SEQ ID NO: 17670 - protein, 511 aa, Homo sapiens
METFPAVAEKVLKEFQVLLQHSPSPIGSTRMLQLMTINMFAVHNSQLKDCFSEECRSVIQEQAAALGLAMFSLLVRRCTCLLKESAKAQLSSPEDQDDQDDIKVSSFVPDLKELLPSVKVWSDWMLGYPDTWNPPPTSLDLPSHVAVDVWSTLADFCNILTAVNQSEVPLYKDPDDDLTLLILEEDRLLSGFVPLLAAPQDPCYVEKTSDKVIAADCKRVTVLKYFLEALCGQEEPLLAFKGGKYVSVAPVPDTMGKEMGSQEGTRLEDEEEDVVIEDFEEDSEAEGSGGEDDIRELRAKKLALARKIAEQQRRQEKIQAVLEDHSQMRQMELEIRPLFLVPDTNGFIDHLASLARLLESRKYILVVPLIVINELDGLAKGQETDHRAGGYARVVQEKARKSIEFLEQRFESRDSCLRALTSRGNELESIAFRSEDITGQLGNNDDLILSCCLHYCKDKAKDFMPASKEEPIRLLREVVLLTDDRNLRVKALTRNVPVRDIPAFLTWAQVG

SEQ ID NO: 17671 - protein, 904 aa, Homo sapiens
MEWGSESAAVRRHRVGVERREGAAAAPPPEREARAQEPLVDGCSGGGRTRKRSPGGSGGASRGAGTGLSEVRAALGLALYLIALRTLVQLSLQQLVLRGAAGHRGEFDALQARDYLEHITSIGPRTTGSPENEILTVHYLLEQIKLIEVQSNSLHKISVDVQRPTGSFSIDFLGGFTSYYDNITNVVVKLEPRDGAQHAVLANCHFDSVANSPGASDDAVSCSVMLEVLRVLSTSSEALHHAVIFLFNGAEENVLQASHGFITQHPWASLIRAFINLEAAGVGGKELVFQTGPENPWLVQAYVSAAKHPFASVVAQEVFQSGIIPSDTDFRIYRDFGNIPGIDLAFIENGYIYHTKYDTADRILTDSIQRAGDNILAVLKHLATSDMLAAASKYRHGNMVFFDVLGLFVIAYPSRIGSIINYMVVMGVVLYLGKKFLQPKHKTGNYKKDFLCGLGITLISWFTSLVTVLIIAVFISLIGQSLSWYNHFYVSVCLYGTATVAKIILIHTLAKRFYYMNASAQYLGEVFFDISLFVHCCFLVTLTYQGLCSAFISAVWVAFPLLTKLCVHKDFKQHGAQGKFIAFYLLGMFIPYLYALYLIWAVFEMFTPILGRSGSEIPPDVVLASILAGCTMILSSYFINFIYLAKSTKKTMLTLTLVCAITFLLVCSGTFFPYSSNPANPKPKRVFLQHMTRTFHDLEGNAVKRDSGIWINGFDYTGISHITPHIPEINDSIRAHCEENAPLCGFPWYLPVHFLIRKNWYLPAPEVSPRNPPHFRLISKEQTPWDSIKLTFEATGPSHMSFYVRAHKGSTLSQWSLGNGTPVTSKGGDYFVFYSHGLQASAWQFWIEVQVSEEHPEGMVTVAIAAHYLSGEDKRSPQLDALKEKFPDWTFPSAWVCTYDLFVF

SEQ ID NO: 17672 - protein, 351 aa, Homo sapiens
MLEVLRVLSTSSEALHHAVIFLFNGAEENVLQASHGFITQHPWASLIRAFINLEAAGVGGKELVFQTGPENPWLVQAYVSAAKHPFASVVAQEVFQSGIIPSDTDFRIYRDFGNIPGIDLAFIENGYIYHTKYDTADRILTDSIQRAGDNILAVLKHLATSDMLAAASKYRHGNMVFFDVLGLFVIAYPSRIGSIINYMVVMGVVLYLGKKFLQPKHKTGNYKKDFLCGLGITLISWFTSLVTVLIIAVFISLIGQSLSWYNHFYVSVCLYGTATVAKIILIHTLAKRFYYMNASAQYLGEVFFDISLFVHCCFLVTLTYQGLCSAFISAVWVAFPLLTKLCVHKDFKQHG

SEQ ID NO: 17673 - protein, 245 aa, Homo sapiens
MAGLELLSDQGYRVDGRRAGELRKIQARMGVFAQADGSAYIEQGNTKALAVVYGPHEIRGSRARALPDRALVNCQYSSATFSTGERKRRPHGDRKSCEMGLQLRQTFEAAILTQLHPRSQIDIYVQVLQADGGTYAACVNAATLAVLDAGIPMRDFVCACSAGFVDGTALADLSHVEEAAGGPQLALALLPASGQIALLEMDARLHEDHLERVLEAAAQAARDVHTLLDRVVRQHVREASILLGD

SEQ ID NO: 17674 - protein, 1133 aa, Homo sapiens
MAPKTKKGCKVTLPEKPVKLASHTRDTTGVSQMFPSSKARTKSLLGDDVFSTMAGLEEADAEVSGISEADPQALLQAMKDLDGMDADILGLKKSNSAPSKKAAKDPGKGELPNHPKPAGGAIPTKKSLPSPSSSGHQNRRFSSEDLEDPLRGLLSYDEGGITKQPPVTQSKTASDKSPSTVRDQGPSIPLTPGDTPIRKKEELLFDDGDDIMATLGFGDSPKAEKRQIGDQEGPRPARSTLDELLGRGMATKLLARPGTGEHREFKLDKKYQRPQDSEDMWGDEDFTFGAYQPTVVSSEGRQSRRQSVSRFFADSGADPKGEPGSKQSPPMASSPIQPRKGGADWLGLKDEDLDLFPASPTREAHRESSVPVTPSVPPPASQHSTPAGLPPSRAKPPTEGAGSPAKASQASKLRASKEEKEDWLSHALSRKKSQGLAREQHAGTSEGLHLAGTAGHPPSGSQPLTSTQGLEHAAAGGSSGTTARERPCVRPGVSGSPVTQNHAASALPTGSPKRGTAPGDLSATEPATCFPSTQKPTEPSVPVQPLLPESLARSLLPSTEYQKQLLAAQVQLQCSPAELQAELLHSQARLAELEAQVRKLELERAQHELLLGSLQQQHQADLELIESAHRSRIKVLETSYQQREERLRRENEELSARYLSQCQEAEQARAELTAQHQRRLAAIAQEKDQEMERLRELQRASILDMRRDHEEQLQRLKLLKDREVDAATSATSHTRSLNSIIHQMEKFSSSLHELSSRVEASHLTTSQERELGIRQRDEQLRALQERLGQQQRDMEEERSRQQEVIGKMEARLNEQSRLLEQERWRVTAEQSKAESMQRALEEQRKVTAQQMAMERAELERAKSALLEEQKSVMLKCGEERRRLAAEWAEFSAQQKLSKERAEREAERALQVDTQREGTLISLAKQAELKIRASELRAEEKQLAAERAALEQERQELRLEKERINATALRVKLRAEEVESMSKVASEKYEEGERALREAQQVQAEQQARLQAVQQQQERLRKQEQHMHQEHLSLAQQRLQLDRARQDLPSSLVGLFPRAQGPAASSQSALMPPAPTTRWCSQPPTGLDPSPLHLHARLALLRHMAEQDRDFLENEQFFLETLKKGSYNLTSHSA

SEQ ID NO: 17675 - protein, 899 aa, Homo sapiens
MAPKTKKGCKVTLPEKPVKLASHTRDTTGVSQMFPSSKARTKSLLGDDVFSTMAGLEEADAEVSGISEADPQALLQAMKDLDGMDADILGLKKSNSAPSKKAAKDPGKGELPNHPKPAGGAIPTKKSLPSPSSSGHQNRRFSSEDLEDPLRGLLSYDEGGITKQPPVTQSKTASDKSPSTVRDQGPSIPLTPGDTPIRKKEELLFDDGDDIMATLGFGDSPKAEKRQIGDQEGPRPARSTLDELLGRGMATKLLARPGTGEHREFKLDKKYQRPQDSEDMWGDEDFTFGAYQPTVVSSEGRQSRRQSVSRFFADSGADPKGEPGSKQSPPMASSPIQPRKGGADWLGLKDEDLDLFPASPTREAHRESSVPVTPSVPPPASQHSTPAGLPPSRAKPPTEGAGSPAKASQASKLRASKEEKEDWLSHALSRKKSQGLAREQHAGTSEGLHLAGTAGHPPSGSQPLTSTQGLEHAAAGGSSGTTARERPCVRPGVSGSPVTQNHAASALPTGSPKRGTAPGDLSATEPATCFPSTQKPTEPSVPVQPLLPESLARSLLPSTEYQKQLLAAQVQLQCSPAELQAELLHSQARLAELEAQVRKLELERAQHELLLGSLQQQHQADLELIESAHRSRIKVLETSYQQREERLRRENEELSARYLSQCQEAEQARAELTAQHQRRLAAIAQEKDQEMERLRELQRASILDMRRDHEEQLQRLKLLKDREVDAATSATSHTRSLNSIIHQMEKFSSSLHELSSRVEASHLTTSQERELGIRQRDEQLRALQERLGQQQRDMEEERSRQQEVIGKMEARLNEQSRLLEQERWRVTAEQSKAESMQRALEEQRKVTAQQMAMERAELERAKSALLEEQKSVMLKCGEERRRLAAEWAEFSAQQKLRAG

SEQ ID NO: 17676 - protein, 662 aa, Homo sapiens
MAPKTKKGCKVTLPEKPVKLASHTRDTTGVSQMFPSSKARTKSLLGDDVFSTMAGLEEADAEVSGISEADPQALLQAMKDLDGMDADILGLKKSNSAPSKKAAKDPGKGELPNHPKPAGGAIPTKKSLPSPSSSGHQNRRFSSEDLEDPLRGLLSYDEGGITKQPPVTQSKTASDKSPSTVRDQGPSIPLTPGDTPIRKKEELLFDDGDDIMATLGFGDSPKAEKRQIGDQEGPRPARSTLDELLGRGMATKLLARPGTGEHREFKLDKKYQRPQDSEDMWGDEDFTFGAYQPTVVSSEGRQSRRQSVSRFFADSGADPKGEPGSKQSPPMASSPIQPRKGGADWLGLKDEDLDLFPASPTREAHRESSVPVTPSVPPPASQHSTPAGLPPSRAKPPTEGAGSPAKASQASKLRASKEEKEDWLSHALSRKKSQGLAREQHAGTSEGLHLAGTAGHPPSGSQPLTSTQGLEHAAAGGSSGTTARERPCVRPGVSGSPVTQNHAASALPTGSPKRGTAPGDLSATEPATCFPSTQKPTEPSVPVQPLLPESLARSLLPSTEYQKQLLAAQVQLQCSPAELQAELLHSQARLAELEAQVRGSGAVGAGGRVATGGDTESGWKLPQEGGRAVGTGQRGVQPPPLPGCWPSCCLPGAEAGARTGPA

SEQ ID NO: 17677 - protein, 514 aa, Homo sapiens
MAPKTKKGCKVTLPEKPVKLASHTRDTTGVSQMFPSSKARTKSLLGDDVFSTMAGLEEADAEVSGISEADPQALLQAMKDLDGMDADILGLKKSNSAPSKKAAKDPGKGELPNHPKPAGGAIPTKKSLPSPSSSGHQNRRFSSEDLEDPLRGLLSYDEGGITKQPPVTQSKTASDKSPSTVRDQGPSIPLTPGDTPIRKKEELLFDDGDDIMATLGFGDSPKAEKRQIGDQEGPRPARSTLDELLGRGMATKLLARPGTGEHREFKLDKKYQRPQDSEDMWGDEDFTFGAYQPTVVSSEGRQSRRQSVSRFFADSGADPKGEPGSKQSPPMASSPIQPRKGGADWLGLKDEDLDLFPASPTREAHRESSVPVTPSVPPPASQHSTPAGLPPSRAKPPTEGAGSPAKASQASKLRASKEEKEDWLSHALSRKKSQGLAREQHAGTSEGLHLAGTAGHPPSGSLTWAFCHLHLERCLSSANLSPAHKGLSTQLLEGVLEQLHEKDRVSGLVSRGPL

SEQ ID NO: 17678 - protein, 1133 aa, Homo sapiens
MAPKTKKGCKVTLPEKPVKLASHTRDTTGVSQMFPSSKARTKSLLGDDVFSTMAGLEEADAEVSGISEADPQALLQAMKDLDGMDADILGLKKSNSAPSKKAAKDPGKGELPNHPKPAGGAIPTKKSLPSPSSSGHQNRRFSSEDLEDPLRGLLSYDEGGITKQPPVTQSKTASDKSPSTVRDQGPSIPLTPGDTPIRKKEELLFDDGDDIMATLGFGDSPKAEKRQIGDQEGPRPARSTLDELLGRGMATKLLARPGTGEHREFKLDKKYQRPQDSEDMWGDEDFTFGAYQPTVVSSEGRQSRRQSVRFFADSGADPKGEPGSKQSPPMASSPIQPRKGGADWLGLKDEDLDLFPASPTREAHRESSVPVTPSVPPPASQHSTPAGLPPSRAKPPTEGAGSPAKASQASKLRASKEEKEDWLSHALSRKKSQGLAREQHAGTSEGLHLAGTAGHPPSGSQPLTSTQGLEHAAAGGSSGTTARERPCVRPGVSGSPVTQNHAASALPTGSPKRGTAPGDLSATEPATCFPSTQKPTEPSVPVQPLLPESLARSLLPSTEYQKQLLAAQVQLQCSPAELQAELLHSQARLAELEAQVRKLELERAQHELLLGSLQQQHQADLELIESAHRSRIKVLETSYQQREERLRRENEELSARYLSQCQEAEQARAELTAQHQRRLAAIAQEKDQEMERLRELQRASILDMRRDHEEQLQRLKLLKDREVDAATSATSHTRSLNSIIHQMEKFSSSLHELSSRVEASHLTTSQERELGIRQRDEQLRALQERLGQQQRDMEEERSRQQEVIGKMEARLNEQSRLLEQERWRVTAEQSKAESMQRALEEQRKVTAQQMAMERAELERAKSALLEEQKSVMLKCGEERRRLAAEWAEFSAQQKLSKERAEREAERALQVDTQREGTLISLAKEQAELKIRASELRAEEKQLAAERAALEQERQELRLEKERINATALRVKLRAEEVESMSKVASEKYEEGERALREAQQVQAEQQARLQAVQQQQERLRKQEQHMHQEHLSLAQQRLQLDRARQDLPSSLVGLFPRAQGPAASSQSALMPPAPTTRWCSQPPTGLDPSPLHLHARLALLRHMAEQDRDFLENEQFFLETLKKGSYNLTSHSA

SEQ ID NO: 17679 - protein, 1148 aa, Homo sapiens
MAPKTKKGCKGSIDDFLGDLLGDDMTLPEKPVKLASHTRDTTGVSQMFPSSKARTKSLLGDDVFSTMAGLEEADAEVSGISEADPQALLQAMKDLDGMDADILGLKKSNSAPSKKAAKDPGKGELPNHPKPAGGAIPTKKSLPSPSSSGHQNRRFSSEDLEDPLRGLLSYDEGGITKQPPVTQSKTASDKSPSTVRDQGPSIPLTPGDTPIRKKEELLFDDGDDIMATLGFGDSPKAEKRQIGDQEGPRPARSTLDELLGRGMATKLLARPGTGEHREFKLDKKYQRPQDSEDMWGDEDFTFGAYQPTVVSSEGRQSRRQSVSRFFADSGADPKGEPGSKQSPPMASSPIQPRKGGADWLGLKDEDLDLFPASPTREAHRESSVPVTPSVPPPASQHSTPAGLPPSRAKPPTEGAGSPAKASQASKLRASKEEKEDWLSHALSRKKSQGLAREQHAGTSEGLHLAGTAGHPPSGSQPLTSTQGLEHAAAGGSSGTTARERPCVRPGVSGSPVTQNHAASALPTGSPKRGTAPGDLSATEPATCFPSTQKPTEPSVPVQPLLPESLARSLLPSTEYQKQLLAAQVQLQCSPAELQAELLHSQARLAELEAQVRKLELERAQHELLLGSLQQQHQADLELIESAHRSRIKVLETSYQQREERLRRENEELSARYLSQCQEAEQARAELTAQHQRRLAAIAQEKDQEMERLRELQRASILDMRRDHEEQLQRLKLLKDREVDAATSATSHTRSLNSIIHQMEKFSSSLHELSSRVEASHLTTSQERELGIRQRDEQLRALQERLGQQQRDMEEERSRQQEVIGKMEARLNEQSRLLEQERWRVTAEQSKAESMQRALEEQRKVTAQQMAMERAELERAKSALLEEQKSVMLKCGEERRRLAAEWAEFSAQQKLSKERAEREAERALQVDTQREGTLISLAKEQAELKIRASELRAEEKQLAAERAALEQERQELRLEKERINATALRVKLRAEEVESMSKVASEKYEEGERALREAQQVQAEQQARLQAVQQQQERLRKQEQHMHQEHLSLAQQRLQLDRARQDLPSSLVGLFPRAQGPAASSQSALMPPAPTTRWCSQPPTGLDPSPLHLHARLALLRHMAEQDRDFLENEQFFLETLKKGSYNLTSHSA

SEQ ID NO: 17680 - protein, 1043 aa, Homo sapiens
MRRFKRKHLTAIDCQHLARSHLAVTQPFGQRWTNRDPNHGLYPKPRTKRGSRGQGSQRCIPEFFLAGKQPCTNDMAKSNSVGQDSCQDSEGDMIFPAESSCALPQEGSAGPGSPGSAPPSRKRSWSSEEESNQATGTSRWDGVSKKAPRHHLSVPCTRPREARQEAEDSTSRLSAESGETDQDAGDVGPDPIPDSYYGLLGTLPCQEALSHICSLPSEVLRHVFAFLPVEDLYWNLSLVCHLWREIISDPLFIPWKKLYHRYLMNEEQAVSKVDGILSNCGIEKESDLCVLNLIRYTATTKCSPSVDPERVLWSLRDHPLLPEAEACVRQHLPDLYAAAGGVNIWALVAAVVLLSSSVNDIQRLLFCLRRPSSTVTMPDVTETLYCIAVLLYAMREKGINISNRIHYNIFYCLYLQENSCTQATKVKEEPSVWPGKKTIQLTHEQQLILNHKMEPLQVVKIMAFAGTGKTSTLVKYAEKWSQSRFLYVTFNKSIAKQAERVFPSNVICKTFHSMAYGHIGRKYQSKKKLNLFKLTPFMVNSVLAEGKGGFIRAKLVCKTLENFFASADEELTIDHVPIWCKNSQGQRVMVEQSEKLNGVLEASRLWDNMRKLGECTEEAHQMTHDGYLKLWQLSKPSLASFDAIFVDEAQDCTPAIMNIVLSQPCGKIFVGDPHQQIYTFRGAVNALFTVPHTHVFYLTQSFRFGVEIAYVGATILDVCKRVRKKTLVGGNHQSGIRGDAKGQVALLSRTNANVFDEAVRVTEGEFPSRIHLIGGIKSFGLDRIIDIWILLQPEEERRKQNLVIKDKFIRRWVHKEGFSGFKRYVTAAEDKELEAKIAVVEKYNIRIPELVQRIEKCHIEDLDFAEYILGTVHKAKGLEFDTVHVLDDFVKVPCARHNLPQLPHFRVESFSEDEWNLLYVAVTRAKKRLIMTKSLENILTLAGEYFLQAELTSNVLKTGVVRCCVGQCNNAIPVDTVLTMKKLPITYSNRKENKGGYLCHSCAEQRIGPLAFLTASPEQVRAMERTVENIVLPRHEALLFLVF

SEQ ID NO: 17681 - protein, 1094 aa, Homo sapiens
MSYEVTSGCHWTCQVPESCDNGLHCAGPLGHLHRRCQRTSAHLLVFTEHAEMRRFKRKHLTAIDCQHLARSHLAVTQPFGQRWTNRDPNHGLYPKPRTKRGSRGQGSQRCIPEFFLAGKQPCTNDMAKSNSVGQDSCQDSEGDMIFPAESSCALPQEGSAGPGSPGSAPPSRKRSWSSEEESNQATGTSRWDGVSKKAPRHHLSVPCTRPREARQEAEDSTSRLSAESGETDQDAGDVGPDPIPDSYYGLLGTLPCQEALSHICSLPSEVLRHVFAFLPVEDLYWNLSLVCHLWREIISDPLFIPWKKLYHRYLMNEEQAVSKVDGILSNCGIEKESDLCVLNLIRYTATTKCSPSVDPERVLWSLRDHPLLPEAEACVRQHLPDLYAAAGGVNIWALVAAVVLLSSSVNDIQRLLFCLRRPSSTVTMPDVTETLYCIAVLLYAMREKGINISNRIHYNIFYCLYLQENSCTQATKVKEEPSVWPGKKTIQLTHEQQLILNHKMEPLQVVKIMAFAGTGKTSTLVKYAEKWSQSRFLYVTFNKSIAKQAERVFPSNVICKTFHSMAYGHIGRKYQSKKKLNLFKLTPFMVNSVLAEGKGGFIRAKLVCKTLENFFASADEELTIDHVPIWCKNSQGQRVMVEQSEKLNGVLEASRLWDNMRKLGECTEEAHQMTHDGYLKLWQLSKPSLASFDAIFVDEAQDCTPAIMNIVLSQPCGKIFVGDPHQQIYTFRGAVNALFTVPHTHVFYLTQSFRFGVEIAYVGATILDVCKRVRKKTLVGGNHQSGIRGDAKGQVALLSRTNANVFDEAVRVTEGEFPSRIHLIGGIKSFGLDRIIDIWILLQPEEERRKQNLVIKDKFIRRWVHKEGFSGFKRYVTAAEDKELEAKIAVVEKYNIRIPELVQRIEKCHIEDLDFAEYILGTVHKAKGLEFDTVHVLDDFVKVPCARHNLPQLPHFRVESFSEDEWNLLYVAVTRAKKRLIMTKSLENILTLAGEYFLQAELTSNVLKTGVVRCCVGQCNNAIPVDTVLTMKKLPITYSNRKENKGGYLCHSCAEQRIGPLAFLTASPEQVRAMERTVENIVLPRHEALLFLVF

SEQ ID NO: 17682 - protein, 669 aa, Homo sapiens
MDLRTAVYNAARDGKLQLLQKLLSGRSREELDELTGEVAGGGTPLLIAARYGHLDVVEYLVDRCGASVEAGGSVHFDGETIEGAPPLWAASAAGHLDVVRSLLRRGASVNRTTRTNSTPLRAACFDGHLEVVRYLVGEHQADLEVANRHGHTCLMISCYKGHREIARYLLEQGAQVNRRSAKGNTALHDCAESGSLEILQLLLGCKARMERDGYGMTPLLAASVTGHTNIVEYLIQEQPGQEQVAGGEAQPGLPQEDPSTSQGCAQPQGAPCCSSSPEEPLNGESYESCCPTSREAAVEALELLGATYVDKKRDLLGALKHWRRAMELRHQGGEYLPKPEPPQLVLAYDYSREVNTTEELEALITDPDEMRMQALLIRERILGPSHPDTSYYIRYRGAVYADSGNFERCIRLWKYALDMQQSNLEPLSPMTASSFLSFAELFSYVLQDRAAKGSLGTQIGFADLMGVLTKGVREVERALQLPREPGDSAQFTKALAIILHLLYLLEKVECTPSQEHLKHQTVYRLLKCAPRGKNGFTPLHMAVDKDTTNVGRYPVGRFPSLHVVKVLLDCGADPDSRDFDNNTPLHIAAQNNCPAIMNALIEAGAHMDATNAFKKTAYELLDEKLLARGTMQPFNYVTLQCLAARALDKNKIPYKGFIPEDLEAFIELH

SEQ ID NO: 17683 - protein, 604 aa, Homo sapiens
MARISFSYLCPASWYFTVPTVSPFLRQRVAFLGLFFISCLLLLMLIIDFRHWSASLPRDRQYERYLARVGELEATDTEDPNLNYGLVVDCGSSGSRIFVYFWPRHNGNPHDLLDIKQMRDRNSQPVVKKIKPGISAMADTPEHASDYLRPLLSFAAAHVPVKKHKETPLYILCTAGMRLLPERKQLAILADLVKDLPLEFDFLFSQSQAEVISGKQEGVYAWIGINFVLGRFDHEDESDAEATQELAAGRRRTVGILDMGGASLQIAYEVPTSTSVLPAKQEEAAKILLAEFNLGCDVQHTEHVYRVYVTTFLGFGGNFARQRYEDLVLNETLNKNRLLGQKTGLSPDNPFLDPCLPVGLTDVVERNSQVLHVRGRGDWVSCGAMLSPLLARSNTSQASLNGIYQSPIDFNNSEFYGFSEFFYCTEDVLRIGGRYHGPTFAKAAQDYCGMAWSVLTQRFKNGLFSSHADEHRLKYQCFKSAWMYQVLHEGFHFPYDYPNLRTAQLVYDREVQWTLGAILYKTRFLPLRDLRQEGVRQAHGSWFRLSFVYNHYLFFACILVVLLAIFLYLLRLRRIHHRQTRASAPLDLLWLEEVVPMMGVQVGP

SEQ ID NO: 17684 - protein, 617 aa, Homo sapiens
MDLKTAVFNAARDGKLRLLTKLLASKSKEEVSSLISEKTNGATPLLMAARYGHLDMVEFLLEQCSASIEVGGSVNFDGETIEGAPPLWAASAAGHLKVVQSLLNHGASVNNTTLTNSTPLRAACFDGHLEIVKYLVEHKADLEVSNRHGHTCLMISCYKGHKEIAQYLLEKGADVNRKSVKGNTALHDCAESGSLDIMKMLLMYCAKMEKDGYGMTPLLSASVTGHTNIVDFLTHHAQTSKTERINALELLGATFVDKKRDLLGALKYWKKAMNMRYSDRTNIISKPVPQTLIMAYDYAKEVNSAEELEGLIADPDEMRMQALLIRERILGPSHPDTSYYIRYRGAVYADSGNFKRCINLWKYALDMQQSNLDPLSPMTASSLLSFAELFSFMLQDRAKGLLGTTVTFDDLMGILCKSVLEIERAIKQTQCPADPLQLNKALSIILHLICLLEKVPCTLEQDHFKKQTIYRFLKLHPRGKNNFSPLHLAVDKNTTCVGRYPVCKFPSLQVTAILIECGADVNVRDSDDNSPLHIAALNNHPDIMNLLIKSGAHFDATNLHKQTASDLLDEKEIAKNLIQPINHTTLQCLAARVIVNHRIYYKGHIPEKLETFVSLHR

SEQ ID NO: 17685 - protein, 235 aa, Homo sapiens
MTVLAPAWSPTTYLLLLLLLSSGLSGTQDCSFQHSPISSDFAVKIRELSDYLLQDYPVTVASNLQDEELCGGLWRLVLAQRWMERLKTVAGSKMQGLLERVNTEIHFVTKCAFQPPPSCLRFVQTNISRLLQETSEQLVALKPWITRQNFSRCLELQCQPDSSTLPPPWSPRPLEATAPTAPQPPLLLLLLLPVGLLLLAAAWCLHWQRTRRRTPRPGEQVPPVPSPQDLLLVEH

SEQ ID NO: 17686 - protein, 178 aa, Homo sapiens
MTVLAPAWSPTTYLLLLLLLSSGLSGTQDCSFQHSPISSDFAVKIRELSDYLLQDYPVTVASNLQDEELCGGLWRLVLAQRWMERLKTVAGSKMQGLLERVNTEIHFVTKCAFQPPPSCLRFVQTNISRLLQETSEQLVALKPWITRQNFSRCLELQCQPVETVFHRVSQDGLDLLTS

SEQ ID NO: 17687 - protein, 153 aa, Homo sapiens
MERLKTVAGSKMQGLLERVNTEIHFVTKCAFQPPPSCLRFVQTNISRLLQETSEQLVALKPWITRQNFSRCLELQCQPDSSTLPPPWSPRPLEATAPTAPQPPLLLLLLLPVGLLLLAAAWCLHWQRTRRRTPRPGEQVPPVPSPQDLLLVEH

SEQ ID NO: 17688 - protein, 956 aa, Homo sapiens
MEAGGLPLELWRMILAYLHLPDLGRCSLVCRAWYELILSLDSTRWRQLCLGCTECRHPNWPNQPDVEPESWREAFKQHYLASKTWTKNALDLESSICFSLFRRRRERRTLSVGPGREFDSLGSALAMASLYDRIVLFPGVYEEQGEIILKVPVEIVGQGKLGEVALLASIDQHCSTTRLCNLVFTPAWFSPIMYKTTSGHVQFDNCNFENGHIQVHGPGTCQVKFCTFKNTHIFLHNVPLCVLENCEFVGSENNSVTVEGHPSADKNWAYKYLLGLIKSSPTFLPTEDSDFLMSLDLESRDQAWSPKTCDIVIEGSQSPTSPASSSPKPGSKAGSQEAEVGSDGERVAQTPDSSDGGLSPSGEDEDEDQLMYRLSYQVQGPRPVLGGSFLGPPLPGASIQLPSCLVLNSLQQELQKDKEAMALANSVQGCLIRKCLFRDGKGGVFVCSHGRAKMEGNIFRNLTYAVRCIHNSKIIMLRNDIYRCRASGIFLRLEGGGLIAGNNIYHNAEAGVDIRKKSNPLILCNQIHHGLRSGIVVLGNGKGIIRNNQIFSNKEAGIYILYHGNPVVSGNHIFKGRAAGIAVNENGKGLITENVIRENQWGGVDIRRGGIPVLRSNLICFGYSDGVVVGDEGKGLIEGNTIYANKGCGVWMMSSSLPHVTSNHVSYNGLYGVAVFSQKDGSSELPRGHRAQENFSEDGDAILWETELEKEDDPLRRPITIALVESNSINHNGASGLYVQSSEALHVITNVIHANGDRGITVAQSSQPTRVANNSISCNRQSGVKVEAQCKVELRGNGIYDNRGHGIITKGDSTIVIENDIIGNRGSGLQLLPRSDTKVIKNRIHSFRAYGIAVRGRAKALVQENIIFQGKTSKTIFQQISNNRECIMQNNKFLVFKKKSDTWRLVNPPARPHLENSLRRPSAAHNGQKVTAMATRITARVEGGYHSNRSVFCTIL

SEQ ID NO: 17689 - protein, 481 aa, Homo sapiens
MLRNDIYRCRASGIFLRLEGGGLIAGNNIYHNAEAGVDIRKKSNPLILCNQIHHGLRSGIVVLGNGKGIIRNNQIFSNKEAGIYILYHGNPVVSGNHIFKGRAAGIAVNENGKGLITENVIRENQWGGVDIRRGGIPVLRSNLICFGYSDGVVVGDEGKGLIEGNTIYANKGCGVWMMSSSLPHVTSNHVSYNGLYGVAVFSQKDGSSELPRGHRAQENFSEDGDAILWETELEKEDDPLRRPITIALVESNSINHNGASGLYVQSSEALHVITNVIHANGDRGITVAQSSQPTRVANNSISCNRQSGVKVEAQCKVELRGNGIYDNRGHGIITKGDSTIVIENDIIGNRGSGLQLLPRSDTKVIKNRIHSFRAYGIAVRGRAKALVQENIIFQGKTSKTIFQQISNNRECIMQNNKFLVFKKKSDTWRLVNPPARPHLENSLRRPSAAHNGQKVTAMATRITARVEGGYHSNRSVFCTIL

SEQ ID NO: 17690 - protein, 461 aa, Homo sapiens
MVNDRWKTMGGAAQLEDRPRDKPQRPSCGYVLCTVLLALAVLLAVAVTGAVLFLNHAHAPGTAPPPVVSTGAASANSALVTVERADSSHLSILIDPRCPDLTDSFARLESAQASVLQALTEHQAQPRLVGDQEQELLDTLADQLPRLLARASELQTECMGLRKGHGTLGQGLSALQSEQGRLIQLLSESQGHMAHLVNSVSDILDALQRDRGLGRPRNKADLQRAPARGTRPRGCATGSRPRDCLDVLLSGQQDDGVYSVFPTHYPAGFQVYCDMRTDGGGWTVFQRREDGSVNFFRGWDAYRDGFGRLTGEHWLGLKRIHALTTQAAYELHVDLEDFENGTAYARYGSFGVGLFSVDPEEDGYPLTVADYSGTAGDSLLKHSGMRFTTKDRDSDHSENNCAAFYRGAWWYRNCHTSNLNGQYLRGAHASYADGVEWSSWTGWQYSLKFSEMKIRPVREDR

SEQ ID NO: 17691 - protein, 198 aa, Homo sapiens
MGLRKGHGTLGQGLSALQSEQGRLIQLLSESQGHMAHLVNSVSDILDALQRDRGLGRPRNKADLQRAPARGTRPRGCATGSRPRDCLDVLLSGQQDDGVYSVFPTHYPAGFQVYCDMRTDGGGWTVFQRREDGSVNFFRGWDAYRDGFGRLTGEHWLGPLDRCTLSLALLVPVAPSPTPPHSFVNVLHPPVPGGPTLQ

SEQ ID NO: 17692 - protein, 296 aa, Homo sapiens
MDGDGDPESVGQPEEASPEEQPEEASAEEERPEDQQEEEAAAAAAYLDELPEPLLLRVLAALPAAELVQACRLVCLRWKELVDGAPLWLLKCQQEGLVPEGGVEEERDHWQQFYFLSKRRRNLLRNPCGEEDLEGWCDVEHGGDGWRVEELPGDSGVEFTHDESVKKYFASSFEWCRKAQVIDLQAEGYWEELLDTTQPAIVVKDWYSGRSDAGCLYELTVKLLSEHENVLAEFSSGQVAVPQDSDGGGWMEISHTFTDYGPGVRFVRFEHGGQDSVYWKGWFGARVTNSSVWVEP

SEQ ID NO: 17693 - protein, 283 aa, Homo sapiens
MGASVSRGRAARVPAPEPEPEEALDLSQLPPELLLVVLSHVPPRTLLGRCRQVCRGWRALVDGQALWLLILARDHGATGRALLHLARSCQSPARNARPCPLGRFCARRPIGRNLIRNPCGQEGLRKWMVQHGGDGWVVEENRTTVPGAPSQTCFVTSFSWCCKKQVLDLEEEGLWPELLDSGRIEICVSDWWGARHDSGCMYRLLVQLLDANQTVLDKFSAVPDPIPQWNNNACLHVTHVFSNIKMGVRFVSFEHRGQDTQFWAGHYGARVTNSSVIVRVRLS

SEQ ID NO: 17694 - protein, 471 aa, Homo sapiens
MAAMETETAPLTLESLPTDPLLLILSFLDYRDLINCCYVSRRLSQLSSHDPLWRRHCKKYWLISEEEKTQKNQCWKSLFIDTYSDVGRYIDHYAAIKKAWDDLKKYLEPRCPRMVLSLKEGAREEDLDAVEAQIGCKLPDDYRCSYRIHNGQKLVVPGLLGSMALSNHYRSEDLLDVDTAAGGFQQRQGLKYCLPLTFCIHTGLSQYIAVEAAEGRNKNEVFYQCPDQMARNPAAIDMFIIGATFTDWFTSYVKNVVSGGFPIIRDQIFRYVHDPECVATTGDITVSVSTSFLPELSSVHPPHYFFTYRIRIEMSKDALPEKACQLDSRYWRITNAKGDVEEVQGPGVVGEFPIISPGRVYEYTSCTTFSTTSGYMEGYYTFHFLYFKDKIFNVAIPRFHMACPTFRVSIARLEMGPDEYEEMEEEEEEEEEEDEDDDSADMDESDEDDEEERRRRVFDVPIRRRRCSRLF

SEQ ID NO: 17695 - protein, 415 aa, Homo sapiens
MAAMETETAPLTLESLPTDPLLLILSFLDYRDLINCCYVSRRLSQLSSHDPLWRRHCKKYWLISEEEKTQKNQCWKSLFIDTYSDVGRYIDHYAAIKKAWDDLKKYLEPRCPRMVLSLKEGAREEDLDAVEAQIGCKLPDDYRCSYRIHNGQKLVVPGLLGSMALSNHYRSEDLLDVDTAAGGFQQRQGLKYCLPLTFCIHTGLSQYIAVEAAEGRNKNEVFYQCPDQMARNPAAIDMFIIGATFTDWFTSYVKNVVSGGFPIIRDQIFRYVHDPECVATTGDITVSVSTSFLPELSSVHPPHYFFTYRIRIEMSKDALPEKACQLDSRYWRITNAKGDVEEVQGPGVVGEFPIISPGRVYEYTSCTTFSTTSGYMEGYYTFHFLYFKDKIFNVAIPRFHMACPTFRVSIARLVS

SEQ ID NO: 17696 - protein, 410 aa, Homo sapiens
MAAMETETAPLTLESLPTDPLLLILSFLDYRDLINRRLSQLSSHDPLWRRHCKKYWLISEEEKTQKNQCWKSLFIDTYSDVGRYIDHYAAIKKAWDDLKKYLEPRCPRMVLSLKEGAREEDLDAVEAQIGCKLPDDYRCSYRIHNGQKLVVPGLLGSMALSNHYRSEDLLDVDTAAGGFQQRQGLKYCLPLTFCIHTGLSQYIAVEAAEGRNKNEVFYQCPDQMARNPAAIDMFIIGATFTDWFTSYVKNVVSGGFPIIRDQIFRYVHDPECVATTGDITVSVSTSFLPELSSVHPPHYFFTYRIRIEMSKDALPEKACQLDSRYWRITNAKGDVEEVQGPGVVGEFPIISPGRVYEYTSCTTFSTTSGYMEGYYTFHFLYFKDKIFNVAIPRFHMACPTFRVSIARLVS

SEQ ID NO: 17697 - protein, 745 aa, Homo sapiens
MEEELQHSHCVNCVSRRCMTRPEPGISCDLIGCPLVCGAVFHSCKADEHRLLCPFERVPCLNSDFGCPFTMARNKVAEHLEMCPASVVCCTMEWNRWPVSYADRKSYENLSRDVDEVAQLDMALALQDQRMLLESLKVATMMSKATDKVSKPREQISVKSSVPEIPHANGLVSVDEESYGALYQATVETTRSLAAALDILNTATRDIGMLNTSVPNDMDEQQNARESLEDQNLKDQDHLYEEEIGAVGGIDYNDTNQNAQSEQNGSSDLLCDLNTSSYDTSALCNGFPLENICTQVIDQNQNLHGDSKQSNLTNGDCVASSDGTSKPSSSLAVAAQLREIIPSSALPNGTVQHILMPDDEGEGELCWKKVDLGDVKNVDVLSFSHAPSFNFLSNSCWSKPKEDKAVDTSDLEVAEDPMGLQGIDLITAALLFCLGDSPGGRGISDSRMADIYHIDVGTQTFSLPSAILATSTMVGEIASASACDHANPQLSNPSPFQTLGLDLVLECVARYQPKQRSMFTFVCGQLFRRKEFSSHFKNVHGDIHAGLNGWMEQRCPLAYYGCTYSQRRFCPSIQGAKIIHDRHLRSFGVQPCVSTVLVEPARNCVLGLHNDHLSSLPFEVLQHIAGFLDGFSLCQLSCVSKLMRDVCGSLLQSRGMVILQWGKRKYPEGNSSWQIKEKVWRFSTAFCSVNEWKFADILSMADHLKKCSYNVVEKREEAIPLPCMCVTRELTKEGRSLRSVLKPVL

SEQ ID NO: 17698 - protein, 677 aa, Homo sapiens
MLSSTDFTFASWELVVRVDHPNEEQQKDVTLRVSGDLHVGGVMLKLVEQINISQDWSDFALWWEQKHCWLLKTHWTLDKYGVQADAKLLFTPQHKMLRLRLPNLKMVRLRVSFSAVVFKAVSDICKILNIRRSEELSLLKPSGDYFKKKKKKDKNNKEPIIEDILNLESSPTASGSSVSPGLYSKTMTPIYDPINGTPASSTMTWFSDSPLTEQNCSILAFSQPPQSPEALADMYQPRSLVDKAKLNAGWLDSSRSLMEQGIQEDEQLLLRFKYYSFFDLNPKYDAVRINQLYEQARWAILLEEIDCTEEEMLIFAALQYHISKLSLSAETQDFAGESEVDEIEAALSNLEVTLEGGKADSLLEDITDIPKLADNLKLFRPKKLLPKAFKQYWFIFKDTSIAYFKNKELEQGEPLEKLNLRGCEVVPDVNVAGRKFGIKLLIPVADGMNEMYLRCDHENQYAQWMAACMLASKGKTMADSSYQPEVLNILSFLRMKNRNSASQVASSLENMDMNPECFVSPRCAKRHKSKQLAARILEAHQNVAQMPLVEAKLRFIQAWQSLPEFGLTYYLVRFKGSKKDDILGVSYNRLIKIDAATGIPVTTWRFTNIKQWNVNWETRQVVIEFDQNVFTAFTCLSADCKIVHEYIGGYIFLSTRSKDQNETLDEDLFHKLTGGQD

SEQ ID NO: 17699 - protein, 554 aa, Homo sapiens
MLSSTDFTFASWELVVRVDHPNEEQQKDVTLRVSGDLHVGGVMLKLVEQINISQDWSDFALWWEQKHCWLLKTHWTLDKYGVQADAKLLFTPQHKMLRLRLPNLKMVRLRVSFSAVVFKAVSDICKILNIRRSEELSLLKPSGDYFKKKKKKDKNNKEPIIEDILNLESSPTASGSSVSPGLYSKTMTPIYDPINGTPASSTMTWFSDSPLTEQNCSILAFSQPPQSPEALADMYQPRSLVDKAKLNAGWLDSSRSLMEQGIQEDEQLLLRFKYYSFFDLNPKYDAVRINQLYEQARWAILLEEIDCTEEEMLIFAALQYHISKLSLSAETQDFAGESEVDEIEAALSNLEVTLEGGKADSLLEDITDIPKLADNLKLFRPKKLLPKAFKQYWFIFKDTSIAYFKNKELEQGEPLEKLNLRGCEVVPDVNVAGRKFGIKLLIPVADGMNEMYLRCDHENQYAQWMAACMLASKGKTMADSSYQPEVLNILSFLRMKNRNSASQVASSLENMDMNPECFVSPRCAKRHKSKQLAARILEAHLQAPFHSYRSLSHL

SEQ ID NO: 17700 - protein, 230 aa, Homo sapiens
MNEMYLRCDHENQYAQWMAACMLASKGKTMADSSYQPEVLNILSFLRMKNRNSASQVASSLENMDMNPECFVSPRCAKRHKSKQLAARILEAHQNVAQMPLVEAKLRFIQAWQSLPEFGLTYYLVRFKGSKKDDILGVSYNRLIKIDAATGIPVTTWRFTNIKQWNVNWETRQVVIEFDQNVFTAFTCLSADCKIVHEYIGGYIFLSTRSKDQNETLDEDLFHKLTGGQD

SEQ ID NO: 17701 - protein, 495 aa, Homo sapiens
MLSSTDFTFASWELVVRVDHPNEEQQKDVTLRVSGDLHVGGVMLKLVEQINISQDWSDFALWWEQKHCWLLKTHWTLDKYGVQADAKLLFTPQHKMLRLRLPNLKMVRLRVSFSAVVFKAVSDICKILNIRRSEELSLLKPSGDYFKKKKKKDKNNKEPIIEDILNLESSPTASGSSVSPGLYSKTMTPIYDPINGTPASSTMTWFSDSPLTEQNCSILAFSQPPQSPEALADMYQPRSLVDKAKLNAGWLDSSRSLMEQGIQEDEQLLLRFKYYSFFDLNPKYDAVRINQLYEQARWAILLEEIDCTEEEMLIFAALQYHISKLSLSAETQDFAGESEVDEIEAALSNLEVTLEGGKADSLLEDITDIPKLADNLKLFRPKKLLPKAFKQYWFIFKDTSIAYFKNKELEQGEPLEKLNLRGCEVVPDVNVAGRKFGIKLLIPVADGMNEMYLRCDHVSKTPKILSHFTSTKPKSKTQKCFHKFRALLCHSAIAL

SEQ ID NO: 17702 - protein, 733 aa, Homo sapiens
MAGGRETCLPLIGFILICLKMVASAKSAPEIPTIDQAYSKLSNSITVEWATVPGATSYLLTAEDGDTVIETTVANSPGTVTGLKAATWYEITIRSISAAGRSQASPPKQAKTVLAAPILEVSSPSSDSILVQWEAVYMAIAFSVSIMRANGLGSIWKENTTNTSLTFTSLEAGTLYTIKAYAWNANRIPGDDSTCNQRTSPRAPANIQVSFDSGALKASFSWARAEGAFNYTVMALSDSSELTCSTTFSSCTISSLQCGTEYLISVLASNDAGSSKSSSAMTLKTVACAPGRVTIQEDPPGHLSVAWSSVDLGDYYVVFVKSDDGLEVHCNTSLTQCNFLSECGFTYFISVFVYNKAGQSPLGDIFNYTTAPCCPSDINPVLVSSDRVEIVWSPVRGAELYETKAVDGYNMVECNDTTPACTLSALECDTKYNITVYSFNEVRGSNMSCTPQFITTAPCSPEIKNVSRDAFSMINVHWRSTNDDATYTVTAQGEKGLYQCSSTGESCTMRGLPCGSVFSVTAVAETQAGRSLPSYSVPLETVPCCPTGLTVTQITQSVINVSWTIGRVAQTHVAVLESHTGQSKCHTHQNHCLLGCITCGINYTVTLKAISATGLTADCSYQSYFSGACCPLGVKLYRLGPNGIRIYWQASRGSANYSTDLYGSKGIFTCTPSAGLSFCDVTEIPCGDVYTVMVSPVAKTGLKLTFCPKKIYSVTCSGSTLGMVIYRGKRNEE

SEQ ID NO: 17703 - protein, 374 aa, Homo sapiens
MAEPGEGLPEEVLALIFRHLSLRDRAAAARVCRAWAAAATCSAVWHDTKISCECELEGMLPPYLSACLDHIHNLRLEFEPSRKPSRRAAIELLMVLAGRAPGLRGLRLECRGEKPLFDAGRDVLEAVHAVCGAASQLRHLDLRRLSFTLDDALVLQAARSCPELHSLFLDNSTLVGSVGPGSVLELLEACPRLRALGLHLASLSHAILEALAAPDRAPFALLALRCACPEDARASPLPNEAWVALRRRHPGLAVELELEPALPAESVTRVLQPAVPVAALRLNLSGDTVGPVRFAAHHYAATLCALEVRAAASAELNAALEELAARCAALREVHCFCVVSHSVLDAFRAHCPRLRTYTLKLTREPHPWRPTLVA

SEQ ID NO: 17704 - protein, 1135 aa, Homo sapiens
MRSRGSDTEGSAQKKFPRHTKGHSFQGPKNMKHRQQDKDSPSESDVILPCPKAEKPHSGNGHQAEDLSRDDLLFLLSILEGELQARDEVIGILKAEKMDLALLEAQYGFVTPKKVLEALQRDAFQAKSTPWQEDIYEKPMNELDKVVEKHKESYRRILGQLLVAEKSRRQTILELEEEKRKHKEYMEKSDEFICLLEQECERLKKLIDQEIKSQEEKEQEKEKRVTTLKEELTKLKSFALMVVDEQQRLTAQLTLQRQKIQELTTNAKETHTKLALAEARVQEEEQKATRLEKELQTQTTKFHQDQDTIMAKLTNEDSQNRQLQQKLAALSRQIDELEETNRSLRKAEEELQDIKEKISKGEYGNAGIMAEVEELRKRVLDMEGKDEELIKMEEQCRDLNKRLERETLQSKDFKLEVEKLSKRIMALEKLEDAFNKSKQECYSLKCNLEKERMTTKQLSQELESLKVRIKELEAIESRLEKTEFTLKEDLTKLKTLTVMFVDERKTMSEKLKKTEDKLQAASSQLQVEQNKVTTVTEKLIEETKRALKSKTDVEEKMYSVTKERDDLKNKLKAEEEKGNDLLSRVNMLKNRLQSLEAIEKDFLKNKLNQDSGKSTTALHQENNKIKELSQEVERLKLKLKDMKAIEDDLMKTEDEYETLERRYANERDKAQFLSKELEHVKMELAKYKLAEKTETSHEQWLFKRLQEEEAKSGHLSREVDALKEKIHEYMATEDLICHLQGDHSVLQKKLNQQENRNRDLGREIENLTKELERYRHFSKSLRPSLNGRRISDPQVFSKEVQTEAVDNEPPDYKSLIPLERAVINGQLYEESENQDEDPNDEGSVLSFKCSQSTPCPVNRKLWIPWMKSKEGHLQNGKMQTKPNANFVQPGDLVLSHTPGQPLHIKVTPDHVQNTATLEITSPTTESPHSYTSTAVIPNCGTPKQRITILQNASITPVKSKTSTEDLMNLEQGMSPITMATFARAQTPESCGSLTPERTMSPIQVLAVTGSASSPEQGRSPEPTEISAKHAIFRVSPDRQSSWQFQRSNSNSSSVITTEDNKIHIHLGSPYMQAVASPVRPASPSAPLQDNRTQGLINGALNKTTNKVTSSITITPTATPLPRQSQITVEPLLLPH

SEQ ID NO: 17705 - protein, 1133 aa, Homo sapiens
MRSRGSDTEGSAQKKFPRHTKGHSFQGPKNMKHRQQDKDSPSESDVILPCPKAEKPHSGNGHQAEDLSRDDLLFLLSILEGELQARDEVIGILKAEKMDLALLEAQYGFVTPKKVLEALQRDAFQAKSTPWQEDIYEKPMNELDKVVEKHKESYRRILGQLLVAEKSRRQTILELEEEKRKHKEYMEKSDEFICLLEQECERLKKLIDQEIKSQEEKEQEKEKRVTTLKEELTKLKSFALMVVDEQQRLTAQLTLQRQKIQELTTNAKETHTKLALAEARVQEEEQKATRLEKELQTQTTKFHQDQDTIMAKLTNEDSQNRQLQQKLAALSRQIDELEETNRSLRKAEEELQDIKEKISKGEYGNAGIMAEVEELRKRVLDMEGKDEELIKMEEQCRDLNKRLERETLQSKDFKLEVEKLSKRIMALEKLEDAFNKSKQECYSLKCNLEKERMTTKQLSQELESLKVRIKELEAIESRLEKTEFTLKEDLTKLKTLTVMFVDERKTMSEKLKKTEDKLQAASSQLQVEQNKVTTVTEKLIEETKRALKSKTDVEEKMYSVTKERDDLKNKLKAEEEKGNDLLSRVNMLKNRLQSLEAIEKDFLKNKLNQDSGKSTTALHQENNKIKELSQEVERLKLKLKDMKAIEDDLMKTEDEYETLERRYANERDKAQFLSKELEHVKMELAKYKLAEKTETSHEQWLFKRLQEEEAKSGHLSREVDALKEKIHEYMATEDLICHLQGDHSVLQKKLNQQENRNRDLGREIENLTKELERYRHFSKSLRPSLNGRRISDPQVFSKEVQTEAVDNEPPDYKSLIPLERAVINGQLYEESENQDEDPNDEGSVLSFKCSQSTPCPVNRKLWIPWMKSKEGHLQNGKMQTKPNANFVQPGDLVLSHTPGQPLHIKVTPDHVQNTATLEITSPTTESPHSYTSTAVIPNCGTPKQRITILQNASITPVKSKTSTEDLMNLEQGMSPITMATFARAQTPESCGSLTPERTMSPIQVLAVTGSASSPEQGRSPEPTEISAKHAIFRVSPDRQSSWQFQRSNSNSSSVITTEDNKIHIHLGSPYMQAVASPVRPASPSAPLQDNRTQGLINGALNKTTNKVTSSITITPTATPLPRQSQITVSNIYN

SEQ ID NO: 17706 - protein, 893 aa, Homo sapiens
MVVDEQQRLTAQLTLQRQKIQELTTNAKETHTKLALAEARVQEEEQKATRLEKELQTQTTKFHQDQDTIMAKLTNEDSQNRQLQQKLAALSRQIDELEETNRSLRKAEEELQDIKEKISKGEYGNAGIMAEVEELRKRVLDMEGKDEELIKMEEQCRDLNKRLERETLQSKDFKLEVEKLSKRIMALEKLEDAFNKSKQECYSLKCNLEKERMTTKQLSQELESLKVRIKELEAIESRLEKTEFTLKEDLTKLKTLTVMFVDERKTMSEKLKKTEDKLQAASSQLQVEQNKVTTVTEKLIEETKRALKSKTDVEEKMYSVTKERDDLKNKLKAEEEKGNDLLSRVNMLKNRLQSLEAIEKDFLKNKLNQDSGKSTTALHQENNKIKELSQEVERLKLKLKDMKAIEDDLMKTEDEYETLERRYANERDKAQFLSKELEHVKMELAKYKLAEKTETSHEQWLFKRLQEEEAKSGHLSREVDALKEKIHEYMATEDLICHLQGDHSVLQKKLNQQENRNRDLGREIENLTKELERYRHFSKSLRPSLNGRRISDPQVFSKEVQTEAVDNEPPDYKSLIPLERAVINGQLYEESENQDEDPNDEGSVLSFKCSQSTPCPVNRKLWIPWMKSKEGHLQNGKMQTKPNANFVQPGDLVLSHTPGQPLHIKVTPDHVQNTATLEITSPTTESPHSYTSTAVIPNCGTPKQRITILQNASITPVKSKTSTEDLMNLEQGMSPITMATFARAQTPESCGSLTPERTMSPIQVLAVTGSASSPEQGRSPEPTEISAKHAIFRVSPDRQSSWQFQRSNSNSSSVITTEDNKIHIHLGSPYMQAVASPVRPASPSAPLQDNRTQGLINGALNKTTNKVTSSITITPTATPLPRQSQITVSNIYN

SEQ ID NO: 17707 - protein, 255 aa, Homo sapiens
MRSRGSDTEGSAQKKFPRHTKGHSFQGPKNMKHRQQDKDSPSESDVILPCPKAEKPHSGNGHQAEDLSRDDLLFLLSILEGELQARDEVIGILKAEKMDLALLEAQYGFVTPKKVLEALQRDAFQAKSTPWQEDIYEKPMNELDKVVEKHKESYRRILGQLLVAEKSRRQTILELEEEKRKHKEYMEKSDEFICLLEQECERWSLALLPRLECNGMILAHCNLCLLGSSDSPASAFQVAGITGTRHHAQLVFVFL

SEQ ID NO: 17708 - protein, 873 aa, Homo sapiens
MVVDEQQRLTAQLTLQRQKIQELTTNAKETHTKLALAEARVQEEEQKATRLEKELQTQTTKFHQDQDTIMAKLTNEDSQNRQLQQKLAALSRQIDELEETNRSLRKAEEELQDIKEKISKGEYGNAGIMAEVEELIKMEEQCRDLNKRLERETLQSKDFKLEVEKLSKRIMALEKLEDAFNKSKQECYSLKCNLEKERMTTKQLSQELESLKVRIKELEAIESRLEKTEFTLKEDLTKLKTLTVMFVDERKTMSEKLKKTEDKLQAASSQLQVEQNKVTTVTEKLIEETKRALKSKTDVEEKMYSVTKERDDLKNKLKAEEEKGNDLLSRVNMLKNRLQSLEAIEKDFLKNKLNQDSGKSTTALHQENNKIKELSQEVERLKLKLKDMKAIEDDLMKTEDEYETLERRYANERDKAQFLSKELEHVKMELAKYKLAEKTETSHEQWLFKRLQEEEAKSGHLSREVDALKEKIHEYMATEDLICHLQGDHSVLQKKLNQQENRNRDLGREIENLTKELERYRHFSKSLRPSLNGRRISDPQVFSKEVQTEAVDNEPPDYKSLIPLERAVINGQLYEESENQDEDPNDEGSVLSFKCSQSTPCPVNRKLWIPWMKSKEGHLQNGKMQTKPNANFVQPGDLVLSHTPGQPLHIKVTPDHVQNTATLEITSPTTESPHSYTSTAVIPNCGTPKQRITILQNASITPVKSKTSTEDLMNLEQGMSPITMATFARAQTPESCGSLTPERTMSPIQVLAVTGSASSPEQGRSPEPTEISAKHAIFRVSPDRQSSWQFQRSNSNSSSVITTEDNKIHIHLGSPYMQAVASPSAPLQDNRTQGLINGALNKTTNKVTSSITITPTATPLPRQSQITVSNIYN

SEQ ID NO: 17709 - protein, 711 aa, Homo sapiens
MALEKLEDAFNKSKQECYSLKCNLEKERMTTKQLSQELESLKVRIKELEAIESRLEKTEFTLKEDLTKLKTLTVMFVDERKTMSEKLKKTEDKLQAASSQLQVEQNKVTTVTEKLIEETKRALKSKTDVEEKMYSVTKERDDLKNKLKAEEEKGNDLLSRVNMLKNRLQSLEAIEKDFLKNKLNQDSGKSTTALHQENNKIKELSQEVERLKLKLKDMKAIEDDLMKTEDEYETLERRYANERDKAQFLSKELEHVKMELAKYKLAEKTETSHEQWLFKRLQEEEAKSGHLSREVDALKEKIHEYMATEDLICHLQGDHSVLQKKLNQQENRNRDLGREIENLTKELERYRHFSKSLRPSLNGRRISDPQVFSKEVQTEAVDNEPPDYKSLIPLERAVINGQLYEESENQDEDPNDEGSVLSFKCSQSTPCPVNRKLWIPWMKSKEGHLQNGKMQTKPNANFVQPGDLVLSHTPGQPLHIKVTPDHVQNTATLEITSPTTESPHSYTSTAVIPNCGTPKQRITILQNASITPVKSKTSTEDLMNLEQGMSPITMATFARAQTPESCGSLTPERTMSPIQVLAVTGSASSPEQGRSPEPTEISAKHAIFRVSPDRQSSWQFQRSNSNSSSVITTEDNKIHIHLGSPYMQAVASPVRPASPSAPLQDNRTQGLINGALNKTTNKVTSSITITPTATPLPRQSQITVEPLLLPH

SEQ ID NO: 17710 - protein, 895 aa, Homo sapiens
MVVDEQQRLTAQLTLQRQKIQELTTNAKETHTKLALAEARVQEEEQKATRLEKELQTQTTKFHQDQDTIMAKLTNEDSQNRQLQQKLAALSRQIDELEETNRSLRKAEEELQDIKEKISKGEYGNAGIMAEVEELRKRVLDMEGKDEELIKMEEQCRDLNKRLERETLQSKDFKLEVEKLSKRIMALEKLEDAFNKSKQECYSLKCNLEKERMTTKQLSQELESLKVRIKELEAIESRLEKTEFTLKEDLTKLKTLTVMFVDERKTMSEKLKKTEDKLQAASSQLQVEQNKVTTVTEKLIEETKRALKSKTDVEEKMYSVTKERDDLKNKLKAEEEKGNDLLSRVNMLKNRLQSLEAIEKDFLKNKLNQDSGKSTTALHQENNKIKELSQEVERLKLKLKDMKAIEDDLMKTEDEYETLERRYANERDKAQFLSKELEHVKMELAKYKLAEKTETSHEQWLFKRLQEEEAKSGHLSREVDALKEKIHEYMATEDLICHLQGDHSVLQKKLNQQENRNRDLGREIENLTKELERYRHFSKSLRPSLNGRRISDPQVFSKEVQTEAVDNEPPDYKSLIPLERAVINGQLYEESENQDEDPNDEGSVLSFKCSQSTPCPVNRKLWIPWMKSKEGHLQNGKMQTKPNANFVQPGDLVLSHTPGQPLHIKVTPDHVQNTATLEITSPTTESPHSYTSTAVIPNCGTPKQRITILQNASITPVKSKTSTEDLMNLEQGMSPITMATFARAQTPESCGSLTPERTMSPIQVLAVTGSASSPEQGRSPEPTEISAKHAIFRVSPDRQSSWQFQRSNSNSSSVITTEDNKIHIHLGSPYMQAVASPVRPASPSAPLQDNRTQGLINGALNKTTNKVTSSITITPTATPLPRQSQITVEPLLLPH

SEQ ID NO: 17711 - protein, 219 aa, Homo sapiens
MDPAPGVLDPRAAPPALLGTPQAEVLEDVLREQFGPLPQLAAVCRLKRLPSGGYSSTENLQLVLERRRVANAKERERIKNLNRGFARLKALVPFLPQSRKPSKVDILKGATEYIQVLSDLLEGAKDSKKQDPDEQSYSNNSSESHTSSARQLSRNITQHISCAFGLKNEEEGPWADGGSGEPAHACRHSVMSTTEIISPTRSLDRFPEVELLSHRLPQV

SEQ ID NO: 17712 - protein, 234 aa, Homo sapiens
MPSGCHSSPPSGLRGDMASLVPLSPYLSPTVLLLVSCDLGFVRADRPPSPVNVTVTHLRANSATVSWDVPEGNIVIGYSISQQRQNGPGQRVIREVNTTTRACALWGLAEDSDYTVQVRSIGLRGESPPGPRVHFRTLKGSDRLPSNSSSPGDITVEGLDGERPLQTGEVVIIVVVLLMWAAVIGLFCRQYDIIKDNDSNNNPKEKGKGPEQSPQGRPVGTRQKKSPSINTIDV

SEQ ID NO: 17713 - protein, 609 aa, Homo sapiens
MKWVESIFLIFLLNFTESRTLHRNEYGIASILDSYQCTAEISLADLATIFFAQFVQEATYKEVSKMVKDALTAIEKPTGDEQSSGCLENQLPAFLEELCHEKEILEKYGHSDCCSQSEEGRHNCFLAHKKPTPASIPLFQVPEPVTSCEAYEEDRETFMNKFIYEIARRHPFLYAPTILLWAARYDKIIPSCCKAENAVECFQTKAATVTKELRESSLLNQHACAVMKNFGTRTFQAITVTKLSQKFTKVNFTEIQKLVLDVAHVHEHCCRGDVLDCLQDGEKIMSYICSQQDTLSNKITECCKLTTLERGQCIIHAENDEKPEGLSPNLNRFLGDRDFNQFSSGEKNIFLASFVHEYSRRHPQLAVSVILRVAKGYQELLEKCFQTENPLECQDKGEEELQKYIQESQALAKRSCGLFQKLGEYYLQNAFLVAYTKKAPQLTSSELMAITRKMAATAATCCQLSEDKLLACGEGAADIIIGHLCIRHEMTPVNPGVGQCCTSSYANRRPCFSSLVVDETYVPPAFSDDKFIFHKDLCQAQGVALQTMKQEFLINLVKQKPQITEEQLEAVIADFSGLLEKCCQGQEQEVCFAEEGQKLISKTRAALGV

SEQ ID NO: 17714 - protein, 1040 aa, Homo sapiens
MMSSVSTESKLQQAVSLQGVDPETCMIVFKNHWAQVVKILEKHDPLKNTQAKYGSIPPDEASAVQNYVEHMLFLLIEEQAKDAAMGPILEFVVSENIMEKLFLWSLRREFTDETKIEQLKMYEMLVTQSHQPLLHHKPILKPLMMLLSSCSGTTTPTVEEKLVVLLNQLCSILAKDPSILELFFHTSEDQGAANFLIFSLLIPFIHREGSVGQQARDALLFIMSLSAENTMVAHHIVENTYFCPVLATGLSGLYSSLPTKLEEKGEEWHCLLKDDWLLLPSLVQFMNSLEFCNAVIQVAHPLIRNQLVNYIYNGFLVPVLAPALHKVTVEEVMTTTAYLDLFLRSISEPALLEIFLRFILLHQHENVHILDTLTSRINTPFRLCVVSLALFRTLIGLHCEDVMLQLVLRYLIPCNHMMLSQRWAVKERDCYSVSAAKLLALTPVCCSSGITLTLGNQERDYILWSKCMHDTSGPVERPFPEAFSESACIVEYGKALDISYLQYLWEAHTNILRCMRDCRVWSALYDGDSPDPEMFLQSLTEEGSVSSACPVFGLPQQLPRKTGPQLAPRKDKSQTELEWDDSYDTGISSGADVGSPGPYDDLEVSGPPAPIDPPKHIQEMKKNALLLFKGSYIEESDFQDDVMVYRLCAEKDSEDMKDSQEEAARPPAEAQAEVQSVPINNGPLLSTQPETDSEEEWNRDNSDPFHSEPKEPKQEREPEAAPESNSELASPAPEAEHSSNLTAAHPESEELIAQYDQIIKELDSGAEGLMEQNYPTPDPLLLTKEEEGKEESKGEKEKEGKKELEDEEDDFDSFIAEMPAVETVPSPFVGRDEAAFASRHPVRTQSTPFTGPFISVVLSKLENMLENSLHVNLLLIGIITQLASYPQPLLRSFLLNTNMVFQPSVRSLYQVLASVKNKIEQFASVERDFPGLLIQAQQYLLFRVDMSDMTPAALTKDPIQEASRTGSGKNLLDGPPRVLQPFLTHRTKVAEAPPNLPLPVRNPMLAAALFPEFLKELAALAQEHSILCYKILGDFEDSCC

SEQ ID NO: 17715 - protein, 321 aa, Homo sapiens
MKPGFSPRGGGFGGRGGFGDRGGRGGRGGFGGGRGRGGGFRGRGRGGGGGGGGGGGGGRGGGGFHSGGNRGRGRGGKRGNQSGKNVMVEPHRHEGVFICRGKEDALVTKNLVPGESVYGEKRVSISEGDDKIEYRAWNPFRSKLAAAILGGVDQIHIKPGAKVLYLGAASGTTVSHVSDIVGPDGLVYAVEFSHRSGRDLINLAKKRTNIIPVIEDARHPHKYRMLIAMVDVIFADVAQPDQTRIVALNAHTFLRNGGHFVISIKANCIDSTASAEAVFASEVKKMQQENMKPQEQLTLEPYERDHAVVVGVYRPPPKVKN

SEQ ID NO: 17716 - protein, 578 aa, Homo sapiens
MLLLINVILTLWVSCANGQEVKPCDFPEIQHGGLYYKSLRRLYFPAAAGQSYSYYCDQNFVTPSGSYWDYIHCTQDGWSPTVPCLRTCSKSDVEIENGFISESSSIYILNEETQYNCKPGYATAEGNSSGSITCLQNGWSTQPICIKFCDMPVFENSRAKSNGMWFKLHDTLDYECYDGYESSYGNTTDSIVCGEDGWSHLPTCYNSSENCGPPPPISNGDTTSFPQKVYLPWSRVEYQCQSYYELQGSKYVTCSNGDWSEPPRCISMKPCEFPEIQHGHLYYENTRRPYFPVATGQSYSYYCDQNFVTPSGSYWDYIHCTQDGWLPTVPCLRTCSKSDIEIENGFISESSSIYILNKEIQYKCKPGYATADGNSSGSITCLQNGWSAQPICIKFCDMPVFENSRAKSNGMRFKLHDTLDYECYDGYEISYGNTTGSIVCGEDGWSHFPTCYNSSEKCGPPPPISNGDTTSFLLKVYVPQSRVEYQCQSYYELQGSNYVTCSNGEWSEPPRCIHPCIITEENMNKNNIQLKGKSDIKYYAKTGDTIEFMCKLGYNANTSVLSFQAVCREGIVEYPRCE

SEQ ID NO: 17717 - protein, 577 aa, Homo sapiens
MLLLINVILTLWVSCANGQVKPCDFPEIQHGGLYYKSLRRLYFPAAAGQSYSYYCDQNFVTPSGSYWDYIHCTQDGWSPTVPCLRTCSKSDVEIENGFISESSSIYILNEETQYNCKPGYATAEGNSSGSITCLQNGWSTQPICIKFCDMPVFENSRAKSNGMWFKLHDTLDYECYDGYESSYGNTTDSIVCGEDGWSHLPTCYNSSENCGPPPPISNGDTTSFPQKVYLPWSRVEYQCQSYYELQGSKYVTCSNGDWSEPPRCISMKPCEFPEIQHGHLYYENTRRPYFPVATGQSYSYYCDQNFVTPSGSYWDYIHCTQDGWLPTVPCLRTCSKSDIEIENGFISESSSIYILNKEIQYKCKPGYATADGNSSGSITCLQNGWSAQPICIKFCDMPVFENSRAKSNGMRFKLHDTLDYECYDGYEISYGNTTGSIVCGEDGWSHFPTCYNSSEKCGPPPPISNGDTTSFLLKVYVPQSRVEYQCQSYYELQGSNYVTCSNGEWSEPPRCIHPCIITEENMNKNNIQLKGKSDIKYYAKTGDTIEFMCKLGYNANTSVLSFQAVCREGIVEYPRCE

SEQ ID NO: 17718 - protein, 331 aa, Homo sapiens
MLLLINVILTLWVSCANGQEVKPCDFPEIQHGGLYYKSLRRLYFPAAAGQSYSYYCDQNFVTPSGSYWDYIHCTQDGWSPTVPCLRTCSKSDIEIENGFISESSSIYILNKEIQYKCKPGYATADGNSSGSITCLQNGWSAQPICIKFCDMPVFENSRAKSNGMRFKLHDTLDYECYDGYEISYGNTTGSIVCGEDGWSHFPTCYNSSEKCGPPPPISNGDTTSFLLKVYVPQSRVEYQCQSYYELQGSNYVTCSNGEWSEPPRCIHPCIITEENMNKNNIQLKGKSDIKYYAKTGDTIEFMCKLGYNANTSVLSFQAVCREGIVEYPRCE

SEQ ID NO: 17719 - protein, 2912 aa, Homo sapiens
MGRRRRLCLQLYFLWLGCVVLWAQGTAGQPQPPPPKPPRPQPPPQQVRSATAGSEGGFLAPEYREEGAAVASRVRRRGQQDVLRGPNVCGSRFHSYCCPGWKTLPGGNQCIVPICRNSCGDGFCSRPNMCTCSSGQISSTCGSKSIQQCSVRCMNGGTCADDHCQCQKGYIGTYCGQPVCENGCQNGGRCIGPNRCACVYGFTGPQCERDYRTGPCFTQVNNQMCQGQLTGIVCTKTLCCATIGRAWGHPCEMCPAQPQPCRRGFIPNIRTGACQDVDECQAIPGICQGGNCINTVGSFECRCPAGHKQSETTQKCEDIDECSIIPGICETGECSNTVGSYFCVCPRGYVTSTDGSRCIDQRTGMCFSGLVNGRCAQELPGRMTKMQCCCEPGRCWGIGTIPEACPVRGSEEYRRLCMDGLPMGGIPGSAGSRPGGTGGNGFAPSGNGNGYGPGGTGFIPIPGGNGFSPGVGGAGVGAGGQGPIITGLTILNQTIDICKHHANLCLNGRCIPTVSSYRCECNMGYKQDANGDCIDVDECTSNPCTNGDCVNTPGSYYCKCHAGFQRTPTKQACIDIDECIQNGVLCKNGRCVNTDGSFQCICNAGFELTTDGKNCVDHDECTTTNMCLNGMCINEDGSFKCICKPGFVLAPNGRYCTDVDECQTPGICMNGHCINSEGSFRCDCPPGLAVGMDGRVCVDTHMRSTCYGGIKKGVCVRPFPGAVTKSECCCANPDYGFGEPCQPCPAKNSAEFHGLCSSGVGITVDGRDINECALDPDICANGICENLRGSYRCNCNSGYEPDASGRNCIDIDECLVNRLLCDNGLCRNTPGSYSCTCPPGYVFRTETETCEDINECESNPCVNGACRNNLGSFNCECSPGSKLSSTGLICIDSLKGTCWLNIQDSRCEVNINGATLKSECCATLGAAWGSPCERCELDTACPRGLARIKGVTCEDVNECEVFPGVCPNGRCVNSKGSFHCECPEGLTLDGTGRVCLDIRMEQCYLKWDEDECIHPVPGKFRMDACCCAVGAAWGTECEECPKPGTKEYETLCPRGAGFANRGDVLTGRPFYKDINECKAFPGMCTYGKCRNTIGSFKCRCNSGFALDMEERNCTDIDECRISPDLCGSGICVNTPGSFECECFEGYESGFMMMKNCMDIDECERNPLLCRGGTCVNTEGSFQCDCPLGHELSPSREDCVDINECSLSDNLCRNGKCVNMIGTYQCSCNPGYQATPDRQGCTDIDECMIMNGGCDTQCTNSEGSYECSCSEGYALMPDGRSCADIDECENNPDICDGGQCTNIPGEYRCLCYDGFMASMDMKTCIDVNECDLNSNICMFGECENTKGSFICHCQLGYSVKKGTTGCTDVDECEIGAHNCDMHASCLNIPGSFKCSCREGWIGNGIKCIDLDECSNGTHQCSINAQCVNTPGSYRCACSEGFTGDGFTCSDVDECAENINLCENGQCLNVPGAYRCECEMGFTPASDSRSCQDIDECSFQNICVFGTCNNLPGMFHCICDDGYELDRTGGNCTDIDECADPINCVNGLCVNTPGRYECNCPPDFQLNPTGVGCVDNRVGNCYLKFGPRGDGSLSCNTEIGVGVSRSSCCCSLGKAWGNPCETCPPVNSTEYYTLCPGGEGFRPNPITIILEDIDECQELPGLCQGGNCINTFGSFQCECPQGYYLSEDTRICEDIDECFAHPGVCGPGTCYNTLGNYTCICPPEYMQVNGGHNCMDMRKSFCYRSYNGTTCENELPFNVTKRMCCCTYNVGKAWNKPCEPCPTPGTADFKTICGNIPGFTFDIHTGKAVDIDECKEIPGICANGVCINQIGSFRCECPTGFSYNDLLLVCEDIDECSNGDNLCQRNADCINSPGSYRCECAAGFKLSPNGACVDRNECLEIPNVCSHGLCVDLQGSYQCICHNGFKASQDQTMCMDVDECERHPCGNGTCKNTVGSYNCLCYPGFELTHNNDCLDIDECSSFFGQVCRNGRCFNEIGSFKCLCNEGYELTPDGKNCIDTNECVALPGSCSPGTCQNLEGSFRCICPPGYEVKSENCIDINECDEDPNICLFGSCTNTPGGFQCLCPPGFVLSDNGRRCFDTRQSFCFTNFENGKCSVPKAFNTTKAKCCCSKMPGEGWGDPCELCPKDDEVAFQDLCPYGHGTVPSLHDTREDVNECLESPGICSNGQCINTDGSFRCECPMGYNLDYTGVRCVDTDECSIGNPCGNGTCTNVIGSFECNCNEGFEPGPMMNCEDINECAQNPLLCAFRCMNTFGSYECTCPIGYALREDQKMCKDLDECAEGLHDCESRGMMCKNLIGTFMCICPPGMARRPDGEGCVDENECRTKPGICENGRCVNIIGSYRCECNEGFQSSSSGTECLDNRQGLCFAEVLQTICQMASSSRNLVTKSECCCDGGRGWGHQCELCPLPGTAQYKKICPHGPGYTTDGRDIDECKVMPNLCTNGQCINTMGSFRCFCKVGYTTDISGTSCIDLDECSQSPKPCNYICKNTEGSYQCSCPRGYVLQEDGKTCKDLDECQTKQHNCQFLCVNTLGGFTCKCPPGFTQHHTACIDNNECGSQPSLCGAKGICQNTPGSFSCECQRGFSLDATGLNCEDVDECDGNHRCQHGCQNILGGYRCGCPQGYIQHYQWNQCVDENECSNPNACGSASCYNTLGSYKCACPSGFSFDQFSSACHDVNECSSSKNPCNYGCSNTEGGYLCGCPPGYYRVGQGHCVSGMGFNKGQYLSLDTEVDEENALSPEACYECKINGYSKKDSRQKRSIHEPDPTAVEQISLESVDMDSPVNMKFNLSHLGSKEHILELRPAIQPLNNHIRYVISQGNDDSVFRIHQRNGLSYLHTAKKKLMPGTYTLEITSIPLYKKKELKKLEESNEDDYLLGELGEALRMRLQIQLY

SEQ ID NO: 17720 - protein, 1473 aa, Homo sapiens
MGRRRRLCLQLYFLWLGCVVLWAQGTAGQPQPPPPKPPRPQPPPQQVRSATAGSEGGFLAPEYREEGAAVASRVRRRGQQDVLRGPNVCGSRFHSYCCPGWKTLPGGNQCIVIQQCSVRCMNGGTCADDHCQCQKGYIGTYCGQPVCENGCQNGGRCIGPNRCACVYGFTGPQCERDYRTGPCFTQVNNQMCQGQLTGIVCTKTLCCATIGRAWGHPCEMCPAQPQPCRRGFIPNIRTGACQDVDECQAIPGICQGGNCINTVGSFECRCPAGHKQSETTQKCEDIDECSIIPGICETGECSNTVGSYFCVCPRGYVTSTDGSRCIDQRTGMCFSGLVNGRCAQELPGRMTKMQCCCEPGRCWGIGTIPEACPVRGSEEYRRLCMDGLPMGGIPGSAGSRPGGTGGNGFAPSGNGNGYGPGGTGFIPIPGGNGFSPGVGGAGVGAGGQGPIITGLTILNQTIDICKHHANLCLNGRCIPTVSSYRCECNMGYKQDANGDCIDVDECTSNPCTNGDCVNTPGSYYCKCHAGFQRTPTKQACIDIDECIQNGVLCKNGRCVNTDGSFQCICNAGFELTTDGKNCVDHDECTTTNMCLNGMCINEDGSFKCICKPGFVLAPNGRYCTDVDECQTPGICMNGHCINSEGSFRCDCPPGLAVGMDGRVCVDTHMRSTCYGGIKKGVCVRPFPGAVTKSECCCANPDYGFGEPCQPCPAKNSAEFHGLCSSGVGITVDGRDINECALDPDICANGICENLRGSYRCNCNSGYEPDASGRNCIDIDECLVNRLLCDNGLCRNTPGSYSCTCPPGYVFRTETETCEDINECESNPCVNGACRNNLGSFNCECSPGSKLSSTGLICIDSLKGTCWLNIQDSRCEVNINGATLKSECCATLGAAWGSPCERCELDTACPRGLARIKGVTCEDVNECEVFPGVCPNGRCVNSKGSFHCECPEGLTLDGTGRVCLDIRMEQCYLKWDEDECIHPVPGKFRMDACCCAVGAAWGTECEECPKPGTKEYETLCPRGAGFANRGDVLTGRPFYKDINECKAFPGMCTYGKCRNTIGSFKCRCNSGFALDMEERNCTDIDECRISPDLCGSGICVNTPGSFECECFEGYESGFMMMKNCMDIDECERNPLLCRGGTCVNTEGSFQCDCPLGHELSPSREDCVDINECSLSDNLCRNGKCVNMIGTYQCSCNPGYQATPDRQGCTDIDECMIMNGGCDTQCTNSEGSYECSCSEGYALMPDGRSCADIDECENNPDICDGGQCTNIPGEYRCLCYDGFMASMDMKTCIDVNECDLNSNICMFGECENTKGSFICHCQLGYSVKKGTTGCTDVDECEIGAHNCDMHASCLNIPGSFKCSCREGWIGNGIKCIDLDECSNGTHQCSINAQCVNTPGSYRCACSEGFTGDGFTCSDVDECAENINLCENGQCLNVPGAYRCECEMGFTPASDSRSCQGGSPGFQLIFKLDQPQ

SEQ ID NO: 17721 - protein, 443 aa, Homo sapiens
MEVTADQPRWVSHHHPAVLNGQHPDTHHPGLSHSYMDAAQYPLPEEVDVLFNIDGQGNHVPPYYGNSVRATVQRYPPTHHGSQVCRPPLLHGSLPWLDGGKALGSHHTASPWNLSPFSKTSIHHGSPGPLSVYPPASSSSLSGGHASPHLFTFPPTPPKDVSPDPSLSTPGSAGSARQDEKECLKYQVPLPDSMKLESSHSRGSMTALGGASSSTHHPITTYPPYVPEYSSGLFPPSSLLGGSPTGFGCKSRPKARSSTGRECVNCGATSTPLWRRDGTGHYLCNACGLYHKMNGQNRPLIKPKRRLSAARRAGTSCANCQTTTTTLWRRNANGDPVCNACGLYYKLHNINRPLTMKKEGIQTRNRKMSSKSKKCKKVHDSLEDFPKNSSFNPAALSRHMSSLSHISPFSHSSHMLTTPTPMHPPSSLSFGPHHPSSMVTAMG

SEQ ID NO: 17722 - protein, 444 aa, Homo sapiens
MEVTADQPRWVSHHHPAVLNGQHPDTHHPGLSHSYMDAAQYPLPEEVDVLFNIDGQGNHVPPYYGNSVRATVQRYPPTHHGSQVCRPPLLHGSLPWLDGGKALGSHHTASPWNLSPFSKTSIHHGSPGPLSVYPPASSSSLSGGHASPHLFTFPPTPPKDVSPDPSLSTPGSAGSARQDEKECLKYQVPLPDSMKLESSHSRGSMTALGGASSSTHHPITTYPPYVPEYSSGLFPPSSLLGGSPTGFGCKSRPKARSSTEGRECVNCGATSTPLWRRDGTGHYLCNACGLYHKMNGQNRPLIKPKRRLSAARRAGTSCANCQTTTTTLWRRNANGDPVCNACGLYYKLHNINRPLTMKKEGIQTRNRKMSSKSKKCKKVHDSLEDFPKNSSFNPAALSRHMSSLSHISPFSHSSHMLTTPTPMHPPSSLSFGPHHPSSMVTAMG

SEQ ID NO: 17723 - protein, 480 aa, Homo sapiens
MEVAPEQPRWMAHPAVLNAQHPDSHHPGLAHNYMEPAQLLPPDEVDVFFNHLDSQGNPYYANPAHARARVSYSPAHARLTGGQMCRPHLLHSPGLPWLDGGKAALSAAAAHHHNPWTVSPFSKTPLHPSAAGGPGGPLSVYPGAGGGSGGGSGSSVASLTPTAAHSGSHLFGFPPTPPKEVSPDPSTTGAASPASSSAGGSAARGEDKDGVKYQVSLTESMKMESGSPLRPGLATMGTQPATHHPIPTYPSYVPAAAHDYSSGLFHPGGFLGGPASSFTPKQRSKARSCSEGRECVNCGATATPLWRRDGTGHYLCNACGLYHKMNGQNRPLIKPKRRLSAARRAGTCCANCQTTTTTLWRRNANGDPVCNACGLYYKLHNVNRPLTMKKEGIQTRNRKMSNKSKKSKKGAECFEELSKCMQEKSSPFSAAALAGHMAPVGHLPPFSHSGHILPTPTPIHPSSSLSFGHPHPSSMVTAMG

SEQ ID NO: 17724 - protein, 466 aa, Homo sapiens
MEVAPEQPRWMAHPAVLNAQHPDSHHPGLAHNYMEPAQLLPPDEVDVFFNHLDSQGNPYYANPAHARARVSYSPAHARLTGGQMCRPHLLHSPGLPWLDGGKAALSAAAAHHHNPWTVSPFSKTPLHPSAAGGPGGPLSVYPGAGGGSGGGSGSSVASLTPTAAHSGSHLFGFPPTPPKEVSPDPSTTGAASPASSSAGGSAARGEDKDGVKYQVSLTESMKMESGSPLRPGLATMGTQPATHHPIPTYPSYVPAAAHDYSSGLFHPGGFLGGPASSFTPKQRSKARSCSEGRECVNCGATATPLWRRDGTGHYLCNACGLYHKMNGQNRPLIKPKRRLTTTTTLWRRNANGDPVCNACGLYYKLHNVNRPLTMKKEGIQTRNRKMSNKSKKSKKGAECFEELSKCMQEKSSPFSAAALAGHMAPVGHLPPFSHSGHILPTPTPIHPSSSLSFGHPHPSSMVTAMG

SEQ ID NO: 17725 - protein, 941 aa, Homo sapiens
MASPRSSGQPGPPPPPPPPPARLLLLLLLPLLLPLAPGAWGWARGAPRPPPSSPPLSIMGLMPLTKEVAKGSIGRGVLPAVELAIEQIRNESLLRPYFLDLRLYDTECDNAKGLKAFYDAIKYGPNHLMVFGGVCPSVTSIIAESLQGWNLVQLSFAATTPVLADKKKYPYFFRTVPSDNAVNPAILKLLKHYQWKRVGTLTQDVQRFSEVRNDLTGVLYGEDIEISDTESFSNDPCTSVKKLKGNDVRIILGQFDQNMAAKVFCCAYEENMYGSKYQWIIPGWYEPSWWEQVHTEANSSRCLRKNLLAAMEGYIGVDFEPLSSKQIKTISGKTPQQYEREYNNKRSGVGPSKFHGYAYDGIWVIAKTLQRAMETLHASSRHQRIQDFNYTDHTLGRIILNAMNETNFFGVTGQVVFRNGERMGTIKFTQFQDSREVKVGEYNAVADTLEIINDTIRFQGSEPPKDKTIILEQLRKISLPLYSILSALTILGMIMASAFLFFNIKNRNQKLIKMSSPYMNNLIILGGMLSYASIFLFGLDGSFVSEKTFETLCTVRTWILTVGYTTAFGAMFAKTWRVHAIFKNVKMKKKIIKDQKLLVIVGGMLLIDLCILICWQAVDPLRRTVEKYSMEPDPAGRDISIRPLLEHCENTHMTIWLGIVYAYKGLLMLFGCFLAWETRNVSIPALNDSKYIGMSVYNVGIMCIIGAAVSFLTRDQPNVQFCIVALVIIFCSTITLCLVFVPKLITLRTNPDAATQNRRFQFTQNQKKEDSKTSTSVTSVNQASTSRLEGLQSENHRLRMKITELDKDLEEVTMQLQDTPEKTTYIKQNHYQELNDILNLGNFTESTDGGKAILKNHLDQNPQLQWNTTEPSRTCKDPIEDINSPEHIQRRLSLQLPILHHAYLPSIGGVDASCVSPCVSPTASPRHRHVPPSFRVMVSGL

SEQ ID NO: 17726 - protein, 183 aa, Homo sapiens
MEKRELKASVPKFDKIPWLSEASLVNKPLVLSLPRRYPHTSATFLTSSKKNMNLPILFQVPDVLSKARRNQCDSMLLRNQQLCSTCQEMKMVQPRTMKIPDDPKASFENCMSYRMSLHQPKFQTTPEPFHDDIPTESIHYRLPILGPRTAVFHGLLTEAYKTLKERQRSSLPRKEPIGKTTRQ

SEQ ID NO: 17727 - protein, 209 aa, Homo sapiens
MFVRPESGEQGPETLAPASGAEIQRFPVPAVEPVPAPGADSPPGTALELEEAPEPSCRCPGTAQDQPSEELPDFMAPPVEPPASALELKVWLELEVAERGGQHSSSQQLPHCSQSWAQWKLWRQRPGFAIWAPLPHWRGTSLIQQSSSPAAEGPAATAAGAVCLPAGGAGEQEKEPVSRGSSRSSCSQRRPPPPGMEVCPQLGIWAICP

SEQ ID NO: 17728 - protein, 1103 aa, Homo sapiens
MAAGCLLALTLTLFQSLLIGPSSEEPFPSAVTIKSWVDKMQEDLVTLAKTASGVNQLVDIYEKYQDLYTVEPNNARQLVEIAARDIEKLLSNRSKALVRLALEAEKVQAAHQWREDFASNEVVYYNAKDDLDPEKNDSEPGSQRIKPVFIEDANFGRQISYQHAAVHIPTDIYEGSTIVLNELNWTSALDEVFKKNREEDPSLLWQVFGSATGLARYYPASPWVDNSRTPNKIDLYDVRRRPWYIQGAASPKDMLILVDVSGSVSGLTLKLIRTSVSEMLETLSDDDFVNVASFNSNAQDVSCFQHLVQANVRNKKVLKDAVNNITAKGITDYKKGFSFAFEQLLNYNVSRANCNKIIMLFTDGGEERAQEIFNKYNKDKKVRVFTFSVGQHNYDRGPIQWMACENKGYYYEIPSIGAIRINTQEYLDVLGRPMVLAGDKAKQVQWTNVYLDALELGLVITGTLPVFNITGQFENKTNLKNQLILGVMGVDVSLEDIKRLTPRFTLCPNGYYFAIDPNGYVLLHPNLQPKPIGVGIPTINLRKRRPNIQNPKSQEPVTLDFLDAELENDIKVEIRNKMIDGESGEKTFRTLVKSQDERYIDKGNRTYTWTPVNGTDYSLALVLPTYSFYYIKAKLEETITQARYSETLKPDNFEESGYTFIAPRDYCNDLKISDNNTEFLLNFNEFIDRKTPNNPSCNADLINRVLLDAGFTNELVQNYWSKQKNIKGVKARFVVTDGGITRVYPKEAGENWQENPETYEDSFYKRSLDNDNYVFTAPYFNKSGPGAYESGIMVSKAVEIYIQGKLLKPAVVGIKIDVNSWIENFTKTSIRDPCAGPVCDCKRNSDVMDCVILDDGGFLLMANHDDYTNQIGRFFGEIDPSLMRHLVNISVYAFNKSYDYQSVCEPGAAPKQGAGHRSAYVPSVADILQIGWWATAAAWSILQQFLLSLTFPRLLEAVEMEDDDFTASLSKQSCITEQTQYFFDNDSKSFSGVLDCGNCSRIFHGEKLMNTNLIFIMVESKGTCPCDTRLLIQAEQTSDGPNPCDMVKQPRYRKGPDVCFDNNVLEDYTDCGGVSGLNPSLWYIIGIQFLLLWLVSGSTHRLL

SEQ ID NO: 17729 - protein, 1091 aa, Homo sapiens
MAAGCLLALTLTLFQSLLIGPSSEEPFPSAVTIKSWVDKMQEDLVTLAKTASGVNQLVDIYEKYQDLYTVEPNNARQLVEIAARDIEKLLSNRSKALVRLALEAEKVQAAHQWREDFASNEVVYYNAKDDLDPEKNDSEPGSQRIKPVFIEDANFGRQISYQHAAVHIPTDIYEGSTIVLNELNWTSALDEVFKKNREEDPSLLWQVFGSATGLARYYPASPWVDNSRTPNKIDLYDVRRRPWYIQGAASPKDMLILVDVSGSVSGLTLKLIRTSVSEMLETLSDDDFVNVASFNSNAQDVSCFQHLVQANVRNKKVLKDAVNNITAKGITDYKKGFSFAFEQLLNYNVSRANCNKIIMLFTDGGEERAQEIFNKYNKDKKVRVFTFSVGQHNYDRGPIQWMACENKGYYYEIPSIGAIRINTQEYLDVLGRPMVLAGDKAKQVQWTNVYLDALELGLVITGTLPVFNITGQFENKTNLKNQLILGVMGVDVSLEDIKRLTPRFTLCPNGYYFAIDPNGYVLLHPNLQPKNPKSQEPVTLDFLDAELENDIKVEIRNKMIDGESGEKTFRTLVKSQDERYIDKGNRTYTWTPVNGTDYSLALVLPTYSFYYIKAKLEETITQARSKKGKMKDSETLKPDNFEESGYTFIAPRDYCNDLKISDNNTEFLLNFNEFIDRKTPNNPSCNADLINRVLLDAGFTNELVQNYWSKQKNIKGVKARFVVTDGGITRVYPKEAGENWQENPETYEDSFYKRSLDNDNYVFTAPYFNKSGPGAYESGIMVSKAVEIYIQGKLLKPAVVGIKIDVNSWIENFTKTSIRDPCAGPVCDCKRNSDVMDCVILDDGGFLLMANHDDYTNQIGRFFGEIDPSLMRHLVNISVYAFNKSYDYQSVCEPGAAPKQGAGHRSAYVPSVADILQIGWWATAAAWSILQQFLLSLTFPRLLEAVEMEDDDFTASLSKQSCITEQTQYFFDNDSKSFSGVLDCGNCSRIFHGEKLMNTNLIFIMVESKGTCPCDTRLLIQAEQTSDGPNPCDMVKQPRYRKGPDVCFDNNVLEDYTDCGGVSGLNPSLWYIIGIQFLLLWLVSGSTHRLL

SEQ ID NO: 17730 - protein, 1086 aa, Homo sapiens
MAAGCLLALTLTLFQSLLIGPSSEEPFPSAVTIKSWVDKMQEDLVTLAKTASGVNQLVDIYEKYQDLYTVEPNNARQLVEIAARDIEKLLSNRSKALVRLALEAEKVQAAHQWREDFASNEVVYYNAKDDLDPEKNDSEPGSQRIKPVFIEDANFGRQISYQHAAVHIPTDIYEGSTIVLNELNWTSALDEVFKKNREEDPSLLWQVFGSATGLARYYPASPWVDNSRTPNKIDLYDVRRRPWYIQGAASPKDMLILVDVSGSVSGLTLKLIRTSVSEMLETLSDDDFVNVASFNSNAQDVSCFQHLVQANVRNKKVLKDAVNNITAKGITDYKKGFSFAFEQLLNYNVSRANCNKIIMLFTDGGEERAQEIFNKYNKDKKVRVFTFSVGQHNYDRGPIQWMACENKGYYYEIPSIGAIRINTQEYLDVLGRPMVLAGDKAKQVQWTNVYLDALELGLVITGTLPVFNITGQFENKTNLKNQLILGVMGVDVSLEDIKRLTPRFTLCPNGYYFAIDPNGYVLLHPNLQPKEPVTLDFLDAELENDIKVEIRNKMIDGESGEKTFRTLVKSQDERYIDKGNRTYTWTPVNGTDYSLALVLPTYSFYYIKAKLEETITQARSKKGKMKDSETLKPDNFEESGYTFIAPRDYCNDLKISDNNTEFLLNFNEFIDRKTPNNPSCNADLINRVLLDAGFTNELVQNYWSKQKNIKGVKARFVVTDGGITRVYPKEAGENWQENPETYEDSFYKRSLDNDNYVFTAPYFNKSGPGAYESGIMVSKAVEIYIQGKLLKPAVVGIKIDVNSWIENFTKTSIRDPCAGPVCDCKRNSDVMDCVILDDGGFLLMANHDDYTNQIGRFFGEIDPSLMRHLVNISVYAFNKSYDYQSVCEPGAAPKQGAGHRSAYVPSVADILQIGWWATAAAWSILQQFLLSLTFPRLLEAVEMEDDDFTASLSKQSCITEQTQYFFDNDSKSFSGVLDCGNCSRIFHGEKLMNTNLIFIMVESKGTCPCDTRLLIQAEQTSDGPNPCDMVKQPRYRKGPDVCFDNNVLEDYTDCGGVSGLNPSLWYIIGIQFLLLWLVSGSTHRLL

SEQ ID NO: 17731 - protein, 1079 aa, Homo sapiens
MAAGCLLALTLTLFQSLLIGPSSEEPFPSAVTIKSWVDKMQEDLVTLAKTASGVNQLVDIYEKYQDLYTVEPNNARQLVEIAARDIEKLLSNRSKALVRLALEAEKVQAAHQWREDFASNEVVYYNAKDDLDPEKNDSEPGSQRIKPVFIEDANFGRQISYQHAAVHIPTDIYEGSTIVLNELNWTSALDEVFKKNREEDPSLLWQVFGSATGLARYYPASPWVDNSRTPNKIDLYDVRRRPWYIQGAASPKDMLILVDVSGSVSGLTLKLIRTSVSEMLETLSDDDFVNVASFNSNAQDVSCFQHLVQANVRNKKVLKDAVNNITAKGITDYKKGFSFAFEQLLNYNVSRANCNKIIMLFTDGGEERAQEIFNKYNKDKKVRVFTFSVGQHNYDRGPIQWMACENKGYYYEIPSIGAIRINTQEYLDVLGRPMVLAGDKAKQVQWTNVYLDALELGLVITGTLPVFNITGQFENKTNLKNQLILGVMGVDVSLEDIKRLTPRFTLCPNGYYFAIDPNGYVLLHPNLQPKEPVTLDFLDAELENDIKVEIRNKMIDGESGEKTFRTLVKSQDERYIDKGNRTYTWTPVNGTDYSLALVLPTYSFYYIKAKLEETITQARYSETLKPDNFEESGYTFIAPRDYCNDLKISDNNTEFLLNFNEFIDRKTPNNPSCNADLINRVLLDAGFTNELVQNYWSKQKNIKGVKARFVVTDGGITRVYPKEAGENWQENPETYEDSFYKRSLDNDNYVFTAPYFNKSGPGAYESGIMVSKAVEIYIQGKLLKPAVVGIKIDVNSWIENFTKTSIRDPCAGPVCDCKRNSDVMDCVILDDGGFLLMANHDDYTNQIGRFFGEIDPSLMRHLVNISVYAFNKSYDYQSVCEPGAAPKQGAGHRSAYVPSVADILQIGWWATAAAWSILQQFLLSLTFPRLLEAVEMEDDDFTASLSKQSCITEQTQYFFDNDSKSFSGVLDCGNCSRIFHGEKLMNTNLIFIMVESKGTCPCDTRLLIQAEQTSDGPNPCDMVKQPRYRKGPDVCFDNNVLEDYTDCGGVSGLNPSLWYIIGIQFLLLWLVSGSTHRLL

SEQ ID NO: 17732 - protein, 1084 aa, Homo sapiens
MAAGCLLALTLTLFQSLLIGPSSEEPFPSAVTIKSWVDKMQEDLVTLAKTASGVNQLVDIYEKYQDLYTVEPNNARQLVEIAARDIEKLLSNRSKALVRLALEAEKVQAAHQWREDFASNEVVYYNAKDDLDPEKNDSEPGSQRIKPVFIEDANFGRQISYQHAAVHIPTDIYEGSTIVLNELNWTSALDEVFKKNREEDPSLLWQVFGSATGLARYYPASPWVDNSRTPNKIDLYDVRRRPWYIQGAASPKDMLILVDVSGSVSGLTLKLIRTSVSEMLETLSDDDFVNVASFNSNAQDVSCFQHLVQANVRNKKVLKDAVNNITAKGITDYKKGFSFAFEQLLNYNVSRANCNKIIMLFTDGGEERAQEIFNKYNKDKKVRVFTFSVGQHNYDRGPIQWMACENKGYYYEIPSIGAIRINTQEYLDVLGRPMVLAGDKAKQVQWTNVYLDALELGLVITGTLPVFNITGQFENKTNLKNQLILGVMGVDVSLEDIKRLTPRFTLCPNGYYFAIDPNGYVLLHPNLQPKNPKSQEPVTLDFLDAELENDIKVEIRNKMIDGESGEKTFRTLVKSQDERYIDKGNRTYTWTPVNGTDYSLALVLPTYSFYYIKAKLEETITQARYSETLKPDNFEESGYTFIAPRDYCNDLKISDNNTEFLLNFNEFIDRKTPNNPSCNADLINRVLLDAGFTNELVQNYWSKQKNIKGVKARFVVTDGGITRVYPKEAGENWQENPETYEDSFYKRSLDNDNYVFTAPYFNKSGPGAYESGIMVSKAVEIYIQGKLLKPAVVGIKIDVNSWIENFTKTSIRDPCAGPVCDCKRNSDVMDCVILDDGGFLLMANHDDYTNQIGRFFGEIDPSLMRHLVNISVYAFNKSYDYQSVCEPGAAPKQGAGHRSAYVPSVADILQIGWWATAAAWSILQQFLLSLTFPRLLEAVEMEDDDFTASLSKQSCITEQTQYFFDNDSKSFSGVLDCGNCSRIFHGEKLMNTNLIFIMVESKGTCPCDTRLLIQAEQTSDGPNPCDMVKQPRYRKGPDVCFDNNVLEDYTDCGGVSGLNPSLWYIIGIQFLLLWLVSGSTHRLL

SEQ ID NO: 17733 - protein, 116 aa, Homo sapiens
MESSRVRLLPLLGAALLLMLPLLGTRAQEDAELQPRALDIYSAVDDASHEKELIEALQEVLKKLKSKRVPIYEKKYGQVPMCDAGEQCAVRKGARIGKLCDCPRGTSCNSFLLKCL

SEQ ID NO: 17734 - protein, 614 aa, Homo sapiens
MWMAWCVAALSVVAVCGTSHETNTVLRVTKDVLSNAISGMLQQSDALHSALREVPLGVGDIPYNDFHVRGPPPVYTNGKKLDGIYQYGHIETNDNTAQLGGKYRYGEILESEGSIRDLRNSGYRSAENAYGGHRGLGRYRAAPVGRLHRRELQPGEIPPGVATGAVGPGGLLGTGGMLAADGILAGQGGLLGGGGLLGDGGLLGGGGVLGVLGEGGILSTVQGITGLRIVELTLPRVSVRLLPGVGVYLSLYTRVAINGKSLIGFLDIAVEVNITAKVRLTMDRTGYPRLVIERCDTLLGGIKVKLLRGLLPNLVDNLVNRVLADVLPDLLCPIVDVVLGLVNDQLGLVDSLIPLGILGSVQYTFSSLPLVTGEFLELDLNTLVGEAGGGLIDYPLGWPAVSPKPMPELPPMGDNTKSQLAMSANFLGSVLTLLQKQHALDLDITNGMFEELPPLTTATLGALIPKVFQQYPESCPLIIRIQVLNPPSVMLQKDKALVKVLATAEVMVSQPKDLETTICLIDVDTEFLASFSTEGDKLMIDAKLEKTSLNLRTSNVGNFDIGLMEVLVEKIFDLAFMPAMNAVLGSGVPLPKILNIDFSNADIDVLEDLLVLSA

SEQ ID NO: 17735 - protein, 575 aa, Homo sapiens
MLQQSDALHSALREVPLGVGDIPYNDFHVRGPPPVYTNGKKLDGIYQYGHIETNDNTAQLGGKYRYGEILESEGSIRDLRNSGYRSAENAYGGHRGLGRYRAAPVGRLHRRELQPGEIPPGVATGAVGPGGLLGTGGMLAADGILAGQGGLLGGGGLLGDGGLLGGGGVLGVLGEGGILSTVQGITGLRIVELTLPRVSVRLLPGVGVYLSLYTRVAINGKSLIGFLDIAVEVNITAKVRLTMDRTGYPRLVIERCDTLLGGIKVKLLRGLLPNLVDNLVNRVLADVLPDLLCPIVDVVLGLVNDQLGLVDSLIPLGILGSVQYTFSSLPLVTGEFLELDLNTLVGEAGGGLIDYPLGWPAVSPKPMPELPPMGDNTKSQLAMSANFLGSVLTLLQKQHALDLDITNGMFEELPPLTTATLGALIPKVFQQYPESCPLIIRIQVLNPPSVMLQKDKALVKVLATAEVMVSQPKDLETTICLIDVDTEFLASFSTEGDKLMIDAKLEKTSLNLRTSNVGNFDIGLMEVLVEKIFDLAFMPAMNAVLGSGVPLPKILNIDFSNADIDVLEDLLVLSA

SEQ ID NO: 17736 - protein, 99 aa, Homo sapiens
MKVSAALLCLLLMAATFSPQGLAQPDSVSIPITCCFNVINRKIPIQRLESYTRITNIQCPKEAVIFKTKRGKEVCADPKERWVRDSMKHLDQIFQNLKP

SEQ ID NO: 17737 - protein, 199 aa, Homo sapiens
MSSENCFVAENSSLHPESGQENDATSPHFSTRHEGSFQVPVLCAVMNVVFITILIIALIALSVGQYNCPGQYTFSMPSDSHVSSCSEDWVGYQRKCYFISTVKRSWTSAQNACSEHGATLAVIDSEKDMNFLKRYAGREEHWVGLKKEPGHPWKWSNGKEFNNWFNVTGSDKCVFLKNTEVSSMECEKNLYWICNKPYK

SEQ ID NO: 17738 - protein, 444 aa, Homo sapiens
MEEEGKKGKKPGIVSPFKRVFLKGEKSRDKKAHEKVTERRPLHTVVLSLPERVEPDRLLSDYIEKEVKYLGQLTSIPGYLNPSSRTEILHFIDNAKRAHQLPGHLTQEHDAVLSLSAYNVKLAWRDGEDIILRVPIHDIAAVSYVRDDAAHLVVLKTAQDPGISPSQSLCAESSRGLSAGSLSESAVGPVEACCLVILAAESKVAAEELCCLLGQVFQVVYTESTIDFLDRAIFDGASTPTHHLSLHSDDSSTKVDIKETYEVEASTFCFPESVDVGGASPHSKTISESELSASATELLQDYMLTLRTKLSSQEIQQFAALLHEYRNGASIHEFCINLRQLYGDSRKFLLLGLRPFIPEKDSQHFENFLETIGVKDGRGIITDSFGRHRRALSTTSSSTTNGNRATGSSDDRSAPSEGDEWDRMISDISSDIEALGCSMDQDSA

SEQ ID NO: 17739 - protein, 465 aa, Homo sapiens
MHSSCRQRRNQNLSKEIPQTEFHTGYSMENEPGIVSPFKRVFLKGEKSRDKKAHEKVTERRPLHTVVLSLPERVEPDRLLSDYIEKEVKYLGQLTSIPGYLNPSSRTEILHFIDNAKRAHQLPGHLTQEHDAVLSLSAYNVKLAWRDGEDIILRVPIHDIAAVSYVRDDAAHLVVLKTAQDPGISPSQSLCAESSRGLSAGSLSESAVGPVEACCLVILAAESKVAAEELCCLLGQVFQVVYTESTIDFLDRAIFDGASTPTHHLSLHSDDSSTKVDIKETYEVEASTFCFPESVDVGGASPHSKTISESELSASATELLQDYMLTLRTKLSSQEIQQFAALLHEYRNGASIHEFCINLRQLYGDSRKFLLLGLRPFIPEKDSQHFENFLETIGVKDGRGIITDSFGRHRRALSTTSSSTTNGNRATGSSDDRSAPSEGDEWDRMISDISSDIEALGCSMDQDSA

SEQ ID NO: 17740 - protein, 353 aa, Homo sapiens
MEEEGKKGKKPGIVSPFKRVFLKGEKSRDKKAHEKVTERRPLHTVVLSLPERVEPDRLLSDYIEKEVKYLGQLTSIPGYLNPSSRTEILHFIDNAKRAHQLPGHLTQEHDAVLSLSAYNVKLAWRDGEDIILRVPIHDIAAVSYVRDDAAHLVVLKTDDSSTKVDIKETYEVEASTFCFPESVDVGGASPHSKTISESELSASATELLQDYMLTLRTKLSSQEIQQFAALLHEYRNGASIHEFCINLRQLYGDSRKFLLLGLRPFIPEKDSQHFENFLETIGVKDGRGIITDSFGRHRRALSTTSSSTTNGNRATGSSDDRSAPSEGDEWDRMISDISSDIEALGCSMDQDSA

SEQ ID NO: 17741 - protein, 386 aa, Homo sapiens
MEEEGKKGKKYLGQLTSIPGYLNPSSRTEILHFIDNAKRAHQLPGHLTQEHDAVLSLSAYNVKLAWRDGEDIILRVPIHDIAAVSYVRDDAAHLVVLKTAQDPGISPSQSLCAESSRGLSAGSLSESAVGPVEACCLVILAAESKVAAEELCCLLGQVFQVVYTESTIDFLDRAIFDGASTPTHHLSLHSDDSSTKVDIKETYEVEASTFCFPESVDVGGASPHSKTISESELSASATELLQDYMLTLRTKLSSQEIQQFAALLHEYRNGASIHEFCINLRQLYGDSRKFLLLGLRPFIPEKDSQHFENFLETIGVKDGRGIITDSFGRHRRALSTTSSSTTNGNRATGSSDDRSAPSEGDEWDRMISDISSDIEALGCSMDQDSA

SEQ ID NO: 17742 - protein, 210 aa, Homo sapiens
MRPRLWLLLAAQLTVLHGNSVLQQTPAYIKVQTNKMVMLSCEAKISLSNMRIYWLRQRQAPSSDSHHEFLALWDSAKGTIHGEEVEQEKIAVFRDASRFILNLTSVKPEDSGIYFCMIVGSPELTFGKGTQLSVVDFLPTTAQPTKKSTLKKRVCRLPRPETQKGPLCSPITLGLLVAGVLVLLVSLGVAIHLCCRRRRARLRFMKQFYK

SEQ ID NO: 17743 - protein, 221 aa, Homo sapiens
MRPRLWLLLAAQLTVLHGNSVLQQTPAYIKVQTNKMVMLSCEAKISLSNMRIYWLRQRQAPSSDSHHEFLALWDSAKGTIHGEEVEQEKIAVFRDASRFILNLTSVKPEDSGIYFCMIVGSPELTFGKGTQLSVVDFLPTTAQPTKKSTLKKRVCRLPRPETQKGPLCSPITLGLLVAGVLVLLVSLGVAIHLCCRRRRARLRFMKQLRLHPLEKCSRMDY

SEQ ID NO: 17744 - protein, 213 aa, Homo sapiens
MRPRLWLLLAAQLTVLHGNSVLQQTPAYIKVQTNKMVMLSCEAKISLSNMRIYWLRQRQAPSSDSHHEFLALWDSAKGTIHGEEVEQEKIAVFRDASRFILNLTSVKPEDSGIYFCMIVGSPELTFGKGTQLSVVDFLPTTAQPTKKSTLKKRVCRLPRPETQKGRRRRARLRFMKQPQGEGISGTFVPQCLHGYYSNTTTSQKLLNPWILKT

SEQ ID NO: 17745 - protein, 246 aa, Homo sapiens
MRPRLWLLLAAQLTVLHGNSVLQQTPAYIKVQTNKMVMLSCEAKISLSNMRIYWLRQRQAPSSDSHHEFLALWDSAKGTIHGEEVEQEKIAVFRDASRFILNLTSVKPEDSGIYFCMIVGSPELTFGKGTQLSVVDFLPTTAQPTKKSTLKKRVCRLPRPETQKGPLCSPITLGLLVAGVLVLLVSLGVAIHLCCRRRRARLRFMKQKFNIVCLKISGFTTCCCFQILQISREYGFGVLLQKDIGQ

SEQ ID NO: 17746 - protein, 243 aa, Homo sapiens
MRPRLWLLLAAQLTVLHGNSVLQQTPAYIKVQTNKMVMLSCEAKISLSNMRIYWLRQRQAPSSDSHHEFLALWDSAKGTIHGEEVEQEKIAVFRDASRFILNLTSVKPEDSGIYFCMIVGSPELTFGKGTQLSVVDFLPTTAQPTKKSTLKKRVCRLPRPETQKGPLCSPITLGLLVAGVLVLLVSLGVAIHLCCRRRRARLRFMKQPQGEGISGTFVPQCLHGYYSNTTTSQKLLNPWILKT

SEQ ID NO: 17747 - protein, 180 aa, Homo sapiens
MRPRLWLLLAAQLTVLHGNSVLQQTPAYIKVQTNKMVMLSCEAKISLSNMRIYWLRQRQAPSSDSHHEFLALWDSAKGTIHGEEVEQEKIAVFRDASRFILNLTSVKPEDSGIYFCMIVGSPELTFGKGTQLSVVDFLPTTAQPTKKSTLKKRVCRLPRPETQKGRRRRARLRFMKQFYK

SEQ ID NO: 17748 - protein, 206 aa, Homo sapiens
MRPRLWLLLAAQLTVLHGNSVLQQTPAYIKVQTNKMVMLSCEAKISLSNMRIYWLRQRQAPSSDSHHEFLALWDSAKGTIHGEEVEQEKIAVFRDASRFILNLTSVKPEDSGIYFCMIVGSPELTFGKGTQLSVVDFLPTTAQPTKKSTLKKRVCRLPRPETQKDFTNKQRIGFWCPATKRHRSVMSTMWKNERRDTFNPGEFNGC

SEQ ID NO: 17749 - protein, 198 aa, Homo sapiens
MRPRLWLLLAAQLTVLHGNSVLQQTPAYIKVQTNKMVMLSCEAKISLSNMRIYWLRQRQAPSSDSHHEFLALWDSAKGTIHGEEVEQEKIAVFRDASRFILNLTSVKPEDSGIYFCMIVGSPELTFGKGTQLSVVDFLPTTAQPTKKSTLKKRVCRLPRPETQKGLKGKVYQEPLSPNACMDTTAILQPHRSCLTHGS

SEQ ID NO: 17750 - protein, 352 aa, Homo sapiens
MEGISIYTSDNYTEEMGSGDYDSMKEPCFREENANFNKIFLPTIYSIIFLTGIVGNGLVILVMGYQKKLRSMTDKYRLHLSVADLLFVITLPFWAVDAVANWYFGNFLCKAVHVIYTVNLYSSVLILAFISLDRYLAIVHATNSQRPRKLLAEKVVYVGVWIPALLLTIPDFIFANVSEADDRYICDRFYPNDLWVVVFQFQHIMVGLILPGIVILSCYCIIISKLSHSKGHQKRKALKTTVILILAFFACWLPYYIGISIDSFILLEIIKQGCEFENTVHKWISITEALAFFHCCLNPILYAFLGAKFKTSAQHALTSVSRGSSLKILSKGKRGGHSSVSTESESSSFHSS

SEQ ID NO: 17751 - protein, 356 aa, Homo sapiens
MSIPLPLLQIYTSDNYTEEMGSGDYDSMKEPCFREENANFNKIFLPTIYSIIFLTGIVGNGLVILVMGYQKKLRSMTDKYRLHLSVADLLFVITLPFWAVDAVANWYFGNFLCKAVHVIYTVNLYSSVLILAFISLDRYLAIVHATNSQRPRKLLAEKVVYVGVWIPALLLTIPDFIFANVSEADDRYICDRFYPNDLWVVVFQFQHIMVGLILPGIVILSCYCIIISKLSHSKGHQKRKALKTTVILILAFFACWLPYYIGISIDSFILLEIIKQGCEFENTVHKWISITEALAFFHCCLNPILYAFLGAKFKTSAQHALTSVSRGSSLKILSKGKRGGHSSVSTESESSSFHSS

SEQ ID NO: 17752 - protein, 128 aa, Homo sapiens
MSLRLDTTPSCNSARPLHALQVLLLLSLLLTALASSTKGQTKRNLAKGKEESLDSDLYAELRCMCIKTTSGIHPKNIQSLEVIGKGTHCNQVEVIATLKDGRKICLDPDAPRIKKIVQKKLAGDESAD

SEQ ID NO: 17753 - protein, 420 aa, Homo sapiens
MPLQVSDYSWQQTKTAVFLSLPLKGVCVRDTDVFCTENYLKVNFPPFLFEAFLYAPIDDESSKAKIGNDTIVFTLYKKEAAMWETLSVTGVDKEMMQRIREKSILQAQERAKEATEAKAAAKREDQKYALSVMMKIEEEERKKIEDMKENERIKATKALEAWKEYQRKAEEQKKIQREEKLCQKEKQIKEERKKIKYKSLTRNLASRNLAPKGRNSENIFTEKLKEDSIPAPRSVGSIKINFTPRVFPTALRESQVAEEEEWLHKQAEARRAMNTDIAELCDLKEEEKNPEWLKDKGNKLFATENYLAAINAYNLAIRLNNKMPLLYLNRAACHLKLKNLHKAIEDSSKALELLMPPVTDNANARMKAHVRRGTAFCQLELYVEGLQDYEAALKIDPSNKIVQIDAEKIRNVIQGTELKS

SEQ ID NO: 17754 - protein, 381 aa, Homo sapiens
MPLQVSDYSWQQTKTAVFLSLPLKGVCVRDTDVFCTENYLKVNFPPFLFEAFLYAPIDDESSKAKIGNDTIVFTLYKKEAAMWETLSVTGVDKEMMQRIREKSILQAQERAKEATEAKAAAKREDQKYALSVMMKIEEEERKKIEDMKENERIKATKALEAWKEYQRKAEEQKKIQREEKLCQKEKQIKEERKKIKYKSLTRNLASRNLAPKGRNSENIFTEKLKEDSIPAPRSVGSIKINFTPRVFPTALRESQVAEEEEWLHKQAEARRAMNTDIAELCDLKEEEKNPEWLKDKGNKLFATENYLAAINAYNLAIRLNNKMPLLYLNRAACHLKLKNLHKAIEDSSKEFCSLEGIECQASEPKLSHHIPSDLHVYIQMA

SEQ ID NO: 17755 - protein, 376 aa, Homo sapiens
MPLQVSDYSWQQTKTAVFLSLPLKGVCVRDTDVFCTENYLKVNFPPFLFEAFLYAPIDDESSKAKIGNDTIVFTLYKKEAAMWETLSVTGVDKEMMQRIREKSILQAQERAKEATEAKAAAKREDQKYALSVMMKIEEEERKKIEDMKENERIKATKALEAWKEYQRKAEEQKKIQREEKLCQKEKQIKEERKKIKYKSLTRNLASRNLAPKGRNSENIFTEKLKEDSIPAPRSVGSIKINFTPRVFPTALRESQVAEEEEWLHKQAEARRAMNTDIAELCDLKEEEKNPEWLKDKGNKLFATENYLAAINAYNLAIRLNNKMPLLYLNRAACHLKLKNLHKAIEDSSKAYRIMKRHLRLIHPTKLYKLMLRRFGM

SEQ ID NO: 17756 - protein, 226 aa, Homo sapiens
MRAPPLLLLLAACAPPPCAAAAPTPPGWEPTPDAPWCPYKVLPEGPEAGGGRLCFRSPARGFRCQAPGCVLHAPAGRSLRASVLRNRSVLLQWRLAPAAARRVRAFALNCSWRGAYTRFPCERVLLGASCRDYLLPDVHDSVLYRLCLQPLPLRAGPAAAAPETPEPAECVEFTAEPAGMQDIVVAMTAVGGSICVMLVVICLLVAYITENLMRPALARPGLRRHP

SEQ ID NO: 17757 - protein, 1269 aa, Homo sapiens
MEATGVLPFVRGVDLSGNDFKGGYFPENVKAMTSLRWLKLNRTGLCYLPEELAALQKLEHLSVSHNNLTTLHGELSSLPSLRAIVARANSLKNSGVPDDIFKLDDLSVLDLSHNQLTECPRELENAKNMLVLNLSHNSIDTIPNQLFINLTDLLYLDLSENRLESLPPQMRRLVHLQTLVLNGNPLLHAQLRQLPAMTALQTLHLRSTQRTQSNLPTSLEGLSNLADVDLSCNDLTRVPECLYTLPSLRRLNLSSNQITELSLCIDQWVHVETLNLSRNQLTSLPSAICKLSKLKKLYLNSNKLDFDGLPSGIGKLTNLEEFMAANNNLELVPESLCRCPKLRKLVLNKNHLVTLPEAIHFLTEIEVLDVRENPNLVMPPKPADRAAEWYNIDFSLQNQLRLAGASPATVAAAAAAGSGPKDPMARKMRLRRRKDSAQDDQAKQVLKGMSDVAQEKNKKQEESADARAPSGKVRRWDQGLEKPRLDYSEFFTEDVGQLPGLTIWQIENFVPVLVEEAFHGKFYEADCYIVLKTFLDDSGSLNWEIYYWIGGEATLDKKACSAIHAVNLRNYLGAECRTVREEMGDESEEFLQVFDNDISYIEGGTASGFYTVEDTHYVTRMYRVYGKKNIKLEPVPLKGTSLDPRFVFLLDRGLDIYVWRGAQATLSSTTKARLFAEKINKNERKGKAEITLLVQGQELPEFWEALGGEPSEIKKHVPEDFWPPQPKLYKVGLGLGYLELPQINYKLSVEHKQRPKVELMPRMRLLQSLLDTRCVYILDCWSDVFIWLGRKSPRLVRAAALKLGQELCGMLHRPRHATVSRSLEGTEAQVFKAKFKNWDDVLTVDYTRNAEAVLQSPGLSGKVKRDAEKKDQMKADLTALFLPRQPPMSLAEAEQLMEEWNEDLDGMEGFVLEGKKFARLPEEEFGHFYTQDCYVFLCRYWVPVEYEEEEKKEDKEEKAEGKEGEEATAEAEEKQPEEDFQCIVYFWQGREASNMGWLTFTFSLQKKFESLFPGKLEVVRMTQQQENPKFLSHFKRKFIIHRGKRKAVQGAQQPSLYQIRTNGSALCTRCIQINTDSSLLNSEFCFILKVPFESEDNQGIVYAWVGRASDPDEAKLAEDILNTMFDTSYSKQVINEGEEPENFFWVGIGAQKPYDDDAEYMKHTRLFRCSNEKGYFAVTEKCSDFCQDDLADDDIMLLDNGQEVYMWVGTQTSQVEIKLSLKACQVYIQHMRSKEHERPRRLRLVRKGNEQHAFTRCFHAWSAFCKALA

SEQ ID NO: 17758 - protein, 1214 aa, Homo sapiens
MEATGVLPFVRGVDLSGNDFKGGYFPENVKAMTSLRWLKLNRTGLCYLPEELAALQKLEHLSVSHNNLTTLHGELSSLPSLRAIVARANSLKNSGVPDDIFKLDDLSVLDLSHNQLTECPRELENAKNMLVLNLSHNRQLPAMTALQTLHLRSTQRTQSNLPTSLEGLSNLADVDLSCNDLTRVPECLYTLPSLRRLNLSSNQITELSLCIDQWVHVETLNLSRNQLTSLPSAICKLSKLKKLYLNSNKLDFDGLPSGIGKLTNLEEFMAANNNLELVPESLCRCPKLRKLVLNKNHLVTLPEAIHFLTEIEVLDVRENPNLVMPPKPADRAAEWYNIDFSLQNQLRLAGASPATVAAAAAGSGPKDPMARKMRLRRRKDSAQDDQAKQVLKGMSDVAQEKNKKQEESADARAPSGKVRRWDQGLEKPRLDYSEFFTEDVGQLPGLTIWQIENFVPVLVEEAFHGKFYEADCYIVLKTFLDDSGSLNWEIYYWIGGEATLDKKACSAIHAVNLRNYLGAECRTVREEMGDESEEFLQVFDNDISYIEGGTASGFYTVEDTHYVTRMYRVYGKKNIKLEPVPLKGTSLDPRFVFLLDRGLDIYVWRGAQATLSSTTKARLFAEKINKNERKGKAEITLLVQGQELPEFWEALGGEPSEIKKHVPEDFWPPQPKLYKVGLGLGYLELPQINYKLSVEHKQRPKVELMPRMRLLQSLLDTRCVYILDCWSDVFIWLGRKSPRLVRAAALKLGQELCGMLHRPRHATVSRSLEGTEAQVFKAKFKNWDDVLTVDYTRNAEAVLQSPGLSGKVKRDAEKKDQMKADLTALFLPRQPPMSLAEAEQLMEEWNEDLDGMEGFVLEGKKFARLPEEEFGHFYTQDCYVFLCRYWVPVEYEEEEKKEDKEEKAEGKEGEEATAEAEEKQPEEDFQCIVYFWQGREASNMGWLTFTFSLQKKFESLFPGKLEVVRMTQQQENPKFLSHFKRKFIIHRGKRKAVQGAQQPSLYQIRTNGSALCTRCIQINTDSSLLNSEFCFILKVPFESEDNQGIVYAWVGRASDPDEAKLAEDILNTMFDTSYSKQVINEGEEPENFFWVGIGAQKPYDDDAEYMKHTRLFRCSNEKGYFAVTEKCSDFCQDDLADDDIMLLDNGQEVYMWVGTQTSQVEIKLSLKACQVYIQHMRSKEHERPRRLRLVRKGNEQHAFTRCFHAWSAFCKALA

SEQ ID NO: 17759 - protein, 1258 aa, Homo sapiens
MDLRGLRPVPGGYFPENVKAMTSLRWLKLNRTGLCYLPEELAALQKLEHLSVSHNNLTTLHGELSSLPSLRAIVARANSLKNSGVPDDIFKLDDLSVLDLSHNQLTECPRELENAKNMLVLNLSHNSIDTIPNQLFINLTDLLYLDLSENRLESLPPQMRRLVHLQTLVLNGNPLLHAQLRQLPAMTALQTLHLRSTQRTQSNLPTSLEGLSNLADVDLSCNDLTRVPECLYTLPSLRRLNLSSNQITELSLCIDQWVHVETLNLSRNQLTSLPSAICKLSKLKKLYLNSNKLDFDGLPSGIGKLTNLEEFMAANNNLELVPESLCRCPKLRKLVLNKNHLVTLPEAIHFLTEIEVLDVRENPNLVMPPKPADRAAEWYNIDFSLQNQLRLAGASPATVAAAAAAGSGPKDPMARKMRLRRRKDSAQDDQAKQVLKGMSDVAQEKNKKQEESADARAPSGKVRRWDQGLEKPRLDYSEFFTEDVGQLPGLTIWQIENFVPVLVEEAFHGKFYEADCYIVLKTFLDDSGSLNWEIYYWIGGEATLDKKACSAIHAVNLRNYLGAECRTVREEMGDESEEFLQVFDNDISYIEGGTASGFYTVEDTHYVTRMYRVYGKKNIKLEPVPLKGTSLDPRFVFLLDRGLDIYVWRGAQATLSSTTKARLFAEKINKNERKGKAEITLLVQGQELPEFWEALGGEPSEIKKHVPEDFWPPQPKLYKVGLGLGYLELPQINYKLSVEHKQRPKVELMPRMRLLQSLLDTRCVYILDCWSDVFIWLGRKSPRLVRAAALKLGQELCGMLHRPRHATVSRSLEGTEAQVFKAKFKNWDDVLTVDYTRNAEAVLQSPGLSGKVKRDAEKKDQMKADLTALFLPRQPPMSLAEAEQLMEEWNEDLDGMEGFVLEGKKFARLPEEEFGHFYTQDCYVFLCRYWVPVEYEEEEKKEDKEEKAEGKEGEEATAEAEEKQPEEDFQCIVYFWQGREASNMGWLTFTFSLQKKFESLFPGKLEVVRMTQQQENPKFLSHFKRKFIIHRGKRKAVQGAQQPSLYQIRTNGSALCTRCIQINTDSSLLNSEFCFILKVPFESEDNQGIVYAWVGRASDPDEAKLAEDILNTMFDTSYSKQVINEGEEPENFFWVGIGAQKPYDDDAEYMKHTRLFRCSNEKGYFAVTEKCSDFCQDDLADDDIMLLDNGQEVYMWVGTQTSQVEIKLSLKACQVYIQHMRSKEHERPRRLRLVRKGNEQHAFTRCFHAWSAFCKALA

SEQ ID NO: 17760 - protein, 365 aa, Homo sapiens
MELDFGHFDERDKTSRNMRGSRMNGLPSPTHSAHCSFYRTRTLQALSNEKKAKKVRFYRNGDRYFKGIVYAVSSDRFRSFDALLADLTRSLSDNINLPQGVRYIYTIDGSRKIGSMDELEEGESYVCSSDNFFKKVEYTKNVNPNWSVNVKTSANMKAPQSLASSNSAQARENKDFVRPKLVTIIRSGVKPRKAVRVLLNKKTAHSFEQVLTDITEAIKLETGVVKKLYTLDGKQVTCLHDFFGDDDVFIACGPEKFRYAQDDFSLDENECRVMKGNPSATAGPKASPTPQKTSAKSPGPMRRSKSPADSGNDQDANGTSSSQLSTPKSKQSPISTPTSPGSLRKHKDLYLPLSLDDSDSLGDSM

SEQ ID NO: 17761 - protein, 360 aa, Homo sapiens
MELDFGHFDERDKTSRNMRGSRMNGLPSPTHSAHCSFYRTRTLQALSNEKKAKKVRFYRNGDRYFKGIVYAVSSDRFRSFDALLADLTRSLSDNINLPQGVRYIYTIDGSRKIGSMDELEEGESYVCSSDNFFKKVEYTKNVNPNWSVNVKTSANMKAPQSLASSNSAQARENKDFVRPKLVTIIRSGVKPRKAVRVLLNKKTAHSFEQVLTDITEAIKLETGVVKKLYTLDGKQVTCLHDFFGDDDVFIACGPEKFRYAQDDFSLDENECRVMKGNPSATAGPKASPTPQKTSAKSPGPMRRSKSPADSANGTSSSQLSTPKSKQSPISTPTSPGSLRKHKDLYLPLSLDDSDSLGDSM

SEQ ID NO: 17762 - protein, 707 aa, Homo sapiens
MNQELLSVGSKRRRTGGSLRGNPSSSQVDEEQMNRVVEEEQQQQLRQQEEEHTARNGEVVGVEPRPGGQNDSQQGQLEENNNRFISVDEDSSGNQEEQEEDEEHAGEQDEEDEEEEEMDQESDDFDQSDDSSREDEHTHTNSVTNSSSIVDLPVHQLSSPFYTKTTKMKRKLDHGSEVRSFSLGKKPCKVSEYTSTTGLVPCSATPTTFGDLRAANGQGQQRRRITSVQPPTGLQEWLKMFQSWSGPEKLLALDELIDSCEPTQVKHMMQVIEPQFQRDFISLLPKELALYVLSFLEPKDLLQAAQTCRYWRILAEDNLLWREKCKEEGIDEPLHIKRRKVIKPGFIHSPWKSAYIRQHRIDTNWRRGELKSPKVLKGHDDHVITCLQFCGNRIVSGSDDNTLKVWSAVTGKCLRTLVGHTGGVWSSQMRDNIIISGSTDRTLKVWNAETGECIHTLYGHTSTVRCMHLHEKRVVSGSRDATLRVWDIETGQCLHVLMGHVAAVRCVQYDGRRVVSGAYDFMVKVWDPETETCLHTLQGHTNRVYSLQFDGIHVVSGSLDTSIRVWDVETGNCIHTLTGHQSLTSGMELKDNILVSGNADSTVKIWDIKTGQCLQTLQGPNKHQSAVTCLQFNKNFVITSSDDGTVKLWDLKTGEFIRNLVTLESGGSGGVVWRIRASNTKLVCAVGSRNGTEETKLLVLDFDVDMK

SEQ ID NO: 17763 - protein, 627 aa, Homo sapiens
MCVPRSGLILSCICLYCGVLLPVLLPNLPFLTCLSMSTLESVTYLPEKGLYCQRLPSSRTHGGTESLKGKNTENMGFYGTLKMIFYKMKRKLDHGSEVRSFSLGKKPCKVSEYTSTTGLVPCSATPTTFGDLRAANGQGQQRRRITSVQPPTGLQEWLKMFQSWSGPEKLLALDELIDSCEPTQVKHMMQVIEPQFQRDFISLLPKELALYVLSFLEPKDLLQAAQTCRYWRILAEDNLLWREKCKEEGIDEPLHIKRRKVIKPGFIHSPWKSAYIRQHRIDTNWRRGELKSPKVLKGHDDHVITCLQFCGNRIVSGSDDNTLKVWSAVTGKCLRTLVGHTGGVWSSQMRDNIIISGSTDRTLKVWNAETGECIHTLYGHTSTVRCMHLHEKRVVSGSRDATLRVWDIETGQCLHVLMGHVAAVRCVQYDGRRVVSGAYDFMVKVWDPETETCLHTLQGHTNRVYSLQFDGIHVVSGSLDTSIRVWDVETGNCIHTLTGHQSLTSGMELKDNILVSGNADSTVKIWDIKTGQCLQTLQGPNKHQSAVTCLQFNKNFVITSSDDGTVKLWDLKTGEFIRNLVTLESGGSGGVVWRIRASNTKLVCAVGSRNGTEETKLLVLDFDVDMK

SEQ ID NO: 17764 - protein, 589 aa, Homo sapiens
MSKPGKPTLNHGLVPVDLKSAKEPLPHQTVMKIFSISIIAQGLPFCRRRMKRKLDHGSEVRSFSLGKKPCKVSEYTSTTGLVPCSATPTTFGDLRAANGQGQQRRRITSVQPPTGLQEWLKMFQSWSGPEKLLALDELIDSCEPTQVKHMMQVIEPQFQRDFISLLPKELALYVLSFLEPKDLLQAAQTCRYWRILAEDNLLWREKCKEEGIDEPLHIKRRKVIKPGFIHSPWKSAYIRQHRIDTNWRRGELKSPKVLKGHDDHVITCLQFCGNRIVSGSDDNTLKVWSAVTGKCLRTLVGHTGGVWSSQMRDNIIISGSTDRTLKVWNAETGECIHTLYGHTSTVRCMHLHEKRVVSGSRDATLRVWDIETGQCLHVLMGHVAAVRCVQYDGRRVVSGAYDFMVKVWDPETETCLHTLQGHTNRVYSLQFDGIHVVSGSLDTSIRVWDVETGNCIHTLTGHQSLTSGMELKDNILVSGNADSTVKIWDIKTGQCLQTLQGPNKHQSAVTCLQFNKNFVITSSDDGTVKLWDLKTGEFIRNLVTLESGGSGGVVWRIRASNTKLVCAVGSRNGTEETKLLVLDFDVDMK

SEQ ID NO: 17765 - protein, 836 aa, Homo sapiens
MKPSPAGTAKELEPPAPARGEQRTAEPEGRWREKGEADTERQRTRERQEATLAGLAELEYLRQRQELLVRGALRGAGGAGAAAPRAGELLGEAAQRSRLEEKFLEENILLLRKQLNCLRRRDAGLLNQLQELDKQISDLRLDVEKTSEEHLETDSRPSSGFYELSDGASGSLSNSSNSVFSECLSSCHSSTCFCSPLEATLSLSDGCPKSADLIGLLEYKEGHCEDQASGAVCRSLSTPQFNSLDVIADVNPKYQCDLVSKNGNDVYRYPSPLHAVAVQSPMFLLCLTGNPLREEDRLGNHASDICGGSELDAVKTDSSLPSPSSLWSASHPSSSKKMDGYILSLVQKKTHPVRTNKPRTSVNADPTKGLLRNGSVCVRAPGGVSQGNSVNLKNSKQACLPSGGIPSLNNGTFSPPKQWSKESKAEQAESKRVPLPEGCPSGAASDLQSKHLPKTAKPASQEHARCSAIGTGESPKESAQLSGASPKESPSRGPAPPQENKVVQPLKKMSQKNSLQGVPPATPPLLSTAFPVEERPALDFKSEGSSQSLEEAHLVKAQFIPGQQPSVRLHRGHRNMGVVKNSSLKHRGPALQGLENGLPTVREKTRAGSKKCRFPDDLDTNKKLKKASSKGRKSGGGPEAGVPGRPAGGGHRAGSRAHGHGREAVVAKPKHKRTDYRRWKSSAEISYEEALRRARRGRRENVGLYPAPVPLPYASPYAYVASDSEYSAECESLFHSTVVDTSEDEQSNYTTNCFGDSESSVSEGEFVGESTTTSDSEESGGLIWSQFVQTLPIQTVTAPDLHNHPAKTFVKIKASHNLKKKILRFRSGSLKLMTTV

SEQ ID NO: 17766 - protein, 799 aa, Homo sapiens
MKPSPAGTAKELEPPAPARGEQRTAEPEGRWREKGEADTERQRTRERQEATLAGLAELEYLRQRQELLVRGALRGAGGAGAAAPRAGELLGEAAQRSRLEEKFLEENILLLRKQLNCLRRRDAGLLNQLQELDKQISDLRLDVEKTSEEHLETDSRPSSGFYELSDGASGSLSNSSNSVFSECLSSCHSSTCFCSPLEATLSLSDGCPKSADVNPKYQCDLVSKNGNDVYRYPSPLHAVAVQSPMFLLCLTGNPLREEDRLGNHASDICGGSELDAVKTDSSLPSPSSLWSASHPSSSKKMDGYILSLVQKKTHPVRTNKPRTSVNADPTKGLLRNGSVCVRAPGGVSQGNSVNLKNSKQACLPSGGIPSLNNGTFSPPKQWSKESKAEQAESKRVPLPEGCPSGAASDLQSKHLPKTAKPASQEHARCSAIGTGESPKESAQLSGASPKESPSRGPAPPQENKVVQPLKKMSQKNSLQGVPPATPPLLSTAFPVEERPALDFKSEGSSQSLEEAHLVKAQFIPGQQPSVRLHRGHRNMGVVKNSSLKHRGPALQGLENGLPTVREKTRAGSKKCRFPDDLDTNKKLKKASSKGRKSGGGPEAGVPGRPAGGGHRAGSRAHGHGREAVVAKPKHKRTDYRRWKSSAEISYEEALRRARRGRRENVGLYPAPVPLPYASPYAYVASDSEYSAECESLFHSTVVDTSEDEQSNYTTNCFGDSESSVSEGEFVGESTTTSDSEESGGLIWSQFVQTLPIQTVTAPDLHNHPAKTFVKIKASHNLKKKILRFRSGSLKLMTTV

SEQ ID NO: 17767 - protein, 98 aa, Homo sapiens
MMCGAPSATQPATAETQHIADQVRSQLEEKENKKFPVFKAVSFKSQVVAGTNYFIKVHVGDEDFVHLRVFQSLPHENKPLTLSNYQTNKAKHDELTYF

SEQ ID NO: 17768 - protein, 453 aa, Homo sapiens
MARKVVSRKRKAPASPGAGSDAQGPQFGWDHSLHKRKRLPPVKRSLVYYLKNREVRLQNETSYSRVLHGYAAQQLPSLLKEREFHLGTLNKVFASQWLNHRQVVCGTKCNTLFVVDVQTSQITKIPILKDREPGGVTQQGCGIHAIELNPSRTLLATGGDNPNSLAIYRLPTLDPVCVGDDGHKDWIFSIAWISDTMAVSGSRDGSMGLWEVTDDVLTKSDARHNVSRVPVYAHITHKALKDIPKEDTNPDNCKVRALAFNNKNKELGAVSLDGYFHLWKAENTLSKLLSTKLPYCRENVCLAYGSEWSVYAVGSQAHVSFLDPRQPSYNVKSVCSRERGSGIRSVSFYEHIITVGTGQGSLLFYDIRAQRFLEERLSACYGSKPRLAGENLKLTTGKGWLNHDETWRNYFSDIDFFPNAVYTHCYDSSGTKLFVAGGPLPSGLHGNYAGLWS

SEQ ID NO: 17769 - protein, 445 aa, Homo sapiens
MKVKMLSRNPDNYVRETKLDLQRVPRNYDPALHPFEVPREYIRALNATKLERVFAKPFLASLDGHRDGVNCLAKHPEKLATVLSGACDGEVRIWNLTQRNCIRTIQAHEGFVRGICTRFCGTSFFTVGDDKTVKQWKMDGPGYGDEEEPLHTILGKTVYTGIDHHWKEAVFATCGQQVDIWDEQRTNPICSMTWGFDSISSVKFNPIETFLLGSCASDRNIVLYDMRQATPLKKVILDMRTNTICWNPMEAFIFTAANEDYNLYTFDMRALDTPVMVHMDHVSAVLDVDYSPTGKEFVSASFDKSIRIFPVDKSRSREVYHTKRMQHVICVKWTSDSKYIMCGSDEMNIRLWKANASEKLGVLTSREKAAKDYNQKLKEKFQHYPHIKRIARHRHLPKSIYSQIQEQRIMKEARRRKEVNRIKHSKPGSVPLVSEKKKHVVAVVK

SEQ ID NO: 17770 - protein, 96 aa, Homo sapiens
MKVKMLSRNPDNYVRETKLDLQRVPRNYDPALHPFEVPREYIRALNATKLERVFAKPFLASLDGHRDGVNCLAKHPEKLATVLSGACDGELVMTKL

SEQ ID NO: 17771 - protein, 397 aa, Homo sapiens
MVKETQYYDILGVKPSASPEEIKKAYRKLALKYHPDKNPDEGEKFKLISQAYEVLSDPKKRDVYDQGGEQAIKEGGSGSPSFSSPMDIFDMFFGGGGRMARERRGKNVVHQLSVTLEDLYNGVTKKLALQKNVICEKCEGVGGKKGSVEKCPLCKGRGMQIHIQQIGPGMVQQIQTVCIECKGQGERINPKDRCESCSGAKVIREKKIIEVHVEKGMKDGQKILFHGEGDQEPELEPGDVIIVLDQKDHSVFQRRGHDLIMKMKIQLSEALCGFKKTIKTLDNRILVITSKAGEVIKHGDLRCVRDEGMPIYKAPLEKGILIIQFLVIFPEKHWLSLEKLPQLEALLPPRQKVRITDDMDQVELKEFCPNEQNWRQHREAYEEDEDGPQAGVQCQTA

SEQ ID NO: 17772 - protein, 426 aa, Homo sapiens
MARGGSQSWSSGESDGQPKEQTPEKPRHKMVKETQYYDILGVKPSASPEEIKKAYRKLALKYHPDKNPDEGEKFKLISQAYEVLSDPKKRDVYDQGGEQAIKEGGSGSPSFSSPMDIFDMFFGGGGRMARERRGKNVVHQLSVTLEDLYNGVTKKLALQKNVICEKCEGVGGKKGSVEKCPLCKGRGMQIHIQQIGPGMVQQIQTVCIECKGQGERINPKDRCESCSGAKVIREKKIIEVHVEKGMKDGQKILFHGEGDQEPELEPGDVIIVLDQKDHSVFQRRGHDLIMKMKIQLSEALCGFKKTIKTLDNRILVITSKAGEVIKHGDLRCVRDEGMPIYKAPLEKGILIIQFLVIFPEKHWLSLEKLPQLEALLPPRQKVRITDDMDQVELKEFCPNEQNWRQHREAYEEDEDGPQAGVQCQTA

SEQ ID NO: 17773 - protein, 370 aa, Homo sapiens
MWESLTLDSGQISALTRFKLISQAYEVLSDPKKRDVYDQGGEQAIKEGGSGSPSFSSPMDIFDMFFGGGGRMARERRGKNVVHQLSVTLEDLYNGVTKKLALQKNVICEKCEGVGGKKGSVEKCPLCKGRGMQIHIQQIGPGMVQQIQTVCIECKGQGERINPKDRCESCSGAKVIREKKIIEVHVEKGMKDGQKILFHGEGDQEPELEPGDVIIVLDQKDHSVFQRRGHDLIMKMKIQLSEALCGFKKTIKTLDNRILVITSKAGEVIKHGDLRCVRDEGMPIYKAPLEKGILIIQFLVIFPEKHWLSLEKLPQLEALLPPRQKVRITDDMDQVELKEFCPNEQNWRQHREAYEEDEDGPQAGVQCQTA

SEQ ID NO: 17774 - protein, 911 aa, Homo sapiens
MAASQTSQTVASHVPFADLCSTLERIQKSKGRAEKIRHFREFLDSWRKFHDALHKNHKDVTDSFYPAMRLILPQLERERMAYGIKETMLAKLYIELLNLPRDGKDALKLLNYRTPTGTHGDAGDFAMIAYFVLKPRCLQKGSLTIQQVNDLLDSIASNNSAKRKDLIKKSLLQLITQSSALEQKWLIRMIIKDLKLGVSQQTIFSVFHNDAAELHNVTTDLEKVCRQLHDPSVGLSDISITLFSAFKPMLAAIADIEHIEKDMKHQSFYIETKLDGERMQMHKDGDVYKYFSRNGYNYTDQFGASPTEGSLTPFIHNAFKADIQICILDGEMMAYNPNTQTFMQKGTKFDIKRMVEDSDLQTCYCVFDVLMVNNKKLGHETLRKRYEILSSIFTPIPGRIEIVQKTQAHTKNEVIDALNEAIDKREEGIMVKQPLSIYKPDKRGEGWLKIKPEYVSGLMDELDILIVGGYWGKGSRGGMMSHFLCAVAEKPPPGEKPSVFHTLSRVGSGCTMKELYDLGLKLAKYWKPFHRKAPPSSILCGTEKPEVYIEPCNSVIVQIKAAEIVPSDMYKTGCTLRFPRIEKIRDDKEWHECMTLDDLEQLRGKASGKLASKHLYIGGDDEPQEKKRKAAPKMKKVIGIIEHLKAPNLTNVNKISNIFEDVEFCVMSGTDSQPKPDLENRIAEFGGYIVQNPGPDTYCVIAGSENIRVKNIILSNKHDVVKPAWLLECFKTKSFVPWQPRFMIHMCPSTKEHFAREYDCYGDSYFIDTDLNQLKEVFSGIKNSNEQTPEEMASLIADLEYRYSWDCSPLSMFRRHTVYLDSYAVINDLSTKNEGTRLAIKALELRFHGAKVVSCLAEGVSHVIIGEDHSRVADFKAFRRTFKRKFKILKESWVTDSIDKCELQEENQYLI

SEQ ID NO: 17775 - protein, 342 aa, Homo sapiens
MADKMVRTPKCSRCRNHGFLVPVKGHAGKCRWKQCLCEKCYLISERQKIMAAQKVLKTQAAEEEQEAALCAQGPKQASGAAAAAPAPVPVPAASLRPLSPGTPSGDADPGPEGRAAACFFEQPPRGRNPGPRALQPVLGGRSHVEPSERAAVAMPSLAGPPFGAEAAGSGYPGPLDLRRPMRTVPGPLFTDFVRPLNINPDRALGPEYPGGSSMHPYCPFPLGYLDAPPGVPLQQGFRHVSRSQYQGGGLVSEPGGDFQPSYYLPPPPPPLPPLPPLPPQPQFLPPGYLSALHFLPPPPPPPPPSSFSLTVLFDTDKENTDDQDAEVLSGEPSQPSSQEQSD

SEQ ID NO: 17776 - protein, 192 aa, Homo sapiens
MAAPPKAPIRVRNLTIRAGALTGKENNMLQPETHIFTAPEEGSSQGALLLGQAPEPLSLPCTPVTLEQQLVSPSGDPHRAPALPSICSTLILQPCATLDPLLLQPQVPKVSDQALVSAHSEWQRKLEAAEALLTLRNSAQAPPDSISLHQPCNPPAPAGDKGFQPPSPSLRPRPASSISLPIGHLGCISLLS

SEQ ID NO: 17777 - protein, 127 aa, Homo sapiens
MAAPPKAPIRVRNLTIRAGALTGKENNMLQPETHIFTAPEEVPKVSDQALVSAHSEWQRKLEAAEALLTLRNSAQAPPDSISLHQPCNPPAPAGDKGFQPPSPSLRPRPASSISLPIGHLGCISLLS

SEQ ID NO: 17778 - protein, 367 aa, Homo sapiens
MEPSDMPAGYHCPLDSAPWDETRDPQSTELIPRRAISRSPTCARCRNHGVTAHLKGHKRLCLFQACECHKCVLILERRRVMAAQVALRRQQEAQLKKHLMRRGEASPKAPNHFRKGTTQPQVPSGKENIAPQPQTPHGAVLLAPTPPGKNSCGPLLLSHPPEASPLSWTPVPPGPWVPGHWLPPGFSMPPPVVCRLLYQEPAVSLPPFPGFDPGTSLQLPTHGPFTTCPGSHPVLTAPLSGEPQGPPSQPRTHSTLILQPCGTPDPLQLQPQASGASCLARTSGPSEWQLQQEAAEALVGLKDSSQAPRVTPSVPPNPAWISLLHPCGPPAPAGGRGFQPVGPCLRPSPAPSVALHIGRLGSISLLS

SEQ ID NO: 17779 - protein, 224 aa, Homo sapiens
MEPSDMPAGYHCPLDSAPWDETRDPQSTELIPRRAISRSPTCARCRNHGVTAHLKGHKRLCLFQACECHKCVLILERRRVMAAQVALRRQQEAQLKKHLMRRGEASPKAPNHFRKGTTQPQVPSGKENIAPQPQTPHGAVLLAPTPPGKPCTQLQPVPSAPAELLWASAAQPSPGSLALVLDSGASWPLGPWTLAASRLLHATTSGVPPAVPRTCCLSASLPWL

SEQ ID NO: 17780 - protein, 117 aa, Homo sapiens
MSWRGRSTYYWPRPRRYVQPPEMIGPMRPEQFSDEVEPATPEEGEPATQRQDPAAAQEGEDEGASAGQGPKPEADSQEQGHPQTGCECEDGPDGQEMDPPNPEEVKTPEEGEGQSQC

SEQ ID NO: 17781 - protein, 117 aa, Homo sapiens
MSWRGRSTYYWPRPRRYVQPPEMIGPMRPEQFSDEVEPATPEEGEPATQRQDPAAAQEGEDEGASAGQGPKPEADSQEQGHPQTGCECEDGPDGQEMDPPNPEEVKTPEEGEKQSQC

SEQ ID NO: 17782 - protein, 326 aa, Homo sapiens
MATLVELPDSVLLEIFSYLPVRDRIRISRVCHRWKRLVDDRWLWRHVDLTLYTMRPKVMWHLLRRYMASRLHSLRMGGYLFSGSQAPQLSPALLRALGQKCPNLKRLCLHVADLSMVPITSLPSTLRTLELHSCEISMAWLHKQQDPTVLPLLECIVLDRVPAFRDEHLQGLTRFRALRSLVLGGTYRVTETGLDAGLQELSYLQRLEVLGCTLSADSTLLAISRHLRDVRKIRLTVRGLSAPGLAVLEGMPALESLCLQGPLVTPEMPSPTEILSSCLTMPKLRVLELQGLGWEGQEAEKILCKGLPHCMVIVRACPKESMDWWM

SEQ ID NO: 17783 - protein, 273 aa, Homo sapiens
MRPKVMWHLLRRYMASRLHSLRMGGYLFSGSQAPQLSPALLRALGQKCPNLKRLCLHVADLSMVPITSLPSTLRTLELHSCEISMAWLHKQQDPTVLPLLECIVLDRVPAFRDEHLQGLTRFRALRSLVLGGTYRVTETGLDAGLQELSYLQRLEVLGCTLSADSTLLAISRHLRDVRKIRLTVRGLSAPGLAVLEGMPALESLCLQGPLVTPEMPSPTEILSSCLTMPKLRVLELQGLGWEGQEAEKILCKGLPHCMVIVRACPKESMDWWM

SEQ ID NO: 17784 - protein, 355 aa, Homo sapiens
MDFLHRNGVLIIQHLQKDYRAYYTFLNFMSNVGDPRNIFFIYFPLCFQFNQTVGTKMIWVAVIGDWLNLIFKWILFGHRPYWWVQETQIYPNHSSPCLEQFPTTCETGPGSPSGHAMGASCVWYVMVTAALSHTVCGMDKFSITLHRLTWSFLWSVFWLIQISVCISRVFIATHFPHQVILGVIGGMLVAEAFEHTPGIQTASLGTYLKTNLFLFLFAVGFYLLLRVLNIDLLWSVPIAKKWCANPDWIHIDTTPFAGLVRNLGVLFGLGFAINSEMFLLSCRGGNNYTLSFRLLCALTSLTILQLYHFLQIPTHEEHLFYVLSFCKSASIPLTVVAFIPYSVHMLMKQSGKKSQ

SEQ ID NO: 17785 - protein, 102 aa, Homo sapiens
MDFLHRNGVLIIQHLQKDYRAYYTFLNFMSNVGDPRNIFFIYFPLCFQFNQTVGTKMIWVAVIGDWLNLIFKWKSIWPCNGRILCLVCHGNRCPEPHCLWDG

SEQ ID NO: 17786 - protein, 154 aa, Homo sapiens
MDFLHRNGVLIIQHLQKDYRAYYTFLNFMSNVGDPRNIFFIYFPLCFQFNQTVGTKMIWVAVIGDWLNLIFKWILFGHRPYWWVQETQIYPNHSSPCLEQFPTTCETGPGSPSGHAMGASCVWYVMVTAALSHTVCGMDKFSITLHRHAGGRGL

SEQ ID NO: 17787 - protein, 418 aa, Homo sapiens
METHISCLFPELLAMIFGYLDVRDKGRAAQVCTAWRDAAYHKSVWRGVEAKLHLRRANPSLFPSLQARGIRRVQILSLRRSLSYVIQGMANIESLNLSGCYNLTDNGLGHAFVQEIGSLRALNLSLCKQITDSSLGRIAQYLKGLEVLELGGCSNITNTGLLLIAWGLQRLKSLNLRSCRHLSDVGIGHLAGMTRSAAEGCLGLEQLTLQDCQKLTDLSLKHISRGLTGLRLLNLSFCGGISDAGLLHLSHMGSLRSLNLRSCDNISDTGIMHLAMGSLRLSGLDVSFCDKVGDQSLAYIAQGLDGLKSLSLCSCHISDDGINRMVRQMHGLRTLNIGQCVRITDKGLELIAEHLSQLTGIDLYGCTRITKRGLERITQLPCLKVLNLGLWQMTDSEKEARGDFSPLFTVRTRGSSRR

SEQ ID NO: 17788 - protein, 346 aa, Homo sapiens
MESTLGAGIVIAEALQNQLAWLENVWLWITFLGDPKILFLFYFPAAYYASRRVGIAVLWISLITEWLNLIFKWFLFGDRPFWWVHESGYYSQAPAQVHQFPSSCETGPGSPSGHCMITGAALWPIMTALSSQVATRARSRWVRVMPSLAYCTFLLAVGLSRIFILAHFPHQVLAGLITGAVLGWLMTPRVPMERELSFYGLTALALMLGTSLIYWTLFTLGLDLSWSISLAFKWCERPEWIHVDSRPFASLSRDSGAALGLGIALHSPCYAQVRRAQLGNGQKIACLVLAMGLLGPLDWLGHPPQISLFYIFNFLKYTLWPCLVLALVPWAVHMFSAQEAPPIHSS

SEQ ID NO: 17789 - protein, 300 aa, Homo sapiens
MEPPMEPSGGEQEPGAVRFLDLPWEDVLLPHVLNRVPLRQLLRLQRVSRAFRSLVQLHLAGLRRFDAAQVGPQIPRAALARLLRDAEGLQELALAPCHEWLSDEDLVPVLARNPQLRSVALGGCGQLSRRALGALAEGCPRLQRLSLAHCDWVDGLALRGLADRCPALEELDLTACRQLKDEAIVYLAQRRGAGLRSLSLAVNANVGDAAVQELARNCPELHHLDLTGCLRVGSDGVRTLAEYCPVLRSLRVRHCHHVAESSLSRLRKRGVDIDVEPPLHQALVLLQDMAGFAPFVNLQV

SEQ ID NO: 17790 - protein, 541 aa, Homo sapiens
MSQLVECVPNFSEGKNQEVIDAISGAITQTPGCVLLDVDAGPSTNRTVYTFVGPPECVVEGALNAARVASRLIDMSRHQGEHPRMGALDVCPFIPVRGVSVDECVLCAQAFGQRLAEELDVPVYLYGEAARMDSRRTLPAIRAGEYEALPKKLQQADWAPDFGPSSFVPSWGATATGARKFLIAFNINLLGTKEQAHRIALNLREQGRGKDQPGRLKKVQGIGWYLDEKNLAQVSTNLLDFEVTALHTVYEETCREAQELSLPVVGSQLVGLVPLKALLDAAAFYCEKENLFILEEEQRIRLVVSRLGLDSLCPFSPKERIIEYLVPERGPERGLGSKSLRAFVGEVGARSAAPGGGSVAAAAAAMGAALGSMVGLMTYGRRQFQSLDTTMRRLIPPFREASAKLTTLVDADAEAFTAYLEAMRLPKNTPEEKDRRTAALQEGLRRAVSVPLTLAETVASLWPALQELARCGNLACRSDLQVAAKALEMGVFGAYFNVLINLRDITDEAFKDQIHHRVSSLLQEAKTQAALVLDCLETRQE

SEQ ID NO: 17791 - protein, 572 aa, Homo sapiens
MSQLVECVPNFSEGKNQEVIDAISGAITQTPGCVLLDVDAGPSTNRTVYTFVGPPECVVEGALNAARVASRLIDMSRHQGEHPRMGALDVCPFIPVRGVSVDECVLCAQAFGQRLAEELDVPVYLYGEAARMDSRRTLPAIRAGEYEALPKKLQQADWAPDFGPSSFVPSWGATATGARKFLIAFNINLLGTKEQAHRIALNLREQGRGKDQPGRLKKVQGIGWYLDEKNLAQVSTNLLDFEVTALHTVYEETCREAQELSLPVVGSQLVGLVPLKALLDAAAFYCEKENLFILEEEQRIRLVVSRLGLDSLCPFSPKERIIEYLVPERGPERGLGSKSLRAFVGEVGARSAAPGGGSVAAAAAAMGAALGSMVGLMTYGRRQFQSLDTTMRRLIPPFREASAKLTTLVDADAEAFTAYLEAMRLPKNTPEEKDRRTAALQEGLRRAVSVPLTLAETVASLWPALQELARCGNLACRSDLQVAAKALEMGVFGAYFNVLINLRDITDEAFKDQPPAGSQDPGCTGAGLLGDPAGVTVREASPGSVAPPSPIPRGQSCDLETPGTAGPSTLEG

SEQ ID NO: 17792 - protein, 495 aa, Homo sapiens
MSQLVECVPNFSEGKNQEVIDAISGAITQTPGCVLLDVDAGPSTNRTVYTFVGPPECVVEGALNAARVASRLIDMSRHQGEHPRMGALDVCPFIPVRGVSVDECVLCAQAFGQRLAEELDVPVYLYGEAARMDSRRTLPAIRAGEYEALPKKLQQADWAPDFGPSSFVPSWGATATGARKFLIAFNINLLGTKEQAHRIALNLREQGRGKDQPGRLKKVQGIGWYLDEKNLAQVSTNLLDFEVTALHTVYEETCREAQELSLPVVGSQLVGLVPLKALLDAAAFYCEKENLFILEEEQRIRLVVSRLGLDSLCPFSPKERIIEYLVPERGPERGLGSKSLRAFVGEVGARSAAPGGGSVAAAAAAMGAALGSMVGLMTYGRRQFQSLDTTMRRLIPPFREASAKLTTLVDADAEAFTAYLAHGGPTGGSEAGSLCAADAGGDGGLAVAGAAGTGPVWEPGLPVRPPGGGQSPGDGRVWRIFQRAHQPEGHHRRGI

SEQ ID NO: 17793 - protein, 158 aa, Homo sapiens
MSQLVECVPNFSEGKNQEVIDAISGAITQTPGCVLLDVDAGPSTNRTVYTFVGPPECVVEGALNAARVASRLIDMSRHQGEHPRMGALDVCPFIPVRGVSVDECVLCAQAFGQRLAEELDVPGLTAGLSCSLPVRRGSQDGQSPDPAGHPGRGVRGPP

SEQ ID NO: 17794 - protein, 479 aa, Homo sapiens
MSSPGIDGDPKPPCLPRNGLVKLPGQPNGLGAASITKGTPATKNRPCQPPPPPTLPPPSLAAPLSRAALAGGPCTPAGGPASALAPGHPAERPPLATDEKILNGLFWYFSACEKCVLAQVCKAWRRVLYQPKFWAGLTPVLHAKELYNVLPGGEKEFVNLQGFAARGFEGFCLVGVSDLDICEFIDNYALSKKGVKAMSLKRSTITDAGLEVMLEQMQGVVRLELSGCNDFTEAGLWSSLSARITSLSVSDCINVADDAIAAISQLLPNLAELSLQAYHVTDTALAYFTARQGHSTHTLRLLSCWEITNHGVVNVVHSLPNLTALSLSGCSKVTDDGVELVAENLRKLRSLDLSWCPRITDMALEYVACDLHRLEELVLDRCVRITDTGLSYLSTMSSLRSLYLRWCCQVQDFGLKHLLALGSLRLLSLAGCPLLTTTGLSGLVQLQELEELELTNCPGATPELFKYFSQHLPRCLVIE

SEQ ID NO: 17795 - protein, 267 aa, Homo sapiens
MLEQMQGVVRLELSGCNDFTEAGLWSSLSARITSLSVSDCINVADDAIAAISQLLPNLAELSLQAYHVTDTALAYFTARQGHSTHTLRLLSCWEITNHGVVNVVHSLPNLTALSLSGCSKVTDDGVELVAENLRKLRSLDLSWCPRITDMALEYVACDLHRLEELVLDRCVRITDTGLSYLSTMSSLRSLYLRWCCQVQDFGLKHLLALGSLRLLSLAGCPLLTTTGLSGLVQLQELEELELTNCPGATPELFKYFSQHLPRCLVIE

SEQ ID NO: 17796 - protein, 701 aa, Homo sapiens
MGHLLSKEPRNRPSQKRPRCCSWCRRRRPLLRLPRRTPAKVPPQPAAPRSRDCFFRGPCMLCFIVHSPGAPAPAGPEEEPPLSPPPRDGAYAAASSSQHLARRYAALAAEDCAAAARRFLLSSAAAAAAAAASASSPASCCKELGLAAAAAWEQQGRSLFLASLGPVRFLGPPAAVQLFRGPTPSPAELPTPPEMVCKRKGAGVPACTPCKQPRCGGGGCGGGGGGGGGGGPAGGGASPPRPPDAGCCQAPEQPPQPLCPPPSSPTSEGAPTEAGGDAVRAGGTAPLSAQQQHECGDADCRESPENPCDCHREPPPETPDINQLPPSILLKIFSNLSLDERCLSASLVCKYWRDLCLDFQFWKQLDLSSRQQVTDELLEKIASRSQNIIEINISDCRSMSDNGVCVLAFKCPGLLRYTAYRCKQLSDTSIIAVASHCPLLQKVHVGNQDKLTDEGLKQLGSKCRELKDIHFGQCYKISDEGMIVIAKGCLKLQRIYMQENKLVTDQSVKAFAEHCPELQYVGFMGCSVTSKGVIHLTKLRNLSSLDLRHITELDNETVMEIVKRCKNLSSLNLCLNWIINDRCVEVIAKEGQNLKELYLVSCKITDYALIAIGRYSMTIETVDVGWCKEITDQGATLIAQSSKSLRYLGLMRCDKVNEVTVEQLVQQYPHITFSTVLQDCKRTLERAYQMGWTPNMSAASS

SEQ ID NO: 17797 - protein, 303 aa, Homo sapiens
MSDNGVCVLAFKCPGLLRYTAYRCKQLSDTSIIAVASHCPLLQKVHVGNQDKLTDEGLKQLGSKCRELKDIHFGQCYKISDEGMIVIAKGCLKLQRIYMQENKLVTDQSVKAFAEHCPELQYVGFMGCSVTSKGVIHLTKLRNLSSLDLRHITELDNETVMEIVKRCKNLSSLNLCLNWIINDRCVEVIAKEGQNLKELYLVSCKITDYALIAIGRYSMTIETVDVGWCKEITDQGATLIAQSSKSLRYLGLMRCDKVNEVTVEQLVQQYPHITFSTVLQDCKRTLERAYQMGWTPNMSAASS

SEQ ID NO: 17798 - protein, 314 aa, Homo sapiens
MSDNGVCVLAFKCPGLLRYTAYRCKQLSDTSIIAVASHCPLLQKVHVGNQDKLTDEGLKQLGSKCRELKDIHFGQCYKISDEGMIVIAKGCLKLQRIYMQENKLVTDQSVKAFAEHCPELQYVGFMGCSVTSKGVIHLTKLRNLSSLDLRHITELDNETVMEIVKRCKNLSSLNLCLNWIINDRCVEVIAKEGQNLKELYLVSCKITDYALIAIGRYSMTIETVDVGWCKEITDQGATLIAQSSKSLRYLGLMRCDKVRVDYQVVCFLHISIVNSLMSYPLSFSISTPVYYILYIHFICIYAIIAMHCLPAFVN

SEQ ID NO: 17799 - protein, 674 aa, Homo sapiens
MAAGGAEGGSGPGAAMGDCAEIKSQFRTREGFYKLLPGDGAARRSGPASAQTPVPPQPPQPPPGPASASGPGAAGPASSPPPAGPGPGPALPAVRLSLVRLGEPDSAGAGEPPATPAGLGSGGDRVCFNLGRELYFYPGCCRRGSQRSIDLNKPIDKRIYKGTQPTCHDFNQFTAATETISLLVGFSAGQVQYLDLIKKDTSKLFNEERLIDKTKVTYLKWLPESESLFLASHASGHLYLYNVSHPCASAPPQYSLLKQGEGFSVYAAKSKAPRNPLAKWAVGEGPLNEFAFSPDGRHLACVSQDGCLRVFHFDSMLLRGLMKSYFGGLLCVCWSPDGRYVVTGGEDDLVTVWSFTEGRVVARGHGHKSWVNAVAFDPYTTRAEEAATAAGADGERSGEEEEEEPEAAGTGSAGGAPLSPLPKAGSITYRFGSAGQDTQFCLWDLTEDVLYPHPPLARTRTLPGTPGTTPPAASSSRGGEPGPGPLPRSLSRSNSLPHPAGGGKAGGPGVAAEPGTPFSIGRFATLTLQERRDRGAEKEHKRYHSLGNISRGGSGGSGSGGEKPSGPVPRSRLDPAKVLGTALCPRIHEVPLLEPLVCKKIAQERLTVLLFLEDCIITACQEGLICTWARPGKAFTDEETEAQTGEGSWPRSPSKSVVEGISSQPGNSPSGTVV

SEQ ID NO: 17800 - protein, 396 aa, Homo sapiens
MALLTNLLPLCCLALLALPAQSCGPGRGPVGRRRYARKQLVPLLYKQFVPGVPERTLGASGPAEGRVARGSERFRDLVPNYNPDIIFKDEENSGADRLMTERCKERVNALAIAVMNMWPGVRLRVTEGWDEDGHHAQDSLHYEGRALDITTSDRDRNKYGLLARLAVEAGFDWVYYESRNHVHVSVKADNSLAVRAGGCFPGNATVRLWSGERKGLRELHRGDWVLAADASGRVVPTPVLLFLDRDLQRRASFVAVETEWPPRKLLLTPWHLVFAARGPAPAPGDFAPVFARRLRAGDSVLAPGGDALRPARVARVAREEAVGVFAPLTAHGTLLVNDVLASCYAVLESHQWAHRAFAPLRLLHALGALLPGGAVQPTGMHWYSRLLYRLAEELLG

SEQ ID NO: 17801 - protein, 282 aa, Homo sapiens [sequence omitted]

SEQ ID NO: 17802 - protein, 187 aa, Homo sapiens
MHQTPITTWSVSHWDGTAIRSATCSCTGLTRCLRWTATTTMMAASPAGTTPSTESQPLSGSSPGSQDVMLMGDFNAGCSYVRPSQWSSIRLWTSPTFQWLIPDSADTTATPTHCAYDRIVVAGMLLRGAVVPDSALPFNFQAAYGLSDQLFSVHTCSGAGLGERHGLPASAALPSNTCRAGTHRVST

SEQ ID NO: 17803 - protein, 316 aa, Homo sapiens
MGQDYYSVLGITRNSEDAQIKQAYRRLALKHHPLKSNEPSSAEIFRQIAEAYDVLSDPMKRGIYDKFGEEGLKGGIPLEFGSQTPWTTGYVFHGKPEKVFHEFFGGNNPFSEFFDAEGSEVDLNFGGLQGRGVKKQDPQVERDLYLSLEDLFFGCTKKIKISRRVLNEDGYSSTIKDKILTIDVKPGWRQGTRITFEKEGDQGPNIIPADIIFIVKEKLHPRFRRENDNLFFVNPIPLGKALTCCTVEVRTLDDRLLNIPINDIIHPKYFKKVPGEGMPLPEDPTKKGDLFIFFDIQFPTRLTPQKKQMLRQALLT

SEQ ID NO: 17804 - protein, 141 aa, Homo sapiens
METSRGRNLAKVTRPTSPCHLLASPAQGPNIIPADIIFIVKEKLHPRFRRENDNLFFVNPIPLGKALTCCTVEVRTLDDRLLNIPINDIIHPKYFKKVPGEGMPLPEDPTKKGDLFIFFDIQFPTRLTPQKKQMLRQALLT

SEQ ID NO: 17805 - protein, 1386 aa, Homo sapiens
MSSSVRRKGKPGKGGGKGSSRGGRGGRSHASKSHGSGGGGGGGGGGGGGNRKASSRIWDDGDDFCIFSESRRPSRPSNSNISKGESRPKWKPKAKVPLQTLHMTSENQEKVKALLRDLQEQDADAGSERGLSGEEEDDEPDCCNDERYWPAGQEPSLVPDLDPLEYAGLASVEPYVPEFTVSPFAVQKLSRYGFNTERCQAVLRMCDGDVGASLEHLLTQCFSETFGERMKISEAVNQISLDECMEQRQEEAFALKSICGEKFIERIQNRVWTIGLELEYLTSRFRKSKPKESTKNVQENSLEICKFYLKGNCKFGSKCRFKHEVPPNQIVGRIERSVDDSHLNAIEDASFLYELEIRFSKDHKYPYQAPLVAFYSTNENLPLACRLHISEFLYDKALTFAETSEPVVYSLITLLEEESEIVKLLTNTHHKYSDPPVNFLPVPSRTRINNPACHKTVIPNNSFVSNQIPEVEKASESEESDEDDGPAPVIVENESYVNLKKKISKRYDWQAKSVHAENGKICKQFRMKQASRQFQSILQERQSLPAWEERETILNLLRKHQVVVISGMTGCGKTTQIPQFILDDSLNGPPEKVANIICTQPRRISAISVAERVAKERAERVGLTVGYQIRLESVKSSATRLLYCTTGVLLRRLEGDTALQGVSHIIVDEVHERTEESDFLLLVLKDIVSQRPGLQVILMSATLNAELFSDYFNSCPVITIPGRTFPVDQFFLEDAIAVTRYVLQDGSPYMRSMKQISKEKLKARRNRTAFEEVEEDLRLSLHLQDQDSVKDAVPDQQLDFKQLLARYKGVSKSVIKTMSIMDFEKVNLELIEALLEWIVDGKHSYPPGAILVFLPGLAEIKMLYEQLQSNSLFNNRRSNRCVIHPLHSSLSSEEQQAVFVKPPAGVTKIIISTNIAETSITIDDVVYVIDSGKMKEKRYDASKGMESLEDTFVSQANALQRKGRAGRVASGVCFHLFTSHHYNHQLLKQQLPEIQRVPLEQLCLRIKILEMFSAHNLQSVFSRLIEPPHTDSLRASKIRLRDLGALTPDERLTPLGYHLASLPVDVRIGKLMLFGSIFRCLDPALTIAASLAFKSPFVSPWDKKEEANQKKLEFAFANSDYLALLQAYKGWQLSTKEGVRASYNYCRQNFLSGRVLQEMASLKRQFTELLSDIGFAREGLRAREIEKRAQGGDGVLDATGEEANSNAENPKLISAMLCAALYPNVVQVKSPEGKFQKTSTGAVRMQPKSAELKFVTKNDGYVHIHPSSVNYQVRHFDSPYLLYHEKIKTSRVFIRDCSMVSVYPLVLFGGGQVNVQLQRGEFVVSLDDGWIRFVAASHQVAELVKELRCELDQLLQDKIKNPSIDLCTCPRGSRIISTIVKLVTTQ

SEQ ID NO: 17806 - protein, 658 aa, Homo sapiens
MSSSVRRKGKPGKGGGKGSSRGGRGGRSHASKSHGSGGGGGGGGGGGGGNRKASSRIWDDGDDFCIFSESRRPSRPSNSNISKGESRPKWKPKAKVPLQTLHMTSENQEKVKALLRDLQEQDADAGSERGLSGEEEDDEPDCCNDERYWPAGQEPSLVPDLDPLEYAGLASVEPYVPEFTVSPFAVQKLSRYGFNTERCQAVLRMCDGDVGASLEHLLTQCFSETFGERMKISEAVNQISLDECMEQRQEEAFALKSICGEKFIERIQNRVWTIGLELEYLTSRFRKSKPKESTKNVQENSLEICKFYLKGNCKFGSKCRFKHEVPPNQIVGRIERSVDDSHLNAIEDASFLYELEIRFSKDHKYPYQAPLVAFYSTNENLPLACRLHISEFLYDKALTFAETSEPVVYSLITLLEEESEIVKLLTNTHHKYSDPPVNFLPVPSRTRINNPACHKTVIPNNSFVSNQIPEVEKASESEESDEDDGPAPVIVENESYVNLKKKISKRYDWQAKSVHAENGKICKQFRMKQASRQFQSILQERQSLPAWEERETILNLLRKHQVVVISGMTGCGKTTQIPQFILDDSLNGPPEKVANIICTQPRRISAISVAERVAKERAERVGLTVGYQIRLESVKVCMLCLFPGNRNLWFLGIKSFGG

SEQ ID NO: 17807 - protein, 433 aa, Homo sapiens
MTSENQEKVKALLRDLQEQDADAGSERGLSGEEEDDEPDCCNDERYWPAGQEPSLVPDLDPLEYAGLASVEPYVPEFTVSPFAVQKLSRYGFNTERCQAVLRMCDGDVGASLEHLLTQCFSETFGERMKISEAVNQISLDECMEQRQEEAFALKSICGEKFIERIQNRVWTIGLELEYLTSRFRKSKPKESTKNVQENSLEICKFYLKGNCKFGSKCRFKHEVPPNQIVGRIERSVDDSHLNAIEDASFLYELEIRFSKDHKYPYQAPLVAFYSTNENLPLACRLHISEFLYDKALTFAETSEPVVYSLITLLEEESEIVKLLTNTHHKYSDPPVNFLPVPSRTRINNPACHKTVIPNNSFVSNQIPEVEKASESEESDEDDGPAPVIVENESYVNLKKKISKRYDWQAKSVHAENGKICKQFRMKQVLNSHM

SEQ ID NO: 17808 - protein, 678 aa, Homo sapiens
MELRSYQWEVIMPALEGKNIIIWLPTGAGKTRAAAYVAKRHLETVDGAKVVVLVNRVHLVTQHGEEFRRMLDGRWTVTTLSGDMGPRAGFGHLARCHDLLICTAELLQMALTSPEEEEHVELTVFSLIVVDECHHTHKDTVYNVIMSQYLELKLQRAQPLPQVLGLTASPGTGGASKLDGAINHVLQLCANLDTWCIMSPQNCCPQLQEHSQQPCKQYNLCHRRSQDPFGDLLKKLMDQIHDHLEMPELSRKFGTQMYEQQVVKLSEAAALAGLQEQRVYALHLRRYNDALLIHDTVRAVDALAALQDFYHREHVTKTQILCAERRLLALFDDRKNELAHLATHGPENPKLEMLEKILQRQFSSSNSPRGIIFTRTRQSAHSLLLWLQQQQGLQTVDIRAQLLIGAGNSSQSTHMTQRDQQEVIQKFQDGTLNLLVATSVAEEGLDIPHCNVVVRYGLLTNEISMVQARGRARADQSVYAFVATEGSRELKRELINEALETLMEQAVAAVQKMDQAEYQAKIRDLQQAALTKRAAQAAQRENQRQQFPVEHVQLLCINCMVAVGHGSDLRKVEGTHHVNVNPNFSNYYNVSRDPVVINKVFKDWKPGGVISCRNCGEVWGLQMIYKSVKLPVLKVRSMLLETPQGRIQAKKWSRVPFSVPDFDFLQHCAENLSDLSLD

SEQ ID NO: 17809 - protein, 597 aa, Homo sapiens
MAEGSAVSDPQHAARLLRALSSFREESRFCDAHLVLDGEEIPVQKNILAAASPYIRTKLNYNPPKDDGSTYKIELEGISVMVMREILDYIFSGQIRLNEDTIQDVVQAADLLLLTDLKTLCCEFLEGCIAAENCIGIRDFALHYCLHHVHYLATEYLETHFRDVSSTEEFLELSPQKLKEVISLEKLNVGNERYVFEAVIRWIAHDTEIRKVHMKDVMSALWVSGLDSSYLREQMLNEPLVREIVKECSNIPLSQPQQGEAMLANFKPRGYSECIVTVGGEERVSRKPTAAMRCMCPLYDPNRQLWIELAPLSMPRINHGVLSAEGFLFVFGGQDENKQTLSSGEKYDPDANTWTALPPMNEARHNFGIVEIDGMLYILGGEDGEKELISMECYDIYSKTWTKQPDLTMVRKIGCYAAMKKKIYAMGGGSYGKLFESVECYDPRTQQWTAICPLKERRFGAVACGVAMELYVFGGVRSREDAQGSEMVTCKSEFYHDEFKRWIYLNDQNLCIPASSSFVYGAVPIGASIYVIGDLDTGTNYDYVREFKRSTGTWHHTKPLLPSDLRRTGCAALRIANCKLFRLQLQQGLFRIRVHSP

SEQ ID NO: 17810 - protein, 685 aa, Homo sapiens
MAEWLLSASWQRRAKAMTAAAGSAGRAAVPLLLCALLAPGGAYVLDDSDGLGREFDGIGAVSGGGATSRLLVNYPEPYRSQILDYLFKPNFGASLHILKVEIGGDGQTTDGTEPSHMHYALDENYFRGYEWWLMKEAKKRNPNITLIGLPWSFPGWLGKGFDWPYVNLQLTAYYVVTWIVGAKRYHDLDIDYIGIWNERSYNANYIKILRKMLNYQGLQRVKIIASDNLWESISASMLLDAELFKVVDVIGAHYPGTHSAKDAKLTGKKLWSSEDFSTLNSDMGAGCWGRILNQNYINGYMTSTIAWNLVASYYEQLPYGRCGLMTAQEPWSGHYVVESPVWVSAHTTQFTQPGWYYLKTVGHLEKGGSYVALTDGLGNLTIIIETMSHKHSKCIRPFLPYFNVSQQFATFVLKGSFSEIPELQVWYTKLGKTSERFLFKQLDSLWLLDSDGSFTLSLHEDELFTLTTLTTGRKGSYPLPPKSQPFPSTYKDDFNVDYPFFSEAPNFADQTGVFEYFTNIEDPGEHHFTLRQVLNQRPITWAADASNTISIIGDYNWTNLTIKCDVYIETPDTGGVFIAGRVNKGGILIRSARGIFFWIFANGSYRVTGDLAGWIIYALGRVEVTAKKWYTLTLTIKGHFTSGMLNDKSLWTDIPVNFPKNGWAAIGTHSFEFAQFDNFLVEATR

SEQ ID NO: 17811 - protein, 662 aa, Homo sapiens
MAEWLLSASWQRRAKAMTAAAGSAGRAAVPLLLCALLAPGGAYVLDDSDGLGREFDGIGAVSGGGPNFGASLHILKVEIGGDGQTTDGTEPSHMHYALDENYFRGYEWWLMKEAKKRNPNITLIGLPWSFPGWLGKGFDWPYVNLQLTAYYVVTWIVGAKRYHDLDIDYIGIWNERSYNANYIKILRKMLNYQGLQRVKIIASDNLWESISASMLLDAELFKVVDVIGAHYPGTHSAKDAKLTGKKLWSSEDFSTLNSDMGAGCWGRILNQNYINGYMTSTIAWNLVASYYEQLPYGRCGLMTAQEPWSGHYVVESPVWVSAHTTQFTQPGWYYLKTVGHLEKGGSYVALTDGLGNLTIIIETMSHKHSKCIRPFLPYFNVSQQFATFVLKGSFSEIPELQVWYTKLGKTSERFLFKQLDSLWLLDSDGSFTLSLHEDELFTLTTLTTGRKGSYPLPPKSQPFPSTYKDDFNVDYPFFSEAPNFADQTGVFEYFTNIEDPGEHHFTLRQVLNQRPITWAADASNTISIIGDYNWTNLTIKCDVYIETPDTGGVFIAGRVNKGGILIRSARGIFFWIFANGSYRVTGDLAGWIIYALGRVEVTAKKWYTLTLTIKGHFTSGMLNDKSLWTDIPVNFPKNGWAAIGTHSFEFAQFDNFLVEATR

SEQ ID NO: 17812 - protein, 659 aa, Homo sapiens
MLGKSHGRATHGPLPLADLGIHLPCVKVLHQVTPEEKPAATSRLLVNYPEPYRSQILDYLFKPNFGASLHILKVEIGGDGQTTDGTEPSHMHYALDENYFRGYEWWLMKEAKKRNPNITLIGLPWSFPGWLGKGFDWPYVNLQLTAYYVVTWIVGAKRYHDLDIDYIGIWNERSYNANYIKILRKMLNYQGLQRVKIIASDNLWESISASMLLDAELFKVVDVIGAHYPGTHSAKDAKLTGKKLWSSEDFSTLNSDMGAGCWGRILNQNYINGYMTSTIAWNLVASYYEQLPYGRCGLMTAQEPWSGHYVVESPVWVSAHTTQFTQPGWYYLKTVGHLEKGGSYVALTDGLGNLTIIIETMSHKHSKCIRPFLPYFNVSQQFATFVLKGSFSEIPELQVWYTKLGKTSERFLFKQLDSLWLLDSDGSFTLSLHEDELFTLTTLTTGRKGSYPLPPKSQPFPSTYKDDFNVDYPFFSEAPNFADQTGVFEYFTNIEDPGEHHFTLRQVLNQRPITWAADASNTISIIGDYNWTNLTIKCDVYIETPDTGGVFIAGRVNKGGILIRSARGIFFWIFANGSYRVTGDLAGWIIYALGRVEVTAKKWYTLTLTIKGHFTSGMLNDKSLWTDIPVNFPKNGWAAIGTHSFEFAQFDNFLVEATR

SEQ ID NO: 17813 - protein, 589 aa, Homo sapiens
MGFMVADLWATSRLLVNYPEPYRSQILDYLFKPNFGASLHILKVEIGGDGQTTDGTEPSHMHYALDENYFRGYEWWLMKEAKKRNPNITLIGLPWSFPGWLGKGFDWPYVNLQLTAYYVVTWIVGAKRYHDLDIDYIGIWNERSYNANYIKILRKMLNYQGLQRVKIIASDNLWESISASMLLDAELFKVVDVIGAHYPGTHSAKDAKLTGKKLWSSEDFSTLNSDMGAGCWGRILNQNYINGYMTSTIAWNLVASYYEQLPYGRCGLMTAQEPWSGHYVVESPVWVSAHTTQFTQPGWYYLKTVGHLEKGGSYVALTDGLGNLTIIIETMSHKHSKCIRPFLPYFNVSQQFATFVLKGSFSEIPELQVWYTKLGKTSERFLFKQLDSLWLLDSDGSFTLSLHEDELFTLTTLTTGRKGSYPLPPKSQPFPSTYKDDFNVDYPFFSEAPNFADQTGVFEYFTNIEDPGEHHFTLRQVLNQRPITWAADASNTISIIGDYNWTNLTIKCDVYIETPDTGGVFIAGRVNKGGILIRSARGIFFWIFANGSYRVTGDLAGWIIYALGRVEVTAKKWYTLTLTIKVAGRRKKT

SEQ ID NO: 17814 - protein, 685 aa, Homo sapiens
MAAASRSASGWALLLLVALWQQRAAGSGVFQLQLQEFINERGVLASGRPCEPGCRTFFRVCLKHFQAVVSPGPCTFGTVSTPVLGTNSFAVRDDSSGGGRNPLQLPFNFTWPGTFSLIIEAWHAPGDDLRPEALPPDALISKIAIQGSLAVGQNWLLDEQTSTLTRLRYSYRVICSDNYYGDNCSRLCKKRNDHFGHYVCQPDGNLSCLPGWTGEYCQQPICLSGCHEQNGYCSKPAECLCRPGWQGRLCNECIPHNGCRHGTCSTPWQCTCDEGWGGLFCDQDLNYCTHHSPCKNGATCSNSGQRSYTCTCRPGYTGVDCELELSECDSNPCRNGGSCKDQEDGYHCLCPPGYYGLHCEHSTLSCADSPCFNGGSCRERNQGANYACECPPNFTGSNCEKKVDRCTSNPCANGGQCLNRGPSRMCRCRPGFTGTYCELHVSDCARNPCAHGGTCHDLENGLMCTCPAGFSGRRCEVRTSIDACASSPCFNRATCYTDLSTDTFVCNCPYGFVGSRCEFPVGLPPSFPWVAVSLGVGLAVLLVLLGMVAVAVRQLRLRRPDDGSREAMNNLSDFQKDNLIPAAQLKNTNQKKELEVDCGLDKSNCGKQQNHTLDYNLAPGPLGRGTMPGKFPHSDKSLGEKAPLRLHSEKPECRISAICSPRDSMYQSVCLISEERNECVIATEV

SEQ ID NO: 17815 - protein, 481 aa, Homo sapiens
MRWLWPLAVSLAVILAVGLSRVSGGAPLHLGRHRAETQEQQSRSKRGTEDEEAKGVQQYVPEEWAEYPRPIHPAGLQPTKPLVATSPNPGKDGGTPDSGQELRGNLTGAPGQRLQIQNPLYPVTESSYSAYAIMLLALVVFAVGIVGNLSVMCIVWHSYYLKSAWNSILASLALWDFLVLFFCLPIVIFNEITKQRLLGDVSCRAVPFMEVSSLGVTTFSLCALGIDRFHVATSTLPKVRPIERCQSILAKLAVIWVGSMTLAVPELLLWQLAQEPAPTMGTLDSCIMKPSASLPESLYSLVMTYQNARMWWYFGCYFCLPILFTVTCQLVTWRVRGPPGRKSECRASKHEQCESQLNSTVVGLTVVYAFCTLPENVCNIVVAYLSTELTRQTLDLLGLINQFSTFFKGAITPVLLLCICRPLGQAFLDCCCCCCCEECGGASEASAANGSDNKLKTEVSSSIYFHKPRESPPLLPLGTPC

SEQ ID NO: 17816 - protein, 266 aa, Homo sapiens
MMALGAAGATRVFVAMVAAALGGHPLLGVSATLNSVLNSNAIKNLPPPLGGAAGHPGSAVSAAPGILYPGGNKYQTIDNYQPYPCAEDEECGTDEYCASPTRGGDAGVQICLACRKRRKRCMRHAMCCPGNYCKNGICVSSDQNHFRGEIEETITESFGNDHSTLDGYSRRTTLSSKMYHTKGQEGSVCLRSSDCASGLCCARHFWSKICKPVLKEGQVCTKHRRKGSHGLEIFQRCYCGEGLSCRIQKDHHQASNSSRLHTCQRH

SEQ ID NO: 17817 - protein, 94 aa, Homo sapiens
MEVVLIFVYSLLVPVVLASAAKEKEIDPFHYNYQTLRIGGLVFDVVLFLVPSCHLLSHRCKCSFNQKPQDPGDKEAQVENFITANAKEPQKAKN

SEQ ID NO: 17818 - protein, 242 aa, Homo sapiens
MGEASPPAPARRHLLVLLLLLSTLVIPSAAAPIHDADAQESSLGLTGLQSLLQGFSRLFLKGNLLRGIDSLFSAPMDFRGLPGNYHKEENQEHQLGNNTLSSHLQIDKMTDNKTGEVLISENVVASIQPAEGSFEGDLKVPRMEEKEALVPIQKATDSFHTELHPRVAFWIIKLPRRRSHQDALEGGHWLSEKRHRLQAIRDGLRKGTHKDVLEEGTESSSHSRLSPRKTHLLYILRPSRQL

SEQ ID NO: 17819 - protein, 1478 aa, Homo sapiens
MASTNAESQLQRIIRDLQDAVTELSKEFQEAGEPITDDSTSLHKFSYKLEYLLQFDQKEKATLLGNKKDYWDYFCACLAKVKGANDGIRFVKSISELRTSLGKGRAFIRYSLVHQRLADTLQQCFMNTKVTSDWYYARSPFLQPKLSSDIVGQLYELTEVQFDLASRGFDLDAAWPTFARRTLTTGSSAYLWKPPSRSSSMSSLVSSYLQTQEMVSNFDLNSPLNNEALEGFDEMRLELDQLEVREKQLRERMQQLDRENQELRAAVSQQGEQLQTERERGRTAAEDNVRLTCLVAELQKQWEVTQATQNTVKELQTCLQGLELGAAEKEEDYHTALRRLESMLQPLAQELEATRDSLDKKNQHLASFPGWLAMAQQKADTASDTKGRQEPIPSDAAQEMQELGEKLQALERERTKVEEVNRQQSAQLEQLVKELQLKEDARASLERLVKEMAPLQEELSGKGQEADQLWRRLQELLAHTSSWEEELAELRREKKQQQEEKELLEQEVRSLTRQLQFLETQLAQVSQHVSDLEEQKKQLIQDKDHLSQQVGMLERLAGPPGPELPVAGEKNEALVPVNSSLQEAWGKPEEEQRGLQEAQLDDTKVQEGSQEEELRQANRELEKELQNVVGRNQLLEGKLQALQADYQALQQRESAIQGSLASLEAEQASIRHLGDQMEASLLAVRKAKEAMKAQMAEKEAILQSKEGECQQLREEVEQCQQLAEARHRELRALESQCQQQTQLIEVLTAEKGQQGVGPPTDNEARELAAQLALSQAQLEVHQGEVQRLQAQVVDLQAKMRAALDDQDKVQSQLSMAEAVLREHKTLVQQLKEQNEALNRAHVQELLQCSEREGALQEERADEAQQREEELRALQEELSQAKCSSEEAQLEHAELQEQLHRANTDTAELGIQVCALTVEKERVEEALACAVQELQDAKEAASREREGLERQVAGLQQEKESLQEKLKAAKAAAGSLPGLQAQLAQAEQRAQSLQEAAHQELNTLKFQLSAEIMDYQSRLKNAGEECKSLRGQLEEQGRQLQAAEEAVEKLKATQADMGEKLSCTSNHLAECQAAMLRKDKEGAALREDLERTQKELEKATTKIQEYYNKLCQEVTNRERNDQKMLADLDDLNRTKKYLEERLIELLRDKDALWQKSDALEFQQKLSAEERWLGDTEANHCLDCKREFSWMVRRHHCRICGRIFCYYCCNNYVLSKHGGKKERCCRACFQKLSEGPGSPDSSGSGTSQGEPSPALSPASPGPQATGGQGANTDYRPPDDAVFDIITDEELCQIQESGSSLPETPTETDSLDPNAAEQDTTSTSLTPEDTEDMPVGQDSEICLLKSGELMIKVPLTVDEIASFGEGSRELFVRSSTYSLIPITVAEAGLTISWVFSSDPKSISFSVVFQEAEDTPLDQCKVLIPTTRCNSHKENIQGQLKVRTPGIYMLIFDNTFSRFVSKKVFYHLTVDRPVIYDGSDFL

SEQ ID NO: 17820 - protein, 380 aa, Homo sapiens
MASTNAESQLQRIIRDLQDAVTELSKEFQEAGEPITDDSTSLHKFSYKLEYLLQFDQKEKATLLGNKKDYWDYFCACLAKVKGANDGIRFVKSISELRTSLGKGRAFIRYSLVHQRLADTLQQCFMNTKVTSDWYYARSPFLQPKLSSDIVGQLYELTEVQFDLASRGFDLDAAWPTFARRTLTTGSSAYLWKPPSRSSSMSSLVSSYLQTQEMVSNFDLNSPLNNEALEGFDEMRLELDQLEVREKQLRERMQQLDRENQELRAAVSQQGEQLQTERERGRTAAEDNVRLTCLVAELQKQWEVTQATQNTVKELQTCLQGLELGAAEKEEDYHTALRRLESMLQPLAQELEATRDSLDKKNQHLASFPGWLAMALHVGD

SEQ ID NO: 17821 - protein, 379 aa, Homo sapiens
MASTNAESQLQRIIRDLQDAVTELSKEFQEAGEPITDDSTSLHKFSYKLEYLLQFDQKEKATLLGNKKDYWDYFCACLAKVKGANDGIRFVKSISELRTSLGKGRAFIRYSLVHQRLADTLQQCFMNTKVTSDWYYARSPFLQPKLSSDIVGQLYELTEVQFDLASRGFDLDAAWPTFARRTLTTGSSAYLWKPPSRSSSMSSLVSSYLQTQEMVSNFDLNSPLNNEALEGFDEMRLELDQLEVREKQLRERMQQLDRENQELRAAVSQQGEQLQTERERGRTAAEDNVRLTCLVAELQKQWEVTQATQNTVKELQTCLQGLELGAAEKEEDYHTALRRLESMLQPLAQELEATRDSLDKKNQHLASFPGWLAMAHLSE

SEQ ID NO: 17822 - protein, 1498 aa, Homo sapiens
MASTNAESQLQRIIRDLQDAVTELSKEFQEAGEPITDDSTSLHKFSYKLEYLLQFDQKEKATLLGNKKDYWDYFCACLAKVKGANDGIRFVKSISELRTSLGKGRAFIRYSLVHQRLADTLQQCFMNTKVTSDWYYARSPFLQPKLSSDIVGQLYELTEVQFDLASRGFDLDAAWPTFARRTLTTGSSAYLWKPPSRSSSMSSLVSSYLQTQEMVSNFDLNSPLNNEALEGFDEMRLELDQLEVREKQLRERMQQLDRENQELRAAVSQQGEQLQTERERGRTAAEDNVRLTCLVAELQKQWEVTQATQNTVKELQTCLQGLELGAAEKEEDYHTALRRLESMLQPLAQELEATRDSLDKKNQHLASFPGWLAMAQQKADTASDTKGRQEPIPSDAAQEMQELGEKLQALERERTKVEEVNRQQSAQLEQLVKELQLKEDARASLERLVKEMAPLQEELSGKGQEADQLWRRLQELLAHTSSWEEELAELRREKKQQQEEKELLEQEVRSLTRQLQFLETQLAQVSQHVSDLEEQKKQLIQDKDHLSQQVGMLERLAGPPGPELPVAGEKNEALVPVNSSLQEAWGKPEEEQRGLQEAQLDDTKVQEGSQEEELRQANRELEKELQNVVGRNQLLEGKLQALQADYQALQQRESAIQGSLASLEAEQASIRHLGDQMEASLLAVRKAKEAMKAQMAEKEAILQSKEGECQQLREEVEQCQQLAEARHRELRALESQCQQQTQLIEVLTAEKGQQGVGPPTDNEARELAAQLALSQAQLEVHQGEVQRLQAQVVDLQAKMRAALDDQDKVQSQLSMAEAVLREHKTLVQQLKEQNEALNRAHVQELLQCSEREGALQEERADEAQQREEELRALQEELSQAKCSSEEAQLEHAELQEQLHRANTDTAELGIQVCALTVEKERVEEALACAVQELQDAKEAASREREGLERQVAGLQQEKESLQEKLKAAKAAAGSLPGLQAQLAQAEQRAQSLQEAAHQELNTLKFQLSAEIMDYQSRLKNAGEECKSLRGQLEEQGRQLQAAEEAVEKLKATQADMGEKLSCTSNHLAECQAAMLRKDKEGAALREDLERTQKELEKATTKIQEYYNKLCQEVTNRERNDQKMLADLDDLNRTKKYLEERLIELLRDKDALWQKSDALEFQQKLSAEERWLGDTEANHCLDCKREFSWMVRRHHCRICGRIFCYYCCNNYVLSKHGGKKERCCRACFQKLSEGPGSPDSSGSGTSQGEPSPALSPASPGPQATGGQGANTDYRPPDDAVFDIITDEELCQIQESGSSLPETPTETDSLDPNAAEQASVGASKGLGNLLCESSACRDTTSTSLTPEDTEDMPVGQDSEICLLKSGELMIKVPLTVDEIASFGEGSRELFVRSSTYSLIPITVAEAGLTISWVFSSDPKSISFSVVFQEAEDTPLDQCKVLIPTTRCNSHKENIQGQLKVRTPGIYMLIFDNTFSRFVSKKVFYHLTVDRPVIYDGSDFL

SEQ ID NO: 17823 - protein, 605 aa, Homo sapiens
MEIVYVYVKKRSEFGKQCNFSDRQAELNIDIMPNPELAEQFVERNPVDTGIQCSISMSEHEANSERFEMETRGVNHVEGGWPKDVNPLELEQTIRFRKKVEKDENYVNAIMQLGSIMEHCIKQNNAIDIYEEYFNDEEAMEVMEEDPSAKTINVFRDPQEIKRAATHLSWHPDGNRKLAVAYSCLDFQRAPVGMSSDSYIWDLENPNKPELALKPSSPLVTLEFNPKDSHVLLGGCYNGQIACWDTRKGSLVAELSTIESSHRDPVYGTIWLQSKTGTECFSASTDGQVMWWDIRKMSEPTEVVILDITKKEQLENALGAISLEFESTLPTKFMVGTEQGIVISCNRKAKTSAEKIVCTFPGHHGPIYALQRNPFYPKNFLTVGDWTARIWSEDSRESSIMWTKYHMAYLTDAAWSPVRPTVFFTTRMDGTLDIWDFMFEQCDPTLSLKVCDEALFCLRVQDNGCLIACGSQLGTTTLLEVSPGLSTLQRNEKNVASSMFERETRREKILEARHREMRLKEKGKAEGRDEEQTDEELAVDLEALVSKAEEEFFDIIFAELKKKEADAIKLTPVPQQPSPEEDQVVEEGEEAAGEEGDEEVEEDLA

SEQ ID NO: 17824 - protein, 593 aa, Homo sapiens
MEIVYVYVKKRSEFGKQCNFSDRQAELNIDIMPNPELAEQFVERNPVDTGIQCSISMSEHEANSERFEMETRGVNHVEGGWPKDVNPLELEQTIRFRKKVEKDENYVNAIMQLGSIMEHCIKQNNAIDIYEEYFNDEEAMEVMEEDPSAKTINVFRDPQEIKRAATHLSWHPDGNRKLAVAYSCLDFQRAPVGMSSDSYIWDLENPNKPELALKPSSPLVTLEFNPKDSHVLLGGCYNGQIACWDTRKGSLVAELSTIESSHRDPVYGTIWLQSKTGTECFSASTDGQVMWWDIRKMSEPTEVVILDITKKEQLENALGAISLEFESTLPTKFMVGTEQGIVISCNRKAKTSAEKIVCTFPGHHGPIYALQRNPFYPKNFLTVGDWTARIWSEDSRESSIMWTKYHMAYLTDAAWSPVRPTVFFTTRMDGTLDIWDFMFEQCDPTLSLKDNGCLIACGSQLGTTTLLEVSPGLSTLQRNEKNVASSMFERETRREKILEARHREMRLKEKGKAEGRDEEQTDEELAVDLEALVSKAEEEFFDIIFAELKKKEADAIKLTPVPQQPSPEEDQVVEEGEEAAGEEGDEEVEEDLA

SEQ ID NO: 17825 - protein, 388 aa, Homo sapiens
MKTLIAAYSGVLRGERQAEADRSQRSHGGPALSREGSGRWGTGSSILSALQDLFSVTWLNRSKVEKQLQVISVLQWVLSFLVLGVACSAILMYIFCTDCWLIAVLYFTWLVFDWNTPKKGGRRSQWVRNWAVWRYFRDYFPIQLVKTHNLLTTRNYIFGYHPHGIMGLGAFCNFSTEATEVSKKFPGIRPYLATLAGNFRMPVLREYLMSGGICPVSRDTIDYLLSKNGSGNAIIIVVGGAAESLSSMPGKNAVTLRNRKGFVKLALRHGADLVPIYSFGENEVYKQVIFEEGSWGRWVQKKFQKYIGFAPCIFHGRGLFSSDTWGLVPYSKPITTVVGEPITIPKLEHPTQQDIDLYHTMYMEALVKLFDKHKTKFGLPETEVLEVN

SEQ ID NO: 17826 - protein, 345 aa, Homo sapiens
MKTLIAAYSGVLRGERQAEADRSQRSHGGPALSREGSGRWGVACSAILMYIFCTDCWLIAVLYFTWLVFDWNTPKKGGRRSQWVRNWAVWRYFRDYFPIQLVKTHNLLTTRNYIFGYHPHGIMGLGAFCNFSTEATEVSKKFPGIRPYLATLAGNFRMPVLREYLMSGGICPVSRDTIDYLLSKNGSGNAIIIVVGGAAESLSSMPGKNAVTLRNRKGFVKLALRHGADLVPIYSFGENEVYKQVIFEEGSWGRWVQKKFQKYIGFAPCIFHGRGLFSSDTWGLVPYSKPITTVVGEPITIPKLEHPTQQDIDLYHTMYMEALVKLFDKHKTKFGLPETEVLEVN

SEQ ID NO: 17827 - protein, 891 aa, Homo sapiens
MAPKQKKKTSRGKKRLKPVLAASEDMEPVNMESMGHPEIYPLVLTTKTQEIFNCRIDEDVTDEQPYKLINKEDIFEDLRNRAAVSDFHPVKKIVQEYPGNELLLVYDKDFKYGLNFYLIATEEGKENYLNPPEVPEEQEEYKEHIPEDVYIYKPPVSKPWVSLGSEKEIEEESVTESTKQITYMISRKRSEFGAPIKFSDQNASSVKDAYIECTAYPDKNFTLKQLEKDVGMQVIPQIKDISTQTKWTYPKNATTQYYPREFSEEEKETLKQSKPLVDFLNNASISVEIALQQNEIMNTFIDDWKYLAEEEGTFGDKTDTHLKEYQSFTDLHSPTEKMITCVSWHPTIYGLIAVSVAVRLSFEDRVHFSGKLLLQPSLILFWSFSDPIHPQLMLESPDDIFCFKFCPSDPNIIAGGCINGQIVMWDITAHADRIENIKAGGSRSKRATLKPMFLLEPESNKEAMYIRHCAVSSIENGHKKVITDIHWLSDTFEINRMGSVFENRSGICCQLVTCSADCTICFWDIRPQKPLTPQTTEKKKEESIEIPFDVPSTFLHLDLSWKPLTKVRLSKGETSLDHCPTKISLNEDHLLCKTQDKMLAQSKTEKAEEMNPYHNLESGMANLLKPIDDFCTKFFVGTEEGEVIYTDWKMEKDPETGRLMSKKPVSHHTIHDGTVHTIQRSPFYNDIILTVGGWNVAIWKEGVMTGPLLQSCCAPKRYTSGHWSLTRPGVFYIGREDGYIDIWDLLEKTHEPAQSQNICITMITYIKPWIFSSKQQFIATADYYGTLHILEIPWTLSRPSTNEMASVNHYFEREVKHLEYVEQRKKIREQEKKEMELEMAKKKVKTYQKSKEQMQAELKMDYESYLELEKTVLINLGLIKVTEKGSYMEVM

SEQ ID NO: 17828 - protein, 852 aa, Homo sapiens
MAPKQKKKTSRGKKRLKPVLAASEDMEPVNMESMGHPEIYPLVLTTKTQEIFNCRIDEDVTDEQPYKLINKEDIFEDLRNRAAVSDFHPVKKIVQEYPGNELLLVYDKDFKYGLNFYLIATEEGKENYLNPPEVPEEQEEYKEHIPEDVYIYKPPVSKPWVSLGSEKEIEEESVTESTKQITYMISRKRSEFGAPIKFSDQNASSVKDAYIECTAYPDKNFTLKQLEKDVGMQVIPQIKDISTQTKCVEIALQQNEIMNTFIDDWKYLAEEEGTFGDKTDTHLKEYQSFTDLHSPTEKMITCVSWHPTIYGLIAVSVAVRLSFEDRVHFSGKLLLQPSLILFWSFSDPIHPQLMLESPDDIFCFKFCPSDPNIIAGGCINGQIVMWDITAHADRIENIKAGGSRSKRATLKPMFLLEPESNKEAMYIRHCAVSSIENGHKKVITDIHWLSDTFEINRMGSVFENRSGICCQLVTCSADCTICFWDIRPQKPLTPQTTEKKKEESIEIPFDVPSTFLHLDLSWKPLTKVRLSKGETSLDHCPTKISLNEDHLLCKTQDKMLAQSKTEKAEEMNPYHNLESGMANLLKPIDDFCTKFFVGTEEGEVIYTDWKMEKDPETGRLMSKKPVSHHTIHDGTVHTIQRSPFYNDIILTVGGWNVAIWKEGVMTGPLLQSCCAPKRYTSGHWSLTRPGVFYIGREDGYIDIWDLLEKTHEPAQSQNICITMITYIKPWIFSSKQQFIATADYYGTLHILEIPWTLSRPSTNEMASVNHYFEREVKHLEYVEQRKKIREQEKKEMELEMAKKKVKTYQKSKEQMQAELKMDYESYLELEKTVLINLGLIKVTEKGSYMEVM

SEQ ID NO: 17829 - protein, 848 aa, Homo sapiens
MTPGKHSGASARAANGGAWGYRDFRGGQKKGWCTTPQLVATMPVSPAGSHKQQNFGLNNATQPKKSISFFATMKATSVKGYTGANQSRMAVSKTVLIPPELKTVEKPNPNIKTTQVFDINGTDVTPRPLYHPDPLTGTAKPSKLLTSQEGSLGSEFISSYSLYQNTINPSTLGQFTRSVLGSSTVSKSSVSASESIAEDLEEPSYKRERLTSFTDLQVIRAAPEKIVTKEDLEKNIEIILTETETLRFFDLPTVMVSVESEEAEKVTQRNKNYEVLCRNRLGNDLYVERMMQTFNGAPKNKDVQCDKIIMEDKGIMSTAWDLYDSYNAMELVSLSVKQSVVESSSKANVLPKDQDQRLPGSTTEKNSETSSLMDIENVILAKIHEDEEDHSDAILKSDKFHQDLFFMERVLMENIFQPKLAAYRQLPVLKEPEPEEPEDVLESAKHEEVEEESKKEEEEEIHAEESTIPANLERLWSFSCDLTKGLNVSSLAWNKTNPDLLAVGYGHFGFKEQKRGLACCWSIKNPMWPERIYQSPYGVTAVDFSIGAPNLLAVGYHNGTIAIYNVRSNSNVPVLDSSESPQKHLGPVWQLQWIEQDRGTTGDGKREILVSISADGRISKWVIRKGLDCYDLMRLKRTTAASNKKGGEKEKKDEALISRQAPGMCFAFHPKDTNIYLAGTEEGHIHKCSCSYNEQYLDTYRGHKGPVYKVTWNPFCHDVFLSCSADWGVIIWQQENVKPSLSFYPATSVVYDVAWSPKSSYIFAAANENRVEIWDLHISTLDPLIVNTANPGIKFTTILFAKQTDCLLVGDSDGQVSVYELRNMPTVLETGRGDIMDTLLGSKSNQSA

SEQ ID NO: 17830 - protein, 545 aa, Homo sapiens
MTPGKHSGASARAANGGAWGYRDFRGGQKKGWCTTPQLVATMPVSPAGSHKQQNFGLNNATQPKKSISFFATMKATSVKGYTGANQSRMAVSKTVLIPPELKTVEKPNPNIKTTQVFDINGTDVTPRPLYHPDPLTGTAKPSKLLTSQEGSLGSEFISSYSLYQNTINPSTLGQFTRSVLGSSTVSKSSVSASESIAEDLEEPSYKRERLTSFTDLQVIRAAPEKIVTKEDLEKNIEIILTETETLRFFDLPTVMVSVESEEAEKVTQRNKNYEVLCRNRLGNDLYVERMMQTFNGAPKNKDVQCDKIIMEDKGIMSTAWDLYDSYNAMELVSLSVKQSVVESSSKANVLPKDQDQRLPGSTTEKNSETSSLMDIENVILAKIHEDEEDHSDAILKSDKFHQDLFFMERVLMENIFQPKLAAYRQLPVLKEPEPEEPEDVLESAKHEEVEEESKKEEEEEIHAEESTIPANLERLWSFSCDLTKGLNVSSLAWNKTNPDLLAVGYGHFGFKEQKRGLACCWSIKNPMVTQTRIRSIFIWLLTKFS

SEQ ID NO: 17831 - protein, 561 aa, Homo sapiens
MVSVESEEAEKVTQRNKNYEVLCRNRLGNDLYVERMMQTFNGAPKNKDVQCDKIIMEDKGIMSTAWDLYDSYNAMELVSLSVKQSVVESSSKANVLPKDQDQRLPGSTTEKNSETSSLMDIENVILAKIHEDEEDHSDAILKSDKFHQDLFFMERVLMENIFQPKLAAYRQLPVLKEPEPEEPEDVLESAKHEEVEEESKKEEEEEIHAEESTIPANLERLWSFSCDLTKGLNVSSLAWNKTNPDLLAVGYGHFGFKEQKRGLACCWSIKNPMWPERIYQSPYGVTAVDFSIGAPNLLAVGYHNGTIAIYNVRSNSNVPVLDSSESPQKHLGPVWQLQWIEQDRGTTGDGKREILVSISADGRISKWVIRKGLDCYDLMRLKRTTAASNKKGGEKEKKDEALISRQAPGMCFAFHPKGPVYKVTWNPFCHDVFLSCSADWGVIIWQQENVKPSLSFYPATSVVYDVAWSPKSSYIFAAANENRVEIWDLHISTLDPLIVNTANPGIKFTTILFAKQTDCLLVGDSDGQVSVYELRNMPTVLETGRGDIMDTLLGSKSNQSA

SEQ ID NO: 17832 - protein, 1054 aa, Homo sapiens
MLQKREKVLLLRTFQGRTLRIVREHYLRPCVPCHSPLCPQPAACSHDGKLLSSDVTHYVIPDWKVVQDYLEILEFPELKGIIFMQTACQAVQHQRGRRQYNKLRNLLKDARHDCILFANEFQQCCYLPRERGESMEKWQTRSIYNAAVWYYHHCQDRMPIVMVTEDEEAIQQYGSETEGVFVITFKNYLDNFWPDLKAAHELCDSILQSRRERENESQESHGKEYPEHLPLEVLEAGIKSGRYIQGILNVNKHRAQIEAFVRLQGASSKDSDLVSDILIHGMKARNRSIHGDVVVVELLPKNEWKGRTVALCENDCDDKASGESPSEPMPTGRVVGILQKNWRDYVVTFPSKEEVQSQGKNAQKILVTPWDYRIPKIRISTQQAETLQDFRVVVRIDSWESTSVYPNGHFVRVLGRIGDLEGEIATILVENSISVIPFSEAQMCEMPVNTPESPWKVSPEEEQKRKDLRKSHLVFSIDPKGCEDVDDTLSVRTLNNGNLELGVHIADVTHFVAPNSYIDIEARTRATTYYLADRRYDMLPSVLSADLCSLLGGVDRYAVSIMWELDKASYEIKKVWYGRTIIRSAYKLFYEAAQELLDGNLSVVDDIPEFKDLDEKSRQAKLEELVWAIGKLTDIARHVRAKRDGCGALELEGVEVCVQLDDKKNIHDLIPKQPLEVHETVAECMILANHWVAKKIWESFPHQALLRQHPPPHQEFFSELRECAKAKGFFIDTRSNKTLADSLDNANDPHDPIVNRLLRSMATQAMSNALYFSTGSCAEEEFHHYGLALDKYTHFTSPIRRYSDIVVHRLLMAAISKDKKMEIKGNLFSNKDLEELCRHINNRNQAAQHSQKQSTELFQCMYFKDKDPATEERCISDGVIYSIRTNGVLLFIPRFGIKGAAYLKNKDGLVISCGPDSCSEWKPGSLQRFQNKITSTTTDGESVTFHLFDHVTVRISIQASRCHSDTIRLEIISNKPYKIPNTELIHQSSPLLKSELVKEVTKSVEEAQLAQEVKVNIIQEEYQEYRQTKGRSLYTLLEEIRDLALLDVSNNYGI

SEQ ID NO: 17833 - protein, 920 aa, Homo sapiens
MEKWQTRSIYNAAVWYYHHCQDRMPIVMVTEDEEAIQQYGSETEGVFVITFKNYLDNFWPDLKAAHELCDSILQSRRERENESQESHGKEYPEHLPLEVLEAGIKSGRYIQGILNVNKHRAQIEAFVRLQGASSKDSDLVSDILIHGMKARNRSIHGDVVVVELLPKNEWKGRTVALCENDCDDKASGESPSEPMPTGRVVGILQKNWRDYVVTFPSKEEVQSQGKNAQKILVTPWDYRIPKIRISTQQAETLQDFRVVVRIDSWESTSVYPNGHFVRVLGRIGDLEGEIATILVENSISVIPFSEAQMCEMPVNTPESPWKVSPEEEQKRKDLRKSHLVFSIDPKGCEDVDDTLSVRTLNNGNLELGVHIADVTHFVAPNSYIDIEARTRATTYYLADRRYDMLPSVLSADLCSLLGGVDRYAVSIMWELDKASYEIKKVWYGRTIIRSAYKLFYEAAQELLDGNLSVVDDIPEFKDLDEKSRQAKLEELVWAIGKLTDIARHVRAKRDGCGALELEGVEVCVQLDDKKNIHDLIPKQPLEVHETVAECMILANHWVAKKIWESFPHQALLRQHPPPHQEFFSELRECAKAKGFFIDTRSNKTLADSLDNANDPHDPIVNRLLRSMATQAMSNALYFSTGSCAEEEFHHYGLALDKYTHFTSPIRRYSDIVVHRLLMAAISKDKKMEIKGNLFSNKDLEELCRHINNRNQAAQHSQKQSTELFQCMYFKDKDPATEERCISDGVIYSIRTNGVLLFIPRFGIKGAAYLKNKDGLVISCGPDSCSEWKPGSLQRFQNKITSTTTDGESVTFHLFDHVTVRISIQASRCHSDTIRLEIISNKPYKIPNTELIHQSSPLLKSELVKEVTKSVEEAQLAQEVKVNIIQEEYQEYRQTKGRSLYTLLEEIRDLALLDVSNNYGI

SEQ ID NO: 17834 - protein, 750 aa, Homo sapiens
MLQKREKVLLLRTFQGRTLRIVREHYLRPCVPCHSPLCPQPAACSHDGKLLSSDVTHYVIPDWKVVQDYLEILEFPELKGIIFMQTACQAVQHQRGRRQYNKLRNLLKDARHDCILFANEFQQCCYLPRERGESMEKWQTRSIYNAAVWYYHHCQDRMPIVMVTEDEEAIQQYGSETEGVFVITFKNYLDNFWPDLKAAHELCDSILQSRRERENESQESHGKEYPEHLPLEVLEAGIKSGRYIQGILNVNKHRAQIEAFVRLQGASSKDSDLVSDILIHGMKARNRSIHGDVVVVELLPKNEWKGRTVALCENDCDDKASGESPSEPMPTGRVVGILQKNWRDYVVTFPSKEEVQSQGKNAQKILVTPWDYRIPKIRISTQQAETLQDFRVVVRIDSWESTSVYPNGHFVRVLGRIGDLEGEIATILVENSISVIPFSEAQMCEMPVNTPESPWKVSPEEEQKRKDLRKSHLVFSIDPKGCEDVDDTLSVRTLNNGNLELGVHIADVTHFVAPNSYIDIEARTRATTYYLADRRYDMLPSVLSADLCSLLGGVDRYAVSIMWELDKASYEIKKVWYGRTIIRSAYKLFYEAAQELLDGNLSVVDDIPEFKDLDEKSRQAKLEELVWAIGKLTDIARHVRAKRDGCGALELEGVEVCVQLDDKKNIHDLIPKQPLEVHETVAECMILANHWVAKKIWESFPHQALLRQHPPPHQEFFSELRECAKAKGFFIDTRYSSFEGAEEWSGMLYI

SEQ ID NO: 17835 - protein, 971 aa, Homo sapiens
MQTACQAVQHQRGRRQYNKLRNLLKDARHDCILFANEFQQCCYLPRERGESMEKWQTRSIYNAAVWYYHHCQDRMPIVMVTEDEEAIQQYGSETEGVFVITFKNYLDNFWPDLKAAHELCDSILQSRRERENESQESHGKEYPEHLPLEVLEAGIKSGRYIQGILNVNKHRAQIEAFVRLQGASSKDSDLVSDILIHGMKARNRSIHGDVVVVELLPKNEWKGRTVALCENDCDDKASGESPSEPMPTGRVVGILQKNWRDYVVTFPSKEEVQSQGKNAQKILVTPWDYRIPKIRISTQQAETLQDFRVVVRIDSWESTSVYPNGHFVRVLGRIGDLEGEIATILVENSISVIPFSEAQMCEMPVNTPESPWKVSPEEEQKRKDLRKSHLVFSIDPKGCEDVDDTLSVRTLNNGNLELGVHIADVTHFVAPNSYIDIEARTRATTYYLADRRYDMLPSVLSADLCSLLGGVDRYAVSIMWELDKASYEIKKVWYGRTIIRSAYKLFYEAAQELLDGNLSVVDDIPEFKDLDEKSRQAKLEELVWAIGKLTDIARHVRAKRDGCGALELEGVEVCVQLDDKKNIHDLIPKQPLEVHETVAECMILANHWVAKKIWESFPHQALLRQHPPPHQEFFSELRECAKAKGFFIDTRSNKTLADSLDNANDPHDPIVNRLLRSMATQAMSNALYFSTGSCAEEEFHHYGLALDKYTHFTSPIRRYSDIVVHRLLMAAISKDKKMEIKGNLFSNKDLEELCRHINNRNQAAQHSQKQSTELFQCMYFKDKDPATEERCISDGVIYSIRTNGVLLFIPRFGIKGAAYLKNKDGLVISCGPDSCSEWKPGSLQRFQNKITSTTTDGESVTFHLFDHVTVRISIQASRCHSDTIRLEIISNKPYKIPNTELIHQSSPLLKSELVKEVTKSVEEAQLAQEVKVNIIQEEYQEYRQTKGRSLYTLLEEIRDLALLDVSNNYGI

SEQ ID NO: 17836 - protein, 716 aa, Homo sapiens
MSGSKKKKVTKAERLKLLQEEEERRLKEEEEARLKYEKEEMERLEIQRIEKEKWHRLEAKDLERRNEELEELYLLERCFPEAEKLKQETKLLSQWKHYIQCDGSPDPSVAQEMNTFISLWKEKTNETFEEVIEKSKVVLNLIEKLKFILLETPPCDLQDKNIIQYQESILQLQELLHLKFGVATEILLKQASTLADLDSGNMEKVIKDENVTLYVWANLKKNPRHRSVRFSETQIGFEIPRILATSDIAVRLLHTHYDHVSALHPVSTPSKEYTSAVTELVKDDVKNVEKAISKEVEEESKQQERGSHLIQEEEIKVEEEQGDIEVKMSSAEEESEAIKCEREMKVLSETVSAAQLLLVENSSEKPDFFEDNVVDLCQFTTLGGVYHLDILELPPQCKPVKGWMIVEILKEGLQKYTYPPETTEEFETENAFPPIEVTLEVHENVIFFEDPVVVRWDAEGKHWRTDGISNVSYKPKERLVTFSLDTFGPVTLIQDAHINMPYQSWELRPLDVNKVLLTVTTVFTEIQIQIKENLCMLSSIKLKDKKHISILEGTWMTPIPFIIALKEAGLNIFPTRHSHFYVIINNKVPLVEVKAYRQMALLSSAFAFGWSKWNLLCNSTKVVFKVREHLTEACTENPNWALLMFSGDRAQRLKIKEESEAFSEALKEETEFHSTLYHMVKDFASEEAMEKVRSSNCQFVNSVCHMLLSTRLLSYS

SEQ ID NO: 17837 - protein, 676 aa, Homo sapiens
MERLEIQRIEKEKWHRLEAKDLERRNEELEELYLLERCFPEAEKLKQETKLLSQWKHYIQCDGSPDPSVAQEMNTFISLWKEKTNETFEEVIEKSKVVLNLIEKLKFILLETPPCDLQDKNIIQYQESILQLQELLHLKFGVATEILLKQASTLADLDSGNMEKVIKDENVTLYVWANLKKNPRHRSVRFSETQIGFEIPRILATSDIAVRLLHTHYDHVSALHPVSTPSKEYTSAVTELVKDDVKNVEKAISKEVEEESKQQERGSHLIQEEEIKVEEEQGDIEVKMSSAEEESEAIKCEREMKVLSETVSAAQLLLVENSSEKPDFFEDNVVDLCQFTTLGGVYHLDILELPPQCKPVKGWMIVEILKEGLQKYTYPPETTEEFETENAFPPIEVTLEVHENVIFFEDPVVVRWDAEGKHWRTDGISNVSYKPKERLVTFSLDTFGPVTLIQDAHINMPYQSWELRPLDVNKVLLTVTTVFTEIQIQIKENLCMLSSIKLKDKKHISILEGTWMTPIPFIIALKEAGLNIFPTRHSHFYVIINNKVPLVEVKAYRQMALLSSAFAFGWSKWNLLCNSTKVVFKVREHLTEACTENPNWALLMFSGDRAQRLKIKEESEAFSEALKEETEFHSTLYHMVKDFASEEAMEKVRSSNCQFVNSVCHMLLSTRLLSYS

SEQ ID NO: 17838 - protein, 690 aa, Homo sapiens
MRQTGGGATTDSASPVLNNVIKSQSYFTAKRVGLGNNSYLGVGRPSSQQWLSLPGPGGQGPKAKKSGSKKKKVTKAERLKLLQEEEERRLKEEEEARLKYEKEEMERLEIQRIEKEKWHRLEAKDLERRNEELEELYLLERCFPEAEKLKQETKLLSQWKHYIQCDGSPDPSVAQEMNTFISLWKEKTNETFEEVIEKSKVVLNLIEKLKFILLETPPCDLQDKNIIQYQESILQLQELLHLKFGVATEILLKQASTLADLDSGNMEKVIKDENVTLYVWANLKKNPRHRSVRFSETQIGFEIPRILATSDIAVRLLHTHYDHVSALHPVSTPSKEYTSAVTELVKDDVKNVEKAISKEVEEESKQQERGSHLIQEEEIKVEEEQGDIEVKMSSAEEESEAIKCEREMKVLSETVSAAQLLLVENSSEKPDFFEDNVVDLCQFTTLGGVYHLDILELPPQCKPVKGWMIVEILKEGLQKYTYPPETTEEFETENAFPPIEVTLEVHENVIFFEDPVVVRWDAEGKHWRTDGISNVSYKPKERLVTFSLDTFGPVTLIQDAHINMPYQSWELRPLDVNKVLLTVTTVFTEIQIQIKENLCMLSSIKLKDKKHISILEGTWMTPIPFIIALKEAGLNIFPTRHSHFYVIINNKVPLVEVKAYRQMALLSSAFAFGWSKWNLLCNSTKVVFKW

SEQ ID NO: 17839 - protein, 657 aa, Homo sapiens
MDLERRNEELEELYLLERCFPEAEKLKQETKLLSQWKHYIQCDGSPDPSVAQEMNTFISLWKEKTNETFEEVIEKSKVVLNLIEKLKFILLETPPCDLQDKNIIQYQESILQLQELLHLKFGVATEILLKQASTLADLDSGNMEKVIKDENVTLYVWANLKKNPRHRSVRFSETQIGFEIPRILATSDIAVRLLHTHYDHVSALHPVSTPSKEYTSAVTELVKDDVKNVEKAISKEVEEESKQQERGSHLIQEEEIKVEEEQGDIEVKMSSAEEESEAIKCEREMKVLSETVSAAQLLLVENSSEKPDFFEDNVVDLCQFTTLGGVYHLDILELPPQCKPVKGWMIVEILKEGLQKYTYPPETTEEFETENAFPPIEVTLEVHENVIFFEDPVVVRWDAEGKHWRTDGISNVSYKPKERLVTFSLDTFGPVTLIQDAHINMPYQSWELRPLDVNKVLLTVTTVFTEIQIQIKENLCMLSSIKLKDKKHISILEGTWMTPIPFIIALKEAGLNIFPTRHSHFYVIINNKVPLVEVKAYRQMALLSSAFAFGWSKWNLLCNSTKVVFKVREHLTEACTENPNWALLMFSGDRAQRLKIKEESEAFSEALKEETEFHSTLYHMVKDFASEEAMEKVRSSNCQFVNSVCHMLLSTRLLSYS

SEQ ID NO: 17840 - protein, 348 aa, Homo sapiens
MAEKVLVTGGAGYIGSHTVLELLEAGYLPVVIDNFHNAFRGGGSLPESLRRVQELTGRSVEFEEMDILDQGALQRLFKKYSFMAVIHFAGLKAVGESVQKPLDYYRVNLTGTIQLLEIMKAHGVKNLVFSSSATVYGNPQYLPLDEAHPTGGCTNPYGKSKFFIEEMIRDLCQADKTWNAVLLRYFNPTGAHASGCIGEDPQGIPNNLMPYVSQVAIGRREALNVFGNDYDTEDGTGVRDYIHVVDLAKGHIAALRKLKEQCGCRIYNLGTGTGYSVLQMVQAMEKASGKKIPYKVVARREGDVAACYANPSLAQEELGWTAALGLDRMCEDLWRWQKQNPSGFGTQA

SEQ ID NO: 17841 - protein, 274 aa, Homo sapiens
MSPLQYSFMAVIHFAGLKAVGESVQKPLDYYRVNLTGTIQLLEIMKAHGVKNLVFSSSATVYGNPQYLPLDEAHPTGGCTNPYGKSKFFIEEMIRDLCQADKTWNAVLLRYFNPTGAHASGCIGEDPQGIPNNLMPYVSQVAIGRREALNVFGNDYDTEDGTGVRDYIHVVDLAKGHIAALRKLKEQCGCRIYNLGTGTGYSVLQMVQAMEKASGKKIPYKVVARREGDVAACYANPSLAQEELGWTAALGLDRMCEDLWRWQKQNPSGFGTQA

SEQ ID NO: 17842 - protein, 385 aa, Homo sapiens
MSRPQLRRWRLVSSPPSGVPGLALLALLALLALRLAAGTDCPCPEPELCRPIRHHPDFEVFVFDVGQKTWKSYDWSQITTVATFGKYDSELMCYAHSKGARVVLKGDVSLKDIIDPAFRASWIAQKLNLAKTQYMDGINIDIEQEVNCLSPEYDALTALVKETTDSFHREIEGSQVTFDVAWSPKNIDRRCYNYTGIADACDFLFVMSYDEQSQIWSECIAAANAPYNQTLTGYNDYIKMSINPKKLVMGVPWYGYDYTCLNLSEDHVCTIAKVPFRGAPCSDAAGRQVPYKTIMKQINSSISGNLWDKDQRAPYYNYKDPAGHFHQVWYDNPQSISLKATYIQNYRLRGIGMWNANCLDYSGDAVAKQQTEEMWEVLKPKLLQR

SEQ ID NO: 17843 - protein, 1755 aa, Homo sapiens
METRSSKTRRSLASRTNECQGTMWAPTSPPAGSSSPSQPTWKSSLYSSLAYSEAFHYSFAARPRRLTQLALAQRPEPQLLRLRPSSLRTQDISHLLTGVFRNLYSAEVIGDEVSASLIKARGSENERHEEFVDQLQQIRELYKQRLDEFEMLERHITQAQARAIAENERVMSQAGVQDLESLVRLPPVKSVSRWCIDSELLRKHHLISPEDYYTDTVPFHSAPKGISLPGCSKLTFSCEKRSVQKKELNKKLEDSCRKKLAEFEDELDHTVDSLTWNLTPKAKERTREPLKKASQPRNKNWMNHLRVPQRELDRLLLARMESRNHFLKNPRFFPPNTRYGGKSLVFPPKKPAPIGEFQSTEPEQSCADTPVFLAKPPIGFFTDYEIGPVYEMVIALQNTTTTSRYLRVLPPSTPYFALGLGMFPGKGGMVAPGMTCQYIVQFFPDCLGDFDDFILVETQSAHTLLIPLQARRPPPVLTLSPVLDCGYCLIGGVKMTRFICKNVGFSVGRFCIMPKTSWPPLSFKAIATVGFVEQPPFGILPSVFELAPGHAILVEVLFSPKSLGKAEQTFIIMCDNCQIKELVTIGIGQLIALDLIYISGEKSQPDPGELTDLTAQHFIRFEPENLRSTARKQLIIRNATHVELAFYWQIMKPNLQPLMPGETFSMDSIKCYPDKETAFSIMPRKGVLSPHTDHEFILSFSPHELRDFHSVLQMVLEEVPEPVSSEAESLGHSSYSVDDVIVLEIEVKGSVEPFQVLLEPYALIIPGENYIGINVKKAFKMWNNSKSPIRYLWGKISDCHIIEVEPGTGVIEPSEVGDFELNFTGGVPGPTSQDLLCEIEDSPSPVVLHIEAVFKGPALIINVSALQFGLLRLGQKATNSIQIRNVSQLPATWRMKESPVSLQERPEDVSPFDIEPSSGQLHSLGECRVDITLEALHCQHLETVLELEVENGAWSYLPVYAEVQKPHVYLQSSQVEVRNLYLGVPTKTTITLINGTLLPTQFHWGKLLGHQAEFCMVTVSPKHGLLGPSEECQLKLELTAHTQEELTHLALPCHVSGMKKPLVLGISGKPQGLQVAITISKESSDCSTEQWPGHPKELRLDFGSAVPLRTRVTRQLILTNRSPIRTRFSLKFEYFGSPQNSLSKKTSLPNMPPALLKTVRMQEHLAKREQLDFMESMLSHGKGAAFFPHFSQGMLGPYQQLCIDITGCANMWGEYWDNLICTVGDLLPEVIPVHMAAVGCPISSLRTTSYTIDQAQKEPAMRFGTQVSGGDTVTRTLRLNNSSPCDIRLDWETYVPEDKEDRLVELLVFYGPPFPLRDQAGNELVCPDTPEGGCLLWSPGPSSSSEFSHETDSSVEGSSSASNRVAQKLISVILQAHEGVPSGHLYCISPKQVVVPAGGSSTIYISFTPMVLSPEILHKVECTGYALGFMSLDSKVEREIPGKRHRLQDFAVGPLKLDLHSYVRPAQLSVELDYGGSMEFQCQASDLIPEQPCSGVLSELVTTHHLKLTNTTEIPHYFRLMVSRPFSVSQDGASQDHRAPGPGQKQECEEETASADKQLVLQAQENMLVNVSFSLSLELLSYQKLPADQTLPGVDIQQSASGEREMVFTQNLLLEYTNQTTQVVPLRAVVAVPELQLSTSWVDFGTCFVSQQRVREVYLMNLSGCRSYWTMLMGQQEPAKAAVAFRVSPNSGLLEARSANAPPTSIALQVFFTARSSELYESTMVVEGVLGEKSCTLRLRGQGSYDERYMLPHQP

SEQ ID NO: 17844 - protein, 919 aa, Homo sapiens
METRSSKTRRSLASRTNECQGTMWAPTSPPAGSSSPSQPTWKSSLYSSLAYSEAFHYSFAARPRRLTQLALAQRPEPQLLRLRPSSLRTQDISHLLTGVFRNLYSAEVIGDEVSASLIKARGSENERHEEFVDQLQQIRELYKQRLDEFEMLERHITQAQARAIAENERVMSQAGVQDLESLVRLPPVKSVSRWCIDSELLRKHHLISPEDYYTDTVPFHSAPKGISLPGCSKLTFSCEKRSVQKKELNKKLEDSCRKKLAEFEDELDHTVDSLTWNLTPKAKERTREPLKKASQPRNKNWMNHLRVPQRELDRLLLARMESRNHFLKNPRFFPPNTRYGGKSLVFPPKKPAPIGEFQSTEPEQSCADTPVFLAKPPIGFFTDYEIGPVYEMVIALQNTTTTSRYLRVLPPSTPYFALGLGMFPGKGGMVAPGMTCQYIVQFFPDCLGDFDDFILVETQSAHTLLIPLQARRPPPVLTLSPVLDCGYCLIGGVKMTRFICKNVGFSVGRFCIMPKTSWPPLSFKAIATVGFVEQPPFGILPSVFELAPGHAILVEVLFSPKSLGKAEQTFIIMCDNCQIKELVTIGIGQLIALDLIYISGEKSQPDPGELTDLTAQHFIRFEPENLRSTARKQLIIRNATHVELAFYWQIMKPNLQPLMPGETFSMDSIKCYPDKETAFSIMPRKGVLSPHTDHEFILSFSPHMARLRGGRIPAMPQPSPGQPAGTQWCFQGTVFALQLRDFHSVLQMVLEEVPEPVSSEAESLGHSSYSVDDVIVLEIEVKGSVEPFQVLLEPYALIIPGENYIGINVKKAFKMWNNSKSPIRYLWGKISDCHIIEVEPGTGVIEPSEVGDFELNFTGGVPGPTSQDLLCEIEDSPSPVVLHIEAVFKPFSLVCSAWGRKPQTPSRSGTSASSQPHGA

SEQ ID NO: 17845 - protein, 1778 aa, Homo sapiens
METRSSKTRRSLASRTNECQGTMWAPTSPPAGSSSPSQPTWKSSLYSSLAYSEAFHYSFAARPRRLTQLALAQRPEPQLLRLRPSSLRTQDISHLLTGVFRNLYSAEVIGDEVSASLIKARGSENERHEEFVDQLQQIRELYKQRLDEFEMLERHITQAQARAIAENERVMSQAGVQDLESLVRLPPVKSVSRWCIDSELLRKHHLISPEDYYTDTVPFHSAPKGISLPGCSKLTFSCEKRSVQKKELNKKLEDSCRKKLAEFEDELDHTVDSLTWNLTPKAKERTREPLKKASQPRNKNWMNHLRVPQRELDRLLLARMESRNHFLKNPRFFPPNTRYGGKSLVFPPKKPAPIGEFQSTEPEQSCADTPVFLAKPPIGFFTDYEIGPVYEMVIALQNTTTTSRYLRVLPPSTPYFALGLGMFPGKGGMVAPGMTCQYIVQFFPDCLGDFDDFILVETQSAHTLLIPLQARRPPPVLTLSPVLDCGYCLIGGVKMTRFICKNVGFSVGRFCIMPKTSWPPLSFKAIATVGFVEQPPFGILPSVFELAPGHAILVEVLFSPKSLGKAEQTFIIMCDNCQIKELVTIGIGQLIALDLIYISGEKSQPDPGELTDLTAQHFIRFEPENLRSTARKQLIIRNATHVELAFYWQIMKPNLQPLMPGETFSMDSIKCYPDKETAFSIMPRKGVLSPHTDHEFILSFSPHELRDFHSVLQMVLEEVPEPVSSEAESLGHSSYSVDDVIVLEIEVKGSVEPFQVLLEPYALIIPGENYIGINVKKAFKMWNNSKSPIRYLWGKISDCHIIEVEPGTGVIEPSEVGDFELNFTGGVPGPTSQDLLCEIEDSPSPVVLHIEAVFKGPALIINVSALQFGLLRLGQKATNSIQIRNVSQLPATWRMKESPVSLQERPEDVSPFDIEPSSGQLHSLGECRVDITLEALHCQHLETVLELEVENGAWSYLPVYAEVQKPHVYLQSSQVEVRNLYLGVPTKTTITLINGTLLPTQFHWGKLLGHQAEFCMVTVSPKHGLLGPSEECQLKLELTAHTQEELTHLALPCHVSGMKKPLVLGISGKPQGLQVAITISKESSDCSTEQWPGHPKELRLDFGSAVPLRTRVTRQLILTNRSPIRTRFSLKFEYFGSPQNSLSKKTSLPNMPPALLKTVRMQEHLAKREQLDFMESMLSHGKGAAFFPHFSQGMLGPYQQLCIDITGCANMWGEYWDNLICTVGDLLPEVIPVHMAAVGCPISSLRTTSYTIDQAQKEPAMRFGTQVSGGDTVTRTLRLNNSSPCDIRLDWETYVPEDKEDRLVELLVFYGPPFPLRDQAGNELVCPDTPEGGCLLWSPGPSSSSEFSHETDSSVEGSSSASNRVAQKLISVILQAHEGVPSGHLYCISPKQVVVPAGGSSTIYISFTPMVLSPEILHKVECTGYALGFMSLDSKVEREIPGKRHRLQDFAVGPLKLDLHSYVRPAQLSVELDYGGSMEFQCQASDLIPEQPCSGVLSELVTTHHLKLTNTTEIPHYFRLMVSRPFSVSQDGASQDHRAPGPGQKQECEEETASADKQLVLQAQENMLVNVSFSLSLELLSYQKLPADQTLPGVDIQQSASGEREMVFTQNLLLEYTNQTTQVVPLRAVVAVPELQLSTSWVDFGTCFVSQQRVREVYLMNLSGCRSYWTMLMGVVSCTSPRWWWKVCSVRSPAPCGSGAKAPMMRDTCCLTSPEAPPQPSAPGPSWRKNIAQGLGAALQHKDTDLGTWGPLGSSWNGRTPFHNGLSLGPHDMSSELT

SEQ ID NO: 17846 - protein, 1101 aa, Homo sapiens
MEQPGAAASGAGGGSEEPGGGRSNKRSAGNRAANEEETKNKPKLNIQIKTLADDVRDRITSFRKSTVKKEKPLIQHPIDSQVAMSEFPAAQPLYDERSLNLSEKEVLDLFEKMMEDMNLNEEKKAPLRNKDFTTKREMVVQYISATAKSGGLKNSKHECTLSSQEYVHELRSGISDEKLLNCLESLRVSLTSNPVSWVNNFGHEGLGLLLDELEKLLDKKQQENIDKKNQYKLIQCLKAFMNNKFGLQRILGDERSLLLLARAIDPKQPNMMTEIVKILSAICIVGEENILDKLLGAITTAAERNNRERFSPIVEGLENQEALQLQVACMQFINALVTSPYELDFRIHLRNEFLRSGLKTMLPDLKEKENDELDIQLKVFDENKEDDLTELSHRLNDIRAEMDDMNEVYHLLYNMLKDTAAENYFLSILQHFLLIRNDYYIRPQYYKIIEECVSQIVLHCSGMDPDFKYRQRLDIDLTHLIDSCVNKAKVEESEQKAAEFSKKFDEEFTARQEAQAELQKRDEKIKELEAEIQQLRTQAQVLSSSSGIPGPPAAPPLPGVGPPPPPPAPPLPGGAPLPPPPPPLPGMMGIPPPPPPPLLFGGPPPPPPLGGVPPPPGISLNLPYGMKQKKMYKPEVSMKRINWSKIEPTELSENCFWLRVKEDKFENPDLFAKLALNFATQIKVQKNAEALEEKKTGPTKKKVKELRILDPKTAQNLSIFLGSYRMPYEDIRNVILEVNEDMLSEALIQNLVKHLPEQKILNELAELKNEYDDLCEPEQFGVVMSSVKMLQPRLSSILFKLTFEEHINNIKPSIIAVTLACEELKKSESFNRLLELVLLVGNYMNSGSRNAQSLGFKINFLCKIRDTKSADQKTTLLHFIADICEEKYRDILKFPEELEHVESASKVSAQILKSNLASMEQQIVHLERDIKKFPQAENQHDKFVEKMTSFTKTAREQYEKLSTMHNNMMKLYENLGEYFIFDSKTVSIEEFFGDLNNFRTLFLEAVRENNKRREMEEKTRRAKLAKEKAEQEKLERQKKKKQLIDINKEGDETGVMDNLLEALQSGAAFRDRRKRIPRNPDNRRVPLERSRSRHNGAISSK

SEQ ID NO: 17847 - protein, 1096 aa, Homo sapiens
MEQPGAAASGAGGGSEEPGGGRSNKRSAGNRAANEEETKNKPKLNIQIKTLADDVRDRITSFRKSTVKKEKPLIQHPIDSQVAMSEFPAAQPLYDERSLNLSEKEVLDLFEKMMEDMNLNEEKKAPLRNKDFTTKREMVVQYISATAKSGGLKNSKHECTLSSQEYVHELRSGISDEKLLNCLESLRVSLTSNPVSWVNNFGHEGLGLLLDELEKLLDKKQQENIDKKNQYKLIQCLKAFMNNKFGLQRILGDERSLLLLARAIDPKQPNMMTEIVKILSAICIVGEENILDKLLGAITTAAERNNRERFSPIVEGLENQEALQLQVACMQFINALVTSPYELDFRIHLRNEFLRSGLKTMLPDLKEKENDELDIQLKVFDENKEDDLTELSHRLNDIRAEMDDMNEVYHLLYNMLKDTAAENYFLSILQHFLLIRNDYYIRPQYYKIIEECVSQIVLHCSGMDPDFKYRQRLDIDLTHLIDSCVNKAKVEESEQKAAEFSKKFDEEFTARQEAQAELQKRDEKIKELEAEIQQLRTQAQVLSSSSGIPGPPAAPPLPGVGPPPPPPAPPLPGGAPLPPPPPPLPGMMGIPPPPPPPLLFGGPPPPPPLGGVPPPPGISLNLPYGMKQKKMYKPEVSMKRINWSKIEPTELSENCFWLRVKEDKFENPDLFAKLALNFATQIKVQKNAEALEEKKTGPTKKKVKELRILDPKTAQNLSIFLGSYRMPYEDIRNVILEVNEDMLSEALIQNLVKHLPEQKILNELAELKNEYDDLCEPEQFGVVMSSVKMLQPRLSSILFKLTFEEHINNIKPSIIAVTLACEELKKSESFNRLLELVLLVGNYMNSGSRNAQSLGFKINFLCKIRDTKSADQKTTLLHFIADICEEKYRDILKFPEELEHVESASKVSAQILKSNLASMEQQIVHLERDIKKFPQAENQHDKFVEKMTSFTKTAREQYEKLSTMHNNMMKLYENLGEYFIFDSKTVSIEEFFGDLNNFRTLFLEAVRENNKRREMEEKTRRAKLAKEKAEQEKLERQKKKKQLIDINKEGDETGVMDNLLEALQSGAAFRDRRKRIPRNPVVNHPCATRANPRSAT

SEQ ID NO: 17848 - protein, 1097 aa, Homo sapiens
MEQPGAAASGAGGGSEEPGGGRSNKRSAGNRAANEEETKNKPKLRDRITSFRKSTVKKEKPLIQHPIDSQVAMSEFPAAQPLYDERSLNLSEKEVLDLFEKMMEDMNLNEEKKAPLRNKDFTTKREMVVQYISATAKSIVGSKVTGGLKNSKHECTLSSQEYVHELRSGISDEKLLNCLESLRVSLTSNPVSWVNNFGHEGLGLLLDELEKLLDKKQQENIDKKNQYKLIQCLKAFMNNKFGLQRILGDERSLLLLARAIDPKQPNMMTEIVKILSAICIVGEENILDKLLGAITTAAERNNRERFSPIVEGLENQEALQLQVACMQFINALVTSPYELDFRIHLRNEFLRSGLKTMLPDLKEKENDELDIQLKVFDENKEDDLTELSHRLNDIRAEMDDMNEVYHLLYNMLKDTAAENYFLSILQHFLLIRNDYYIRPQYYKIIEECVSQIVLHCSGMDPDFKYRQRLDIDLTHLIDSCVNKAKVEESEQKAAEFSKKFDEEFTARQEAQAELQKRDEKIKELEAEIQQLRTQAQVLSSSSGIPGPPAAPPLPGVGPPPPPPAPPLPGGAPLPPPPPPLPGMMGIPPPPPPPLLFGGPPPPPPLGGVPPPPGISLNLPYGMKQKKMYKPEVSMKRINWSKIEPTELSENCFWLRVKEDKFENPDLFAKLALNFATQIKVQKNAEALEEKKTGPTKKKVKELRILDPKTAQNLSIFLGSYRMPYEDIRNVILEVNEDMLSEALIQNLVKHLPEQKILNELAELKNEYDDLCEPEQFGVVMSSVKMLQPRLSSILFKLTFEEHINNIKPSIIAVTLACEELKKSESFNRLLELVLLVGNYMNSGSRNAQSLGFKINFLCKIRDTKSADQKTTLLHFIADICEEKYRDILKFPEELEHVESASKVSAQILKSNLASMEQQIVHLERDIKKFPQAENQHDKFVEKMTSFTKTAREQYEKLSTMHNNMMKLYENLGEYFIFDSKTVSIEEFFGDLNNFRTLFLEAVRENNKRREMEEKTRRAKLAKEKAEQEKLERQKKKKQLIDINKEGDETGVMDNLLEALQSGAAFRDRRKRIPRNPDNRRVPLERSRSRHNGAISSK

SEQ ID NO: 17849 - protein, 154 aa, Homo sapiens
MGKSASKQFHNEVLKAHNEYRQKHGVPPLKLCKNLNREAQQYSEALASTRILKHSPESSRGQCGENLAWASYDQTGKEVADRWYSEIKNYNFQQPGFTSGTGHFTAMVWKNTKKMGVGKASASDGSSFVVARYFPAGNVVNEGFFEENVLPPKK

SEQ ID NO: 17850 - protein, 735 aa, Homo sapiens
MAKERGLISPSDFAQLQKYMEYSTKKVSDVLKLFEDGEMAKYVQGDAIGYEGFQQFLKIYLEVDNVPRHLSLALFQSFETGHCLNETNVTKDVVCLNDVSCYFSLLEGGRPEDKLEFTFKLYDTDRNGILDSSEVDKIILQMMRVAEYLDWDVSELRPILQEMMKEIDYDGSGSVSQAEWVRAGATTVPLLVLLGLEMTLKDDGQHMWRPKRFPRPVYCNLCESSIGLGKQGLSCNLCKYTVHDQCAMKALPCEVSTYAKSRKDIGVQSHVWVRGGCESGRCDRCQKKIRIYHSLTGLHCVWCHLEIHDDCLQAVGHECDCGLLRDHILPPSSIYPSVLASGPDRKNSKTSQKTMDDLNLSTSEALRIDPVPNTHPLLVFVNPKSGGKQGQRVLWKFQYILNPRQVFNLLKDGPEIGLRLFKDVPDSRILVCGGDGTVGWILETIDKANLPVLPPVAVLPLGTGNDLARCLRWGGGYEGQNLAKILKDLEMSKVVHMDRWSVEVIPQQTEEKSDPVPFQIINNYFSIGVDASIAHRFHIMREKYPEKFNSRMKNKLWYFEFATSESIFSTCKKLEESLTVEICGKPLDLSNLSLEGIAVLNIPSMHGGSNLWGDTRRPHGDIYGINQALGATAKVITDPDILKTCVPDLSDKRLEVVGLEGAIEMGQIYTKLKNAGRRLAKCSEITFHTTKTLPMQIDGEPWMQTPCTIKITHKNQMPMLMGPPPRSTNFFGFLS

SEQ ID NO: 17851 - protein, 118 aa, Homo sapiens
MAKERGLISPSDFAQLQKYMEYSTKKVSDVLKLFEDGEMAKYVQGDAIGYEGFQQFLKIYLEVDNVPRHLSLALFQSFETGHCLNETNVTKDVVCLNDVSCYFSLLEGGRPEDKLEWS

SEQ ID NO: 17852 - protein, 247 aa, Homo sapiens
MAKERGLISPSDFAQLQKYMEYSTKKVSDVLKLFEDGEMAKYVQGDAIGYEGFQQFLKIYLEVDNVPRHLSLALFQSFETGHCLNETNVTKDVVCLNDVSCYFSLLEGGRPEDKLEFTFKLYDTDRNGILDSSEVDKIILQMMRVAEYLDWDVSELRPILQEMMKEIDYDGSGSVSQAEWVRAGATTVPLLVLLGLEMTLKDDGQHMWRPKRFPRPVYCNLCESSIGLGKQGLSCNRPITCVGARRL

SEQ ID NO: 17853 - protein, 317 aa, Homo sapiens
MSLYRSVVWFAKGLREYTKSGYESACKDFVPHDLEVQIPGRVFLVTGGNSGIGKATALEIAKRGGTVHLVCRDQAPAEDARGEIIRESGNQNIFLHIVDLSDPKQIWKFVENFKQEHKLHVLINNAGCMVNKRELTEDGLEKNFAANTLGVYILTTGLIPVLEKEHDPRVITVSSGGMLVQKLNTNDLQSERTPFDGTMVYAQNKRQQVVLTERWAQGHPAIHFSSMHPGWADTPGVRQAMPGFHARFGDRLRSEAQGADTMLWLALSSAAAAQPSGRFFQDRKPVSTHLPLATASSSPAEEEKLIEILEQLAQTFK

SEQ ID NO: 17854 - protein, 242 aa, Homo sapiens
MNLHVKTLSLMTWRSRFLEESFWSLEETAALAKQLPLKSPSENIFLHIVDLSDPKQIWKFVENFKQEHKLHVLINNAGCMVNKRELTEDGLEKNFAANTLGVYILTTGLIPVLEKEHDPRVITVSSGGMLVQKLNTNDLQSERTPFDGTMVYAQNKRQQVVLTERWAQGHPAIHFSSMHPGWADTPGVRQAMPGFHARFGDRLRSEAQGADTMLWLALSSAAAAQPSGRFFQGDFLPGCEGS

SEQ ID NO: 17855 - protein, 271 aa, Homo sapiens
MNLHVKTLSLMTWRSRFLEESFWSLEETAALAKQLPLKSPSENIFLHIVDLSDPKQIWKFVENFKQEHKLHVLINNAGCMVNKRELTEDGLEKNFAANTLGVYILTTGLIPVLEKEHDPRVITVSSGGMLVQKLNTNDLQSERTPFDGTMVYAQNKRQQVVLTERWAQGHPAIHFSSMHPGWADTPDRNEQELRKVVGEAQTASPLPRFLEIMMHEGKCQPQGHSSNDLEACWSSGGGEQNSLPDWPHQLHDLRQLTWALCSSFLLYKQGN

SEQ ID NO: 17856 - protein, 157 aa, Homo sapiens
MSKSCGNNLAAISVGISLLLLLVVCGIGCVWHWKHRVATRFTLPRFLQRRSSRRKVCTKTFLGPRIIGLRHEISVETQDHKSAVRGNNTHDNYENVEAGPPKAKGKTDKELYENTGQSNFEEHIYGNETSSDYYNFQKPRPSEVPQDEDIYILPDSY

SEQ ID NO: 17857 - protein, 724 aa, Homo sapiens
MDCLCIVTTKKYRYQDEDTPPLEHSPAHLPNQANSPPVIVNTDTLEAPGYELQVNGTEGEMEYEEITLERGNSGLGFSIAGGTDNPHIGDDPSIFITKIIPGGAAAQDGRLRVNDSILFVNEVDVREVTHSAAVEALKEAGSIVRLYVMRRKPPAEKVMEIKLIKGPKGLGFSIAGGVGNQHIPGDNSIYVTKIIEGGAAHKDGRLQIGDKILAVNSVGLEDVMHEDAVAALKNTYDVVYLKVAKPSNAYLSDSYAPPDITTSYSQHLDNEISHSSYLGTDYPTAMTPTSPRRYSPVAKDLLGEEDIPREPRRIVIHRGSTGLGFNIVGGEDGEGIFISFILAGGPADLSGELRKGDQILSVNGVDLRNASHEQAAIALKNAGQTVTIIAQYKPEEYSRFEAKIHDLREQLMNSSLGSGTASLRSNPKRGFYIRALFDYDKTKDCGFLSQALSFRFGDVLHVIDASDEEWWQARRVHSDSETDDIGFIPSKRRVERREWSRLKAKDWGSSSGSQGREDSVLSYETVTQMEVHYARPIIILGPTKDRANDDLLSEFPDKFGSCVPHTTRPKREYEIDGRDYHFVSSREKMEKDIQAHKFIEAGQYNSHLYGTSVQSVREVAEQGKHCILDVSANAVRRLQAAHLHPIAIFIRPRSLENVLEINKRITEEQARKAFDRATKLEQEFTECFSAIVEGDSFEEIYHKVKRVIEDLSGPYIWVPARERL

SEQ ID NO: 17858 - protein, 767 aa, Homo sapiens
MSQRPRAPRSALWLLAPPLLRWAPPLLTVLHSDLFQALLDILDYYEASLSESQKYRYQDEDTPPLEHSPAHLPNQANSPPVIVNTDTLEAPGYELQVNGTEGEMEYEEITLERGNSGLGFSIAGGTDNPHIGDDPSIFITKIIPGGAAAQDGRLRVNDSILFVNEVDVREVTHSAAVEALKEAGSIVRLYVMRRKPPAEKVMEIKLIKGPKGLGFSIAGGVGNQHIPGDNSIYVTKIIEGGAAHKDGRLQIGDKILAVNSVGLEDVMHEDAVAALKNTYDVVYLKVAKPSNAYLSDSYAPPDITTSYSQHLDNEISHSSYLGTDYPTAMTPTSPRRYSPVAKDLLGEEDIPREPRRIVIHRGSTGLGFNIVGGEDGEGIFISFILAGGPADLSGELRKGDQILSVNGVDLRNASHEQAAIALKNAGQTVTIIAQYKPEEYSRFEAKIHDLREQLMNSSLGSGTASLRSNPKRGFYIRALFDYDKTKDCGFLSQALSFRFGDVLHVIDASDEEWWQARRVHSDSETDDIGFIPSKRRVERREWSRLKAKDWGSSSGSQGREDSVLSYETVTQMEVHYARPIIILGPTKDRANDDLLSEFPDKFGSCVPHTTRPKREYEIDGRDYHFVSSREKMEKDIQAHKFIEAGQYNSHLYGTSVQSVREVAEQGKHCILDVSANAVRRLQAAHLHPIAIFIRPRSLENVLEINKRITEEQARKAFDRATKLEQEFTECFSAIVEGDSFEEIYHKVKRVIEDLSGPYIWVPARERL

SEQ ID NO: 17859 - protein, 721 aa, Homo sapiens
MDCLCIVTTKKYRYQDEDTPPLEHSPAHLPNQANSPPVIVNTDTLEAPGYVNGTEGEMEYEEITLERGNSGLGFSIAGGTDNPHIGDDPSIFITKIIPGGAAAQDGRLRVNDSILFVNEVDVREVTHSAAVEALKEAGSIVRLYVMRRKPPAEKVMEIKLIKGPKGLGFSIAGGVGNQHIPGDNSIYVTKIIEGGAAHKDGRLQIGDKILAVNSVGLEDVMHEDAVAALKNTYDVVYLKVAKPSNAYLSDSYAPPDITTSYSQHLDNEISHSSYLGTDYPTAMTPTSPRRYSPVAKDLLGEEDIPREPRRIVIHRGSTGLGFNIVGGEDGEGIFISFILAGGPADLSGELRKGDQILSVNGVDLRNASHEQAAIALKNAGQTVTIIAQYKPEEYSRFEAKIHDLREQLMNSSLGSGTASLRSNPKRGFYIRALFDYDKTKDCGFLSQALSFRFGDVLHVIDASDEEWWQARRVHSDSETDDIGFIPSKRRVERREWSRLKAKDWGSSSGSQGREDSVLSYETVTQMEVHYARPIIILGPTKDRANDDLLSEFPDKFGSCVPHTTRPKREYEIDGRDYHFVSSREKMEKDIQAHKFIEAGQYNSHLYGTSVQSVREVAEQGKHCILDVSANAVRRLQAAHLHPIAIFIRPRSLENVLEINKRITEEQARKAFDRATKLEQEFTECFSAIVEGDSFEEIYHKVKRVIEDLSGPYIWVPARERL

SEQ ID NO: 17860 - protein, 1214 aa, Homo sapiens
MAAAAGAPPPGPPQPPPPPPPEESSDSEPEAEPGSPQKLIRKVSTSGQIRQKTIIKEGMLTKQNNSFQRSKRRYFKLRGRTLYYAKTAKSIIFDEVDLTDASVAESSTKNVNNSFTVITPCRKLILCADNRKEMEDWIAALKTVQNREHFEPTQYSMDHFSGMHNWYACSHARPTYCNVCREALSGVTSHGLSCEVCKFKAHKRCAVRATNNCKWTTLASIGKDIIEDADGIAMPHQWLEGNLPVSAKCTVCDKTCGSVLRLQDWRCLWCKAMVHTSCKESLLTKCPLGLCKVSVIPPTALNSIDSDGFWKASCPPSCTSPLLVFVNSKSGDNQGVKFLRRFKQLLNPAQVFDLMNGGPHLGLRLFQKFDTFRILVCGGDGSVGWVLSEIDSLNLHKQCQLGVLPLGTGNDLARVLGWGSACDDDTQLPQILEKLERASTKMLDRWSVMAYEAKLPRQASSSTVTEDFSEDSEVQQILFYEDSVAAHLSKILTSDQHSVVISSAKVLCETVKDFVARVGKAYEKTTESSEESEVMAKKCSVLKEKLDSLLKTLDDESQASSSLPNPPPTIAEEAEDGDGSGSICGSTGDRLVASACPARPQIFRPREQLMLRANSLKKAIRQIIEHTEKAVDEQNAQTQEQEGFVLGLSESEEKMDHRVCPPLSHSESFGVPKGRSQRKVSKSPCEKLISKGSLSLGSSASLPPQPGSRDGLPALNTKILYPNVRAGMSGSLPGGSVISRLLINADPFNSEPETLEYYTEKCVMNNYFGIGLDAKISLDFNNKRDEHPEKCRSRTKNMMWYGVLGTKELLHRTYKNLEQKVLLECDGRPIPLPSLQGIAVLNIPSYAGGTNFWGGTKEDDTFAAPSFDDKILEVVAVFGSMQMAVSRVIRLQHHRIAQCRTVKISILGDEGVPVQVDGEAWVQPPGYIRIVHKNRAQTLTRDRAFESTLKSWEDKQKCELPRPPSCSLHPEMLSEEEATQMDQFGQAAGVLIHSIREIAQSHRDMEQELAHAVNASSKSMDRVYGKPRTTEGLNCSFVLEMVNNFRALRSETELLLSGKMALQLDPPQKEQLGSALAEMDRQLRRLADTPWLCQSAEPGDEESVMLDLAKRSRSGKFRLVTKFKKEKNNKNKEAHSSLGAPVHLWGTEEVAAWLEHLSLCEYKDIFTRHDIRGSELLHLERRDLKDLGVTKVGHMKRILCGIKELSRSAPAVEA

SEQ ID NO: 17861 - protein, 1170 aa, Homo sapiens
MNMFLYFQTIIKEGMLTKQNNSFQRSKRRYFKLRGRTLYYAKTAKSIIFDEVDLTDASVAESSTKNVNNSFTVITPCRKLILCADNRKEMEDWIAALKTVQNREHFEPTQYSMDHFSGMHNWYACSHARPTYCNVCREALSGVTSHGLSCEVCKFKAHKRCAVRATNNCKWTTLASIGKDIIEDADGIAMPHQWLEGNLPVSAKCTVCDKTCGSVLRLQDWRCLWCKAMVHTSCKESLLTKCPLGLCKVSVIPPTALNSIDSDGFWKASCPPSCTSPLLVFVNSKSGDNQGVKFLRRFKQLLNPAQVFDLMNGGPHLGLRLFQKFDTFRILVCGGDGSVGWVLSEIDSLNLHKQCQLGVLPLGTGNDLARVLGWGSACDDDTQLPQILEKLERASTKMLDRWSVMAYEAKLPRQASSSTVTEDFSEDSEVQQILFYEDSVAAHLSKILTSDQHSVVISSAKVLCETVKDFVARVGKAYEKTTESSEESEVMAKKCSVLKEKLDSLLKTLDDESQASSSLPNPPPTIAEEAEDGDGSGSICGSTGDRLVASACPARPQIFRPREQLMLRANSLKKAIRQIIEHTEKAVDEQNAQTQEQEGFVLGLSESEEKMDHRVCPPLSHSESFGVPKGRSQRKVSKSPCEKLISKGSLSLGSSASLPPQPGSRDGLPALNTKILYPNVRAGMSGSLPGGSVISRLLINADPFNSEPETLEYYTEKCVMNNYFGIGLDAKISLDFNNKRDEHPEKCRSRTKNMMWYGVLGTKELLHRTYKNLEQKVLLECDGRPIPLPSLQGIAVLNIPSYAGGTNFWGGTKEDDTFAAPSFDDKILEVVAVFGSMQMAVSRVIRLQHHRIAQCRTVKISILGDEGVPVQVDGEAWVQPPGYIRIVHKNRAQTLTRDRAFESTLKSWEDKQKCELPRPPSCSLHPEMLSEEEATQMDQFGQAAGVLIHSIREIAQSHRDMEQELAHAVNASSKSMDRVYGKPRTTEGLNCSFVLEMVNNFRALRSETELLLSGKMALQLDPPQKEQLGSALAEMDRQLRRLADTPWLCQSAEPGDEESVMLDLAKRSRSGKFRLVTKFKKEKNNKNKEAHSSLGAPVHLWGTEEVAAWLEHLSLCEYKDIFTRHDIRGSELLHLERRDLKDLGVTKVGHMKRILCGIKELSRSAPAVEA

SEQ ID NO: 17862 - protein, 1009 aa, Homo sapiens
MDMFSLDMIISDPAAEASRAGKKQLRGVQNPCPSARARPRHKSLNIKDKISEWEGKKEVPTPAPSRRADGQEDYLPSSTVERRSSDGVRTQVTEAKNGMRPGTESTEKERNKGAVNVGGQDPEPGQDLSQPEREVDPSWGRGREPRLGKLRFQNDPLSVLKQVKKLEQALKDGSAGLDPQLPGTCYSPHCPPDKAEAGSTLPENLGGGSGSEVSQRVHPSDLEGREPTPELVEDRKGSCRRPWDRSLENVYRGSEGSPTKPFINPLPKPRRTFKHAGEGDKDGKPGIGFRKEKRNLPPLPSLPPPPLPSSPPPSSVNRRLWTGRQKSSADHRKSYEFEDLLQSSSESSRVDWYAQTKLGLTRTLSEENVYEDILDPPMKENPYEDIELHGRCLGKKCVLNFPASPTSSIPDTLTKQSLSKPAFFRQNSERRNFKLLDTRKLSRDGTGSPSKISPPSTPSSPDDIFFNLGDPQNGRKKRKIPKLVLRINAIYEVRRGKKRVKRLSQSMESNSGKVTDENSESDSDTEEKLKAHSQRLVNVKSRLKQAPRYPSLARELIEYQERQLFEYFVVVSLHKKQAGAAYVPELTQQFPLKLERSFKFMREAEDQLKAIPQFCFPDAKDWVPVQQFTSETFSFVLTGEDGSRRFGYCRRLLPGGKGKRLPEVYCIVSRLGCFSLFSRILDEVEKRRGISPALVQPLMRSVMEAPFPALGKTILVKNFLPGSGTEVIELCRPLDSRLEHVDFESLFSSLSVRHLVCVFASLLLERRVIFIADKLSILSKCCHAMVALIYPFAWQHTYIPVLPPAMVDIVCSPTPFLIGLLSSSLPLLRELPLEEVLVVDLVNSRFLRQMDDEDSILPRKLQVALEHILEQRNELACEQDEGPLDGRHGPESSPLNEVVSEAFVRFFVEIVGHYSLFLTSGEREERTLQREAFRKAVSSKSLRHFLEVFMETQMFRGFIQERELRRQDAKGLFEVRAQEYLETLPSGEHSGVNKFLKGLGNKMKFLHKK

SEQ ID NO: 17863 - protein, 795 aa, Homo sapiens
MDMFSLDMIISDPAAEASRAGKKQLRGVQNPCPSARARPRHKSLNIKDKISEWEGKKEVPTPAPSRRADGQEDYLPSSTVERRSSDGVRTQVTEAKNGMRPGTESTEKERNKGAVNVGGQDPEPGQDLSQPEREVDPSWGRGREPRLGKLRFQNDPLSVLKQVKKLEQALKDGSAGLDPQLPGTCYSPHCPPDKAEAGSTLPENLGGGSGSEVSQRVHPSDLEGREPTPELVEDRKGSCRRPWDRSLENVYRGSEGSPTKPFINPLPKPRRTFKHAGEGDKDGKPGIGFRKEKRNLPPLPSLPPPPLPSSPPPSSVNRRLWTGRQKSSADHRKSYEFEDLLQSSSESSRVDWYAQTKLGLTRTLSEENVYEDILDPPMKENPYEDIELHGRCLGKKCVLNFPASPTSSIPDTLTKQSLSKPAFFRQNSERRNFKLLDTRKLSRDGTGSPSKISPPSTPSSPDDIFFNLGDPQNGRKKRKIPKLVLRINAIYEVRRGKKRVKRLSQSMESNSGKVTDENSESDSDTEEKLKAHSQRLVNVKSRLKQAPRYPSLARELIEYQERQLFEYFVVVSLHKKQAGAAYVPELTQQFPLKLERSFKFMREAEDQLKAIPQFCFPDAKDWVPVQQFTSETFSFVLTGEDGSRRFGYCRRLLPGGKGKRLPEVYCIVSRLGCFSLFSRILDEVEKRRGISPALVQPLMRSVMEAPFPALGKTILVKNFLPGSGTEVIELCRPLDSRLEHVDFESLFSSLSVRHLVCVFASLLLERRVIFIADKLRYPPWLLLLKRLNDSRSWTL

SEQ ID NO: 17864 - protein, 801 aa, Homo sapiens
MESRAEGGSPAVFDWFFEAACPASLQEDPPILRQFPPDFRDQEAMQMVPKFCFPFDVEREPPSPAVQHFTFALTDLAGNRRFGFCRLRAGTQSCLCILSHLPWFEVFYKLLNTVGDLLAQDQVTEAEELLQNLFQQSLSGPQASVGLELGSGVTVSSGQGIPPPTRGNSKPLSCFVAPDSGRLPSIPENRNLTELVVAVTDENIVGLFAALLAERRVLLTASKLSTLTSCVHASCALLYPMRWEHVLIPTLPPHLLDYCCAPMPYLIGVHASLAERVREKALEDVVVLNVDANTLETTFNDVQALPPDVVSLLRLRLRKVALAPGEGVSRLFLKAQALLFGGYRDALVCSPGQPVTFSEEVFLAQKPGAPLQAFHRRAVHLQLFKQFIEARLEKLNKGEGFSDQFEQEITGCGASSGALRSYQLWADNLKKGGGALLHSVKAKTQPAVKNMYRSAKSGLKGVQSLLMYKDGDSVLQRGGSLRAPALPSRSDRLQQRLPITQHFGKNRPLRPSRRRQLEEGTSEPPGAGTPPLSPEDEGCPWAEEALDSSFLGSGEELDLLSEILDSLSMGAKSAGSLRPSQSLDCCHRGDLDSCFSLPNIPRWQPDDKKLPEPEPQPLSLPSLQNASSLDATSSSKDSRSQLIPSESDQEVTSPSQSSTASADPSIWGDPKPSPLTEPLILHLTPSHKAAEDSTAQENPTPWLSTAPTEPSPPESPQILAPTKPNFDIAWTSQPLDPSSDPSSLEDPRARPPKALLAERAHLQPREEPGALNSPATPTSNCQKSQPSSRPRVADLKKCFEG

SEQ ID NO: 17865 - protein, 757 aa, Homo sapiens
MQMVPKFCFPFDVEREPPSPAVQHFTFALTDLAGNRRFGFCRLRAGTQSCLCILSHLPWFEVFYKLLNTVGDLLAQDQVTEAEELLQNLFQQSLSGPQASVGLELGSGVTVSSGQGIPPPTRGNSKPLSCFVAPDSGRLPSIPENRNLTELVVAVTDENIVGLFAALLAERRVLLTASKLSTLTSCVHASCALLYPMRWEHVLIPTLPPHLLDYCCAPMPYLIGVHASLAERVREKALEDVVVLNVDANTLETTFNDVQALPPDVVSLLRLRLRKVALAPGEGVSRLFLKAQALLFGGYRDALVCSPGQPVTFSEEVFLAQKPGAPLQAFHRRAVHLQLFKQFIEARLEKLNKGEGFSDQFEQEITGCGASSGALRSYQLWADNLKKGGGALLHSVKAKTQPAVKNMYRSAKSGLKGVQSLLMYKDGDSVLQRGGSLRAPALPSRSDRLQQRLPITQHFGKNRPLRPSRRRQLEEGTSEPPGAGTPPLSPEDEGCPWAEEALDSSFLGSGEELDLLSEILDSLSMGAKSAGSLRPSQSLDCCHRGDLDSCFSLPNIPRWQPDDKKLPEPEPQPLSLPSLQNASSLDATSSSKDSRSQLIPSESDQEVTSPSQSSTASADPSIWGDPKPSPLTEPLILHLTPSHKAAEDSTAQENPTPWLSTAPTEPSPPESPQILAPTKPNFDIAWTSQPLDPSSDPSSLEDPRARPPKALLAERAHLQPREEPGALNSPATPTSNCQKSQPSSRPRVADLKKCFEG

SEQ ID NO: 17866 - protein, 791 aa, Homo sapiens
MGEERWVSLTPEEFDQLQKYSEYSSKKIKDALTEFNEGGSLKQYDPHEPISYDVFKLFMRAYLEVDLPQPLSTHLFLAFSQKPRHETSDHPTEGASNSEANSADTNIQNADNATKADEACAPDTESNMAEKQAPAEDQVAATPLEPPVPRSSSSESPVVYLKDVVCYLSLLETGRPQDKLEFMFRLYDSDENGLLDQAEMDCIVNQMLHIAQYLEWDPTELRPILKEMLQGMDYDRDGFVSLQEWVHGGMTTIPLLVLLGMDDSGSKGDGRHAWTMKHFKKPTYCNFCHIMLMGVRKQGLCCTYCKYTVHERCVSRNIPGCVKTYSKAKRSGEVMQHAWVEGNSSVKCDRCHKSIKCYQSVTARHCVWCRMTFHRKCELSTLCDGGELRDHILLPTSICPITRDRPGEKSDGCVSAKGELVMQYKIIPTPGTHPLLVLVNPKSGGRQGERILRKFHYLLNPKQVFNLDNGGPTPGLNFFRDTPDFRVLACGGDGTVGWILDCIDKANFAKHPPVAVLPLGTGNDLARCLRWGGGYEGGSLTKILKDIEQSPLVMLDRWHLEVIPREEVENGDQVPYSIMNNYFSIGVDASIAHRFHVMREKHPEKFNSRMKNKLWYFEFGTSETFAATCKKLHDHIELECDGVGVDLSNIFLEGIAILNIPSMYGGTNLWGENKKNRAVIRESRKGVTDPKELKFCVQDLSDQLLEVVGLEGAMEMGQIYTGLKSAGRRLAQCASVTIRTNKLLPMQVDGEPWMQPCCTIKITHKNQAPMMMGPPQKSSFFSLRRKSRSKD

SEQ ID NO: 17867 - protein, 766 aa, Homo sapiens
MGEERWVSLTPEEFDQLQKYSEYSSKKIKDALTEFNEGGSLKQYDPHEPISYDVFKLFMRAYLEVDLPQPLSTHLFLAFSQKPRHETSDHPTEGASNSEANSADTNIQNADNATKADEACAPDTESNMAEKQAPAEDQVAATPLEPPVPRSSSSESPVVYLKDVVCYLSLLETGRPQDKLEFMFRLYDSDENGLLDQAEMDCIVNQMLHIAQYLEWDPTELRPILKEMLQGMDYDRDGFVSLQEWVHGGMTTIPLLVLLGMDDSGSKGDGRHAWTMKHFKKPTYCNFCHIMLMGVRKQGLCCTYCKYTVHERCVSRNIPGCVKTYSKAKRSGEVMQHAWVEGNSSVKCDRCHKSIKCYQSVTARHCVWCRMTFHRKCELSTLCDGGELRDHILLPTSICPITRDRPGEKSDGCVSAKGELVMQYKIIPTPGTHPLLVLVNPKSGGRQGERLNFFRDTPDFRVLACGGDGTVGWILDCIDKANFAKHPPVAVLPLGTGNDLARCLRWGGGYEGGSLTKILKDIEQSPLVMLDRWHLEVIPREEVENGDQVPYSIMNNYFSIGVDASIAHRFHVMREKHPEKFNSRMKNKLWYFEFGTSETFAATCKKLHDHIELECDGVGVDLSNIFLEGIAILNIPSMYGGTNLWGENKKNRAVIRESRKGVTDPKELKFCVQDLSDQLLEVVGLEGAMEMGQIYTGLKSAGRRLAQCASVTIRTNKLLPMQVDGEPWMQPCCTIKITHKNQAPMMMGPPQKSSFFSLRRKSRSKD

SEQ ID NO: 17868 - protein, 752 aa, Homo sapiens
MGEERWVSLTPEEFDQLQKYSEYSSKKIKDALTEFNEGGSLKQYDPHEPISYDVFKLFMRAYLEVDLPQPLSTHLFLAFSQKPRHETSDHPTEGASNSEANSADTNIQNADNATKADEACAPDTESNMAEKQAPAEDQVAATPLEPPVPRSSSSESPVVYLKDVVCYLSLLETGRPQDKLEFMFRLYDSDENGLLDQAEMDCIVNQMLHIAQYLEWDPTELRPILKEMLQGMDYDRDGFVSLQEWVHGGMTTIPLLVLLGMDDSGSKGDGRHAWTMKHFKKPTYCNFCHIMLMGVRKQGLCCTYCKYTVHERCVSRNIPGCVKTYSKAKRSGEFHRKCELSTLCDGGELRDHILLPTSICPITRDRPGEKSDGCVSAKGELVMQYKIIPTPGTHPLLVLVNPKSGGRQGERILRKFHYLLNPKQVFNLDNGGPTPGLNFFRDTPDFRVLACGGDGTVGWILDCIDKANFAKHPPVAVLPLGTGNDLARCLRWGGGYEGGSLTKILKDIEQSPLVMLDRWHLEVIPREEVENGDQVPYSIMNNYFSIGVDASIAHRFHVMREKHPEKFNSRMKNKLWYFEFGTSETFAATCKKLHDHIELECDGVGVDLSNIFLEGIAILNIPSMYGGTNLWGENKKNRAVIRESRKGVTDPKELKFCVQDLSDQLLEVVGLEGAMEMGQIYTGLKSAGRRLAQCASVTIRTNKLLPMQVDGEPWMQPCCTIKITHKNQAPMMMGPPQKSSFFSLRRKSRSKD

SEQ ID NO: 17869 - protein, 1137 aa, Homo sapiens
MTMTANKNSSITHGAGGTKAPRGTLSRSQSVSPPPVLSPPRSPIYPLSDSETSACRYPSHSSSRVLLKDRHPPAPSPQNPQDPSPDTSPPTCPFKTASFGYLDRSPSACKRDAQKESVQGAAQDVAGVAACLPLAQSTPFPGPAAGPRGVLLTRTGTRAHSLGIREKISAWEGRREASPRMSMCGEKREGSGSEWAASEGCPSLGCPSVVPSPCSSEKTFDFKGLRRMSRTFSECSYPETEEEGEALPVRDSFYRLEKRLGRSEPSAFLRGHGSRKESSAVLSRIQKIEQVLKEQPGRGLPQLPSSCYSVDRGKRKTGTLGSLEEPAGGASVSAGSRAVGVAGVAGEAGPPPEREGSGSTKPGTPGNSPSSQRLPSKSSLDPAVNPVPKPKRTFEYEADKNPKSKPSNGLPPSPTPAAPPPLPSTPAPPVTRRPKKDMRGHRKSQSRKSFEFEDASSLQSLYPSSPTENGTENQPKFGSKSTLEENAYEDIVGDLPKENPYEDVDLKSRRAGRKSQQLSENSLDSLHRMWSPQDRKYNSPPTQLSLKPNSQSLRSGNWSERKSHRLPRLPKRHSHDDMLLLAQLSLPSSPSSLNEDSLSTTSELLSSRRARRIPKLVQRINSIYNAKRGKKRLKKLSMSSIETASLRDENSESESDSDDRFKAHTQRLVHIQSMLKRAPSYRTLELELLEWQERELFEYFVVVSLKKKPSRNTYLPEVSYQFPKLDRPTKQMREAEERLKAIPQFCFPDAKDWLPVSEYSSETFSFMLTGEDGSRRFGYCRRLLPSGKGPRLPEVYCVISRLGCFGLFSKVLDEVERRRGISAALVYPFMRSLMESPFPAPGKTIKVKTFLPGAGNEVLELRRPMDSRLEHVDFECLFTCLSVRQLIRIFASLLLERRVIFVADKLSTLSSCSHAVVALLYPFSWQHTFIPVLPASMIDIVCCPTPFLVGLLSSSLPKLKELPVEEALMVNLGSDRFIRQMDDEDTLLPRKLQAALEQALERKNELISQDSDSDSDDECNTLNGLVSEVFIRFFVETVGHYSLFLTQSEKGERAFQREAFRKSVASKSIRRFLEVFMESQMFAGFIQDRELRKCRAKGLFEQRVEQYLEELPDTEQSGMNKFLRGLGNKMKFLHKKN

SEQ ID NO: 17870 - protein, 717 aa, Homo sapiens
MTMTANKNSSITHGAGGTKAPRGTLSRKSFEFEDASSLQSLYPSSPTENGTENQPKFGSKSTLEENAYEDIVGDLPKENPYEDVDLKSRRAGRKSQQLSENSLDSLHRMWSPQDRKYNSPPTQLSLKPNSQSLRSGNWSERKSHRLPRLPKRHSHDDMLLLAQLSLPSSPSSLNEDSLSTTSELLSSRRARRIPKLVQRINSIYNAKRGKKRLKKLSMSSIETASLRDENSESESDSDDRFKAHTQRLVHIQSMLKRAPSYRTLELELLEWQERELFEYFVVVSLKKKPSRNTYLPEVSYQFPKLDRPTKQMREAEERLKAIPQFCFPDAKDWLPVSEYSSETFSFMLTGEDGSRRFGYCRRLLPSGKGPRLPEVYCVISRLGCFGLFSKVLDEVERRRGISAALVYPFMRSLMESPFPAPGKTIKVKTFLPGAGNEVLELRRPMDSRLEHVDFECLFTCLSVRQLIRIFASLLLERRVIFVADKLSTLSSCSHAVVALLYPFSWQHTFIPVLPASMIDIVCCPTPFLVGLLSSSLPKLKELPVEEALMVNLGSDRFIRQMDDEDTLLPRKLQAALEQALERKNELISQDSDSDSDDECNTLNGLVSEVFIRFFVETVGHYSLFLTQSEKGERAFQREAFRKSVASKSIRRFLEVFMESQMFAGFIQDRELRKCRAKGLFEQRVEQYLEELPDTEQSGMNKFLRGLGNKMKFLHKKN

SEQ ID NO: 17871 - protein, 609 aa, Homo sapiens
MWSPQDRKYNSPPTQLSLKPNSQSLRSGNWSERKSHRLPRLPKRHSHDDMLLLAQLSLPSSPSSLNEDSLSTTSELLSSRRARRIPKLVQRINSIYNAKRGKKRLKKLSMSSIETASLRDENSESESDSDDRFKAHTQRLVHIQSMLKRAPSYRTLELELLEWQERELFEYFVVVSLKKKPSRNTYLPEVSYQFPKLDRPTKQMREAEERLKAIPQFCFPDAKDWLPVSEYSSETFSFMLTGEDGSRRFGYCRRLLPSGKGPRLPEVYCVISRLGCFGLFSKVLDEVERRRGISAALVYPFMRSLMESPFPAPGKTIKVKTFLPGAGNEVLELRRPMDSRLEHVDFECLFTCLSVRQLIRIFASLLLERRVIFVADKLSTLSSCSHAVVALLYPFSWQHTFIPVLPASMIDIVCCPTPFLVGLLSSSLPKLKELPVEEALMVNLGSDRFIRQMDDEDTLLPRKLQAALEQALERKNELISQDSDSDSDDECNTLNGLVSEVFIRFFVETVGHYSLFLTQSEKGERAFQREAFRKSVASKSIRRFLEVFMESQMFAGFIQDRELRKCRAKGLFEQRVEQYLEELPDTEQSGMNKFLRGLGNKMKFLHKKN

SEQ ID NO: 17872 - protein, 1496 aa, Homo sapiens
MAEERPPRLVDYFVVAGLAGNGAPIPEETWVPEPSGPLRPPRPAEPITDVAVIARALGEEVPQGYTCIQASAGGHPLELSAGLLGGTQPVICYRRGRDKPPLVELGVLYEGKERPKPGFQVLDTTPYSHSANLAPPGPGHPRTYLTYRRAAEGAGLHALGITDLCLVLPSKGEGTPHTYCRLPRNLNPGMWGPAVYLCYKVGLAKANTLVYEAELLGRYPEEDNEAFPLPESVPVFCLPMGATIECWPAQTKYPVPVFSTFVLTGAAGDKVYGAALQFYEAFPRARLSERQARALGLLSAVERGRALGGRAVRSRRAIAVLSRWPAFPAFRAFLTFLYRYSVSGPHRLPLEAHISHFIHNVPFPSPQRPRILVQMSPYDNLLLCQPVSSPLPLSGASFLQLLQSLGPELAITLLLAVLTEHKLLVHSLRPDLLTSVCEALVSMIFPLHWQCPYIPLCPLVLADVLSAPVPFIVGIHSSYFDLHDPPADVICVDLDTNTLFQTEEKKLLSPRTLPRRPYKVLLATLTNLYQQLDQTYTGPEEEASLEFLLTDYEAVCGRRARLEREVQGAFLRFMACLLKGYRVFLRPLTQAPSEGARDVDNLFFLQGFLKSRERSSHKLYSQLLHTQMFSQFIEECSFGSARHAALEFFDSCVEKVHPEQEKPEPTPLVELEELSGSELTVFITPPEEPALPEGSESTPQYCYDGFPELRAELFESLQEQPGALPVPGPSRSAPSSPAPRRTKQEMKVAQRMAQKSAAVPELWARCLLGHCYGLWFLCLPAYVRSAPSRVQALHTAYHVLRQMESGKVVLPDEVCYRVLMQLCSHYGQPVLSVRVMLEMRQAGIVPNTITYGYYNKAVLESKWPSGTPGGRLRWAKLRNVVLGAAQFRQPLRERQQQQQQQQQQQQQQQQEQVSAHQEAGSSQAEPYLERPSPTRPLQRQTTWAGRSLRDPASPPGRLVKSGSLGSARGAQPTVEAGVAHMIEALGVLEPRGSPVPWHDGSLSDLSLTGEEPLPGGSPGGSGSALSAQSTEALEGLSGRGPKAGGRQDEAGTPRRGLGARLQQLLTPSRHSPASRIPPPELPPDLPPPARRSPMDSLLHPRERPGSTASESSASLGSEWDLSESSLSNLSLRRSSERLSDTPGSFQSPSLEILLSSCSLCRACDSLVYDEEIMAGWAPDDSNLNTTCPFCACPFVPLLSVQTLDSRPSVPSPKSAGASGSKDAPVPGGPGPVLSDRRLCLALDEPQLCNGHMGGASRRVESGAWAYLSPLVLRKELESLVENEGSEVLALPELPSAHPIIFWNLLWYFQRLRLPSILPGLVLASCDGPSHSQAPSPWLTPDPASVQVRLLWDVLTPDPNSCPPLYVLWRVHSQIPQRVVWPGPVPASLSLALLESVLRHVGLNEVHKAVGLLLETLGPPPTGLHLQRGIYREILFLTMAALGKDHVDIVAFDKKYKSAFNKLASSMGKEELRHRRAQMPTPKAIDCRKCFGAPPEC

SEQ ID NO: 17873 - protein, 2098 aa, Homo sapiens
MATDDKTSPTLDSANDLPRSPTSPSHLTHFKPLTPDQDEPPFKSAYSSFVNLFRFNKERAEGGQGEQQPLSGSWTSPQLPSRTQSVRSPTPYKKQLNEELQRRSSALDTRRKAEPTFGGHDPRTAVQLRSLSTVLKRLKEIMEGKSQDSDLKQYWMPDSQCKECYDCSEKFTTFRRRHHCRLCGQIFCSRCCNQEIPGKFMGYTGDLRACTYCRKIALSYAHSTDSNSIGEDLNALSDSACSVSVLDPSEPRTPVGSRKASRNIFLEDDLAWQSLIHPDSSNTPLSTRLVSVQEDAGKSPARNRSASITNLSLDRSGSPMVPSYETSVSPQANRTYVRTETTEDERKILLDSVQLKDLWKKICHHSSGMEFQDHRYWLRTHPNCIVGKELVNWLIRNGHIATRAQAIAIGQAMVDGRWLDCVSHHDQLFRDEYALYRPLQSTEFSETPSPDSDSVNSVEGHSEPSWFKDIKFDDSDTEQIAEEGDDNLANSASPSKRTSVSSFQSTVDSDSAASISLNVELDNVNFHIKKPSKYPHVPPHPADQKEYLISDTGGQQLSISDAFIKESLFNRRVEEKSKELPFTPLGWHHNNLELLREENGEKQAMERLLSANHNHMMALLQQLLHSDSLSSSWRDIIVSLVCQVVQTVRPDVKNQDDDMDIRQFVHIKKIPGGKKFDSVVVNGFVCTKNIAHKKMSSCIKNPKILLLKCSIEYLYREETKFTCIDPIVLQEREFLKNYVQRIVDVRPTLVLVEKTVSRIAQDMLLEHGITLVINVKSQVLERISRMTQGDLVMSMDQLLTKPHLGTCHKFYMQIFQLPNEQTKTLMFFEGCPQHLGCTIKLRGGSDYELARVKEILIFMICVAYHSQLEISFLMDEFAMPPTLMQNPSFHSLIEGRGHEGAVQEQYGGGSIPWDPDIPPESLPCDDSSLLELRIVFEKGEQENKNLPQAVASVKHQEHSTTACPAGLPCAFFAPVPESLLPLPVDDQQDALGSEQPETLQQTVVLQDPKSQIRAFRDPLQDDTGLYVTEEVTSSEDKRKTYSLAFKQELKDVILCISPVITFREPFLLTEKGMRCSTRDYFAEQVYWSPLLNKEFKEMENRRKKQLLRDLSGLQGMNGSIQAKSIQVLPSHELVSTRIAEHLGDSQSLGRMLADYRARGGRIQPKNSDPFAHSKDASSTSSGQSGSKNEGDEERGLILSDAVWSTKVDCLNPINHQRLCVLFSSSSAQSSNAPSACVSPWIVTMEFYGKNDLTLGIFLERYCFRPSYQCPSMFCDTPMVHHIRRFVHGQGCVQIILKELDSPVPGYQHTILTYSWCRICKQVTPVVALSNESWSMSFAKYLELRFYGHQYTRRANAEPCGHSIHHDYHQYFSYNQMVASFSYSPIRLLEVCVPLPKIFIKRQAPLKVSLLQDLKDFFQKVSQVYVAIDERLASLKTDTFSKTREEKMEDIFAQKEMEEGEFKNWIEKMQARLMSSSVDTPQQLQSVFESLIAKKQSLCEVLQAWNNRLQDLFQQEKGRKRPSVPPSPGRLRQGEESKISAMDASPRNISPGLQNGEKEDRFLTTLSSQSSTSSTHLQLPTPPEVMSEQSVGGPPELDTASSSEDVFDGHLLGSTDSQVKEKSTMKAIFANLLPGNSYNPIPFPFDPDKHYLMYEHERVPIAVCEKEPSSIIAFALSCKEYRNALEELSKATQWNSAEEGLPTNSTSDSRPKSSSPIRLPEMSGGQTNRTTETEPQPTKKASGMLSFFRGTAGKSPDLSSQKRETLRGADSAYYQVGQTGKEGTENQGVEPQDEVDGGDTQKKQLINPHVELQFSDANAKFYCRLYYAGEFHKMREVILDSSEEDFIRSLSHSSPWQARGGKSGAAFYATEDDRFILKQMPRLEVQSFLDFAPHYFNYITNAVQQKRPTALAKILGVYRIGYKNSQNNTEKKLDLLVMENLFYGRKMAQVFDLKGSLRNRNVKTDTGKESCDVVLLDENLLKMVRDNPLYIRSHSKAVLRTSIHSDSHFLSSHLIIDYSLLVGRDDTSNELVVGIIDYIRTFTWDKKLEMVVKSTGILGGQGKMPTVVSPELYRTRFCEAMDKYFLMVPDHWTGLGLNC

SEQ ID NO: 17874 - protein, 451 aa, Homo sapiens
MATDDKTSPTLDSANDLPRSPTSPSHLTHFKPLTPDQDEPPFKSAYSSFVNLFRFNKERAEGGQGEQQPLSGSWTSPQLPSRTQSVRSPTPYKKQLNEELQRRSSALGDLRACTYCRKIALSYAHSTDSNSIGEDLNALSDSACSVSVLDPSEPRTPVGSRKASRNIFLEDDLAWQSLIHPDSSNTPLSTRLVSVQEDAGKSPARNRSASITNLSLDRSGSPMVPSYETSVSPQANRTYVRTETTEDERKILLDSVQLKDLWKKICHHSSGMEFQDHRYWLRTHPNCIVGKELVNWLIRNGHIATRAQAIAIGQAMVDGRWLDCVSHHDQLFRDEYALYRPLQSTEFSETPSPDSDSVNSVEGHSEPSWFKDIKFDDSDTEQIAEEGDDNLANSASPSKRTSVSSFQSTVDSDSAASISLNVELDNVNFHIKKPSKYPHVPPHPADQKGRR

SEQ ID NO: 17875 - protein, 462 aa, Homo sapiens
MATDDKTSPTLDSANDLPRSPTSPSHLTHFKPLTPDQDEPPFKSAYSSFVNLFRFNKERAEGGQGEQQPLSGSWTSPQLPSRTQSVRSPTPYKKQLNEELQRRSSALDNSLQHPQENTGDLRACTYCRKIALSYAHSTDSNSIGEDLNALSDSACSVSVLDPSEPRTPVGSRKASRNIFLEDDLAWQSLIHPDSSNTPLSTRLVSVQEDAGKSPARNRSASITNLSLDRSGSPMVPSYETSVSPQANRTYVRTETTEDERKILLDSVQLKDLWKKICHHSSGMEFQDHRYWLRTHPNCIVGKELVNWLIRNGHIATRAQAIAIGQAMVDGRWLDCVSHHDQLFRDEYALYRPLQSTEFSETPSPDSDSVNSVEGHSEPSWFKDIKFDDSDTEQIAEEGDDNLANSASPSKRTSVSSFQSTVDSDSAASISLNVELDNVNFHIKKPSKYPHVPPHPADQKGRR

SEQ ID NO: 17876 - protein, 548 aa, Homo sapiens
MATDDKTSPTLDSANDLPRSPTSPSHLTHFKPLTPDQDEPPFKSAYSSFVNLFRFNKERAEGGQGEQQPLSGSWTSPQLPSRTQSVRSPTPYKKQLNEELQRRSSALDTRRKAEPTFGGHDPRTAVQLRSLSTVLKRLKEIMEGKSQDSDLKQYWMPDSQCKECYDCSEKFTTFRRRHHCRLCGQIFCSRCCNQEIPGKFMGYTGDLRACTYCRKIALSYAHSTDSNSIGEDLNALSDSACSVSVLDPSEPRTPVGSRKASRNIFLEDDLAWQSLIHPDSSNTPLSTRLVSVQEDAGKSPARNRSASITNLSLDRSGSPMVPSYETSVSPQANRTYVRTETTEDERKILLDSVQLKDLWKKICHHSSGMEFQDHRYWLRTHPNCIVGKELVNWLIRNGHIATRAQAIAIGQAMVDGRWLDCVSHHDQLFRDEYALYRPLQSTEFSETPSPDSDSVNSVEGHSEPSWFKDIKFDDSDTEQIAEEGDDNLANSASPSKRTSVSSFQSTVDSDSAASISLNVELDNVNFHIKKPSKYPHVPPHPADQKGRR

SEQ ID NO: 17877 - protein, 1909 aa, Homo sapiens
MIEDKGPRVTDYFVVAGLTDTSTLLDQEINRLDTKSTGPKAPITDIAIIIKSAGETVPEGYTCVEATPSALQANLNYGSLKSPELFLCYKRGRDKPPLTDIGVLYEGKERLIPGCEVILATPYGRCANVNNSSTTSQRIFITYRRAPPVRPQNSLAVTDICVIVTSKGETPPHTFCKVDKNLNCGMWGSSVFLCYKKSVPASNAIAYKAGLIFRYPEEDYESFPLSESDVPLFCLPMGATIECWDPETKYPLPVFSTFVLTGSSAKKVYGAAIQFYEPYSRELLSEKQLMHLGLLTPVERKMVSKSINTNKCICLLSHWPFFEAFRKFLMFIYKLSVSGPHPLPIEKHISHFMQNIPFPSPQRPRILVQLSVHDALILSQPVSTPLPLSGANFSTLLMNLGPENCATLLLFVLLESKILLHSLRPAVLTGVAEAVVAMIFPFQWQCPYIPLCPLSLAAVLSAPLPFIVGVDSRYFDLHDPPQDVVCIDLDTNMLYVSDEKKNMNWKQLPKKPCKNLLSTLKKLYPQLSSVHQKTQEGSAIDMTPIEADFSWQKKMTQLEMEIQEAFLRFMASILKGYRTYLRPITEAPSNKATAADSLFDRQGFLKSRDRAYAKFYTLLSKTQIFIRFIEECSFVSDKDTGLAFFDDCIEKLFPDKGTEKTDKVDFDSAEDTRLIELDDSQKSEHTVFIMPPEPPPDDGKDLSPKYSYKYFPRLDLKLFDRPQELKLCFSRHPTGNSITKSPPLMAKRTKQEIKTAHKLAKRCYTNPPQWAKCLFSHCYSLWFICLPAYVRVSHPKVRALQQAYDVLIKMRKTDVDPLDEVCYRVVMQLCGLWGHPVLAVRVLFEMKTARIKPNAITYGYYNKVVLESPWPSSTRSGIFLWTKVRNVVRGLAQFRQPLKKTVQRSQVSSISGGQSDQGYGSKDELIKDDAEIHVPEEQAARELITKTKMQTEEVCDASAIVAKHSQPSPEPHSPTEPPAWGSSIVKVPSGIFDVNSRKSSTGSISNVLFSTQDPVEDAVFGEATNLKKNGDRGEKRQKHFPERSCSFSSESRAGMLLKKSSLDSNSSEMAIMMGADAKILTAALTCPKTSLLHIARTHSFENVSCHLPDSRTCMSESTWNPEHRSSPVPEMLEESQELLEPVVDDVPKTTATVDTYESLLSDSNSNQSRDLKTVSKDLRNKRSSLYGIAKVVQREDVETGLDPLSLLATECTGGKTPDSEDKLFSPVIARNLADEIESYMNLKSPLGSKSSSMELHREENRESGMTTAFIHALERRSSLPLDHGSPAQENPESEKSSPAVSRSKTFTGRFKQQTPSRTHKERSTSLSALVRSSPHGSLGSVVNSLSGLKLDNILSGPKIDVLKSGMKQAATVASKMWVAVASAYSYSDDEEETNRDYSFPAGLEDHILGENISPNTSISGLVPSELTQSNTSLGSSSSSGDVGKLHYPTGEVPFPRGMKGQDFEKSDHGSSQNTSMSSIYQNCAMEVLMSSCSQCRACGALVYDEEIMAGWTADDSNLNTACPFCKSNFLPLLNIEFKDLRGSASFFLKPSTSGDSLQSGSIPLANESLEHKPVSSLAEPDLINFMDFPKHNQIITEETGSAVEPSDEIKRASGDVQTMKISSVPNSLSKRNVSLTRSHSVGGPLQNIDFTQRPFHGISTVSLPNSLQEVVDPLGKRPNPPPVSVPYLSPLVLRKELESLLENEGDQVIHTSSFINQHPIIFWNLVWYFRRLDLPSNLPGLILTSEHCNEGVQLPLSSLSQDSKLVYIQLLWDNINLHQEPREPLYVSWRNFNSEKKSSLLSEEQQETSTLVETIRQSIQHNNVLKPINLLSQQMKPGMKRQRSLYREILFLSLVSLGRENIDIEAFDNEYGIAYNSLSSEILERLQKIDAPPSASVEWCRKCFGAPLI

SEQ ID NO: 17878 - protein, 1845 aa, Homo sapiens
MIEDKGPRVTDYFVVAGLTDTSTLLDQEINRLDTKSTGPKAPITDIAIIIKSAGETVPEGYTCVEATPSALQANLNYGSLKSPELFLCYKRGRDKPPLTDIGVLYEGKERLIPGCEVILATPYGRCANVNNSSTTSQRIFITYRRAPPVRPQNSLAVTDICVIVTSKGETPPHTFCKVDKNLNCGMWGSSVFLCYKKSVPASNAIAYKAGLIFRYPEEDYESFPLSESDVPLFCLPMGATIECWDPETKYPLPVFSTFVLTGSSAKKVYGAAIQFYEPYSRELLSEKQLMHLGLLTPVERKMVSKSINTNKCICLLSHWPFFEAFRKFLMFIYKLSVSGPHPLPIEKHISHFMQNIPFPSPQRPRILVQLSVHDALILSQPVSTPLPLSGANFSTLLMNLGPENCATLLLFVLLESKILLHSLRPAVLTGVAEAVVAMIFPFQWQCPYIPLCPLSLAAVLSAPLPFIVGVDSRYFDLHDPPQDVVCIDLDTNMLYVSDEKKNMNWKQLPKKPCKNLLSTLKKLYPQLSSVHQKTQEGSAIDMTPIEADFSWQKKMTQLEMEIQEAFLRFMASILKGYRTYLRPITEAPSNKATAADSLFDRQGFLKSRDRAYAKFYTLLSKTQIFIRFIEECSFVSDKDTGLAFFDDCIEKLFPDKGTEKTDKVDFDSAEDTRLIELDDSQKSEHTVFIMPPEPPPDDGKDLSPKYSYKYFPRLDLKLFDRPQELKLCFSRHPTGNSITKSPPLMAKRTKQEIKTAHKLAKRCYTNPPQWAKCLFSHCYSLWFICLPAYVRVSHPKVRALQQAYDVLIKMRKTDVDPLDEVCYRVVMQLCGLWGHPVLAVRVLFEMKTARIKPNAITYGYYNKVVLESPWPSSTRSGIFLWTKVRNVVRGLAQFRQPLKKTVQRSQVSSISGGQSDQGYGSKDELIKDDAEIHVPEEQAARELITKTKMQTEEVCDASAIVAKHSQPSPEPHSPTEPPAWGSSIVKVPSGIFDVNSRKSSTGSISNVLFSTQDPVEDAVFGEATNLKKNGDRGEKRQKHFPERSCSFSSESRAGMLLKKSSLDSNSSEMAIMMGADAKILTAALTCPKTSLLHIARTHSFENVSCHLPDSRTCMSESTWNPEHRSSPVPEMLEESQELLEPVVDDVPKTTATVDTYESLLSDSNSNQSRDLKTVSKDLRNKRSSLYGIAKVVQREDVETGLDPLSLLATECTGGKTPDSEDKLFSPVIARNLADEIESYMNLKSPLGSKSSSMELHREENRESGMTTAFIHALERRSSLPLDHGSPAQENPESEKSSPAVSRSKTFTGRFKQQTPSRTHKERSTSLSALVRSSPHGSLGSVVNSLSGLKLDNILSGPKIDVLKSGMKQAATVASKMWVAVASAYSYSDDEEETNRDYSFPAGLEDHILGENISPNTSISGLVPSELTQSNTSLGSSSSSGDVGKLHYPTGEVPFPRGMKGQDFEKSDHGSSQNTSMSSIYQNCAMEVLMSSCSQCRACGALVYDEEIMAGWTADDSNLNTACPFCKSNFLPLLNIEFKDLRGSASFFLKPSTSGDSLQSGSIPLANESLEHKPVSSLAEPDLINFMDFPKHNQIITEETGSAVEPSDEIKRASGDVQTMKISSVPNSLSKRNVSLTRSHSVGGPLQNIDFTQRPFHGISTVSLPNSLQEVVDPLGKRPNPPPVSVPYLSPLVLRKELESLLENEGDQVIHTSSFINQHPIIFWNLVWYFRRLDLPSNLPGLILTSEHCNEGVQLPLSSLSQDSKLVYIQLLWDNINLHQEPREPLYVSWRNFNSEKKSSLLSEEQQETSTLVETIRQSIQHNNVLKPINLLSQQMKPGMKRQRGI

SEQ ID NO: 17879 - protein, 1623 aa, Homo sapiens
MIEDKGPRVTDYFVVAGLTDTSTLLDQEINRLDTKSTGPKAPITDIAIIIKSAGETVPEGYTCVEATPSALQANLNYGSLKSPELFLCYKRGRDKPPLTDIGVLYEGKERLIPGCEVILATPYGRCANVNNSSTTSQRIFITYRRAPPVRPQNSLAVTDICVIVTSKGETPPHTFCKVDKNLNCGMWGSSVFLCYKKSVPASNAIAYKAGLIFRYPEEDYESFPLSESDVPLFCLPMGATIECWDPETKYPLPVFSTFVLTGSSAKKVYGAAIQFYEPYSRELLSEKQLMHLGLLTPVERKMVSKSINTNKCICLLSHWPFFEAFRKFLMFIYKLSVSGPHPLPIEKHISHFMQNIPFPSPQRPRILVQLSVHDALILSQPVSTPLPLSGANFSTLLMNLGPENCATLLLFVLLESKILLHSLRPAVLTGVAEAVVAMIFPFQWQCPYIPLCPLSLAAVLSAPLPFIVGVDSRYFDLHDPPQDVVCIDLDTNMLYVSDEKKNMNWKQLPKKPCKNLLSTLKKLYPQLSSVHQKTQEGSAIDMTPIEADFSWQKKMTQLEMEIQEAFLRFMASILKGYRTYLRPITEAPSNKATAADSLFDRQGFLKSRDRAYAKFYTLLSKTQIFIRFIEECSFVSDKDTGLAFFDDCIEKLFPDKGTEKTDKVDFDSAEDTRLIELDDSQKSEHTVFIMPPEPPPDDGKDLSPKYSYKYFPRLDLKLFDRPQELKLCFSRHPTGNSITKSPPLMAKRTKQEIKTAHKLAKRCYTNPPQWAKCLFSHCYSLWFICLPAYVRVSHPKVRALQQAYDVLIKMRKTDVDPLDEVCYRVVMQLCGLWGHPVLAVRVLFEMKTARIKPNAITYGYYNKVVLESPWPSSTRSGIFLWTKVRNVVRGLAQFRQPLKKTVQRSQVSSISGGQSDQGYGSKDELIKDDAEIHVPEEQAARELITKTKMQTEEVCDASAIVAKHSQPSPEPHSPTEPPAWGSSIVKVPSGIFDVNSRKSSTGSISNVLFSTQDPVEDAVFGEATNLKKNGDRGEKRQKHFPERSCSFSSESRAGMLLKKSSLDSNSSEMAIMMGADAKILTAALTCPKTSLLHIARTHSFENVSCHLPDSRTCMSESTWNPEHRSSPVPEMLEESQELLEPVVDDVPKTTATVDTYESLLSDSNSNQSRDLKTVSKDLRNKRSSLYGIAKVVQREDVETGLDPLSLLATECTGGKTPDSEDKLFSPVIARNLADEIESYMNLKSPLGSKSSSMELHREENRESGMTTAFIHALERRSSLPLDHGSPAQENPESEKSSPAVSRSKTFTGRFKQQTPSRTHKERSTSLSALVRSSPHGSLGSVVNSLSGLKLDNILSGPKIDVLKSGMKQAATVASKMWVAVASAYSYSDDEEETNRDYSFPAGLEDHILGENISPNTSISGLVPSELTQSNTSLGSSSSSGDVGKLHYPTGEVPFPRGMKGQDFEKSDHGSSQNTSMSSIYQNCAMEVLMSSCSQCRACGALVYDEEIMAGWTADDSNLNTACPFCKSNFLPLLNIEFKDLRGSASFFLKPSTSGDSLQSGSIPLANESLEHKPVSSLAEPDLINFMDFPKHNQIITEETGSAVEPRYQRVQRPLYVVINGVPL

SEQ ID NO: 17880 - protein, 1958 aa, Homo sapiens
MIEDKGPRVTDYFVVAGLTDTSTLLDQEINRLDTKSTGPKAPITDIAIIIKSAGETVPEGYTCVEATPSALQANLNYGSLKSPELFLCYKRGRDKPPLTDIGVLYEGKERLIPGCEVILATPYGRCANVNNSSTTSQRIFITYRRAPPVRPQNSLAVTDICVIVTSKGETPPHTFCKVDKNLNCGMWGSSVFLCYKKSVPASNAIAYKAGLIFRYPEEDYESFPLSESDVPLFCLPMGATIECWDPETKYPLPVFSTFVLTGSSAKKVYGAAIQFYEPYSRELLSEKQLMHLGLLTPVERKMVSKSINTNKCICLLSHWPFFEAFRKFLMFIYKLSVSGPHPLPIEKHISHFMQNIPFPSPQRPRILVQLSVHDALILSQPVSTPLPLSGANFSTLLMNLGPENCATLLLFVLLESKILLHSLRPAVLTGVAEAVVAMIFPFQWQCPYIPLCPLSLAAVLSAPLPFIVGVDSRYFDLHDPPQDVVCIDLDTNMLYVSDEKKNMNWKQLPKKPCKNLLSTLKKLYPQLSSVHQKTQEGSAIDMTPIEADFSWQKKMTQLEMEIQEAFLRFMASILKGYRTYLRPITEAPSNKATAADSLFDRQGFLKSRDRAYAKFYTLLSKTQIFIRFIEECSFVSDKDTGLAFFDDCIEKLFPDKGTEKTDKVDFDSAEDTRLIELDDSQKSEHTVFIMPPEPPPDDGKDLSPKYSYKYFPRLDLKLFDRPQELKLCFSRHPTGNSITKSPPLMAKRTKQEIKTAHKLAKRCYTNPPQWAKCLFSHCYSLWFICLPAYVRVSHPKVRALQQAYDVLIKMRKTDVDPLDEVCYRVVMQLCGLWGHPVLAVRVLFEMKTARIKPNAITYGYYNKVVLESPWPSSTRSGIFLWTKVRNVVRGLAQFRQPLKKTVQRSQVSSISALQNVTGGSDGDTVSHGSVDSSNDANNGEHTVFVRDLIRLESIDNHSSTGGQSDQGYGSKDELIKDDAEIHVPEEQAARELITKTKMQTEEVCDASAIVAKHSQPSPEPHSPTEPPAWGSSIVKVPSGIFDVNSRKSSTGSISNVLFSTQDPVEDAVFGEATNLKKNGDRGEKRQKHFPERSCSFSSESRAGMLLKKSSLDSNSSEMAIMMGADAKILTAALTCPKTSLLHIARTHSFENVSCHLPDSRTCMSESTWNPEHRSSPVPEMLEESQELLEPVVDDVPKTTATVDTYESLLSDSNSNQSRDLKTVSKDLRNKRSSLYGIAKVVQREDVETGLDPLSLLATECTGGKTPDSEDKLFSPVIARNLADEIESYMNLKSPLGSKSSSMELHREENRESGMTTAFIHALERRSSLPLDHGSPAQENPESEKSSPAVSRSKTFTGRFKQQTPSRTHKERSTSLSALVRSSPHGSLGSVVNSLSGLKLDNILSGPKIDVLKSGMKQAATVASKMWVAVASAYSYSDDEEETNRDYSFPAGLEDHILGENISPNTSISGLVPSELTQSNTSLGSSSSSGDVGKLHYPTGEVPFPRGMKGQDFEKSDHGSSQNTSMSSIYQNCAMEVLMSSCSQCRACGALVYDEEIMAGWTADDSNLNTACPFCKSNFLPLLNIEFKDLRGSASFFLKPSTSGDSLQSGSIPLANESLEHKPVSSLAEPDLINFMDFPKHNQIITEETGSAVEPSDEIKRASGDVQTMKISSVPNSLSKRNVSLTRSHSVGGPLQNIDFTQRPFHGISTVSLPNSLQEVVDPLGKRPNPPPVSVPYLSPLVLRKELESLLENEGDQVIHTSSFINQHPIIFWNLVWYFRRLDLPSNLPGLILTSEHCNEGVQLPLSSLSQDSKLVYIQLLWDNINLHQEPREPLYVSWRNFNSEKKSSLLSEEQQETSTLVETIRQSIQHNNVLKPINLLSQQMKPGMKRQRSLYREILFLSLVSLGRENIDIEAFDNEYGIAYNSLSSEILERLQKIDAPPSASVEWCRKCFGAPLI

SEQ ID NO: 17881 - protein, 1054 aa, Homo sapiens
MGTAQVLPGILQKHCCILPDRNTESQCTLCGEPEEEEAGDLVQPGISFPGPAEEDLDPQYSWSPTQHFNEERYSPAPRSMKGLSGSRTQPPLCSGHTCGLAPPEDCEHLHHGPDARPPYLLSPADSCPGGRHRCSPRSSVHSECVMMPVVLGDHVSSSTFPRMHYSSHYDTRDDCAVAHAGAKINRIPANLLDQFEKQLPLHRDGFHTLQYQRTSAAAEQRSESPGRIRHLVHSVQKLFTKSHSLEGSSKSNANGTKADGRADDHHHAHHAKHSKRSKSKERKPEGKPRPGMSSWWSSDDNLDSDSTYRTPSVLNRHHLGPVAHCYPDALQSPFGDLSLKTSKSNNDVKCSACEGLALTPDAKYLKRSSWSTLTVSQAKEAYRKSSLNLDKPLLHQDAKPALRPCHYLQVPQDEWGGYPTGGKDEEIPCRRMRSGSYIKAMGDEESGESDSSPKTSPKSAILPEPLLKSIGQRPLGEHQTQTYLQAASDVPVGHSLDPAANYNSPKFRSRNQSYMRAVSTLSQASCVSQVSEAEINGQFESVCESVFSEVESQAMDALDLPGCFRTRSHSYLRAIQAGYSQDDECIPMMTPSDITSTIRSTAAVSYTNYKKTPPPVPPRTTSKPLISVTAQSSTESTQDAYQDSRAQRMSPWPQDSRGLYNSTDSLDSNKAMNLALETAAAQRHLPESQSSSVRTSDKAILVSKAEELLKSRCSSIGIQDSEFPEHQPYPRSDVETATDSDTESRGLREYHSVGVQVEDEKRHGRFKRSNSVTAAVQADLELEGFPGHITTEDKGLQFGSSFQRHSEPSTPTQYSAVRTVRTQGLFSYREDYRTQVDTSTLPPPDPWLEPAIDTVETGRMSPCRRDGSWFLKLLHAETKRMEGWCKEMEREAEENDLSEEILGKIRSAVGSAQLLMSQKFQQFYWLCQQNMDPSAMPRPTSQDLAGYWDMLQLSIEDVSMKFDELQRLRLNDWKMMESPERKEERKVPPPIPKKPPKGKFPITREKSLDLPDRQRQEARRRLMAAKRAASFRQNSASERADSIEIYIPEAQTRL

SEQ ID NO: 17882 - protein, 1040 aa, Homo sapiens
MGTAQVLPGILQKHCCILPDRNTESQCTLCGEPEEEEAGDLVQPGISFPGPAEEDLDPQYSWSPTQHFNEERYSPAPRSMKGLSGSRTQPPLCSGHTCGLAPPEDCEHLHHGPDARPPYLLSPADSCPGGRHRCSPRSSVHSECVMMPVVLGDHVSSSTFPRMHYSSHYDTRDDCAVAHAGAKINRIPANLLDQFEKQLPLHRDGFHTLQYQRTSAAAEQRSESPGRIRHLVHSVQKLFTKSHSLEGSSKSNANGTKADGRADDHHHAHHAKHSKRSKSKERKPEGKPRPGMSSWWSSDDNLDSDSTYRTPSVLNRHHLGPVAHCYPDALQSPFGDLSLKTSKSNNDVKCSACEGLALTPDAKYLKRSSWSTLTVSQAKEAYRKSSLNLDKPLLHQDAKPALRPCHYLQVPQDEWGGYPTGGKDEEIPCRRMRSGSYIKAMGDEESGESDSSPKTSPKSAILPEPLLKSIGQRPLGEHQTQTYLQAASDVPVGHSLDPAANYNSPKFRSRNQSYMRAVSTLSQASCVSQVSEAEINGQFESVCESVFSEVESQAMDALDLPGCFRTRSHSYLRAIQAGYSQDDECIPMMTPSDITSTIRSTAAVSYTNYKKTPPPVPPRTTSKPLISVTAQSSTESTQDAYQDSRAQRMSPWPQDSRGLYNSTDSLDSNKAMNLALETAAAQRHLPESQSSSVRTSDKAILVSKAEELLKSRCSSIGIQVETATDSDTESRGLREYHSVGVQVEDEKRHGRFKRSNSVTAAVQADLELEGFPGHITTEDKGLQFGSSFQRHSEPSTPTQYSAVRTVRTQGLFSYREDYRTQVDTSTLPPPDPWLEPAIDTVETGRMSPCRRDGSWFLKLLHAETKRMEGWCKEMEREAEENDLSEEILGKIRSAVGSAQLLMSQKFQQFYWLCQQNMDPSAMPRPTSQDLAGYWDMLQLSIEDVSMKFDELQRLRLNDWKMMESPERKEERKVPPPIPKKPPKGKFPITREKSLDLPDRQRQEARRRLMAAKRAASFRQNSASERADSIEIYIPEAQTRL

SEQ ID NO: 17883 - protein, 975 aa, Homo sapiens
MKGLSGSRTQPPLCSGHTCGLAPPEDCEHLHHGPDARPPYLLSPADSCPGGRHRCSPRSSVHSECVMMPVVLGDHVSSSTFPRMHYSSHYDTRDDCAVAHAGAKINRIPANLLDQFEKQLPLHRDGFHTLQYQRTSAAAEQRSESPGRIRHLVHSVQKLFTKSHSLEGSSKSNANGTKADGRADDHHHAHHAKHSKRSKSKERKPEGKPRPGMSSWWSSDDNLDSDSTYRTPSVLNRHHLGPVAHCYPDALQSPFGDLSLKTSKSNNDVKCSACEGLALTPDAKYLKRSSWSTLTVSQAKEAYRKSSLNLDKPLLHQDAKPALRPCHYLQVPQDEWGGYPTGGKDEEIPCRRMRSGSYIKAMGDEESGESDSSPKTSPKSAILPEPLLKSIGQRPLGEHQTQTYLQAASDVPVGHSLDPAANYNSPKFRSRNQSYMRAVSTLSQASCVSQVSEAEINGQFESVCESVFSEVESQAMDALDLPGCFRTRSHSYLRAIQAGYSQDDECIPMMTPSDITSTIRSTAAVSYTNYKKTPPPVPPRTTSKPLISVTAQSSTESTQDAYQDSRAQRMSPWPQDSRGLYNSTDSLDSNKAMNLALETAAAQRHLPESQSSSVRTSDKAILVSKAEELLKSRCSSIGIQDSEFPEHQPYPRSDVETATDSDTESRGLREYHSVGVQVEDEKRHGRFKRSNSVTAAVQADLELEGFPGHITTEDKGLQFGSSFQRHSEPSTPTQYSAVRTVRTQGLFSYREDYRTQVDTSTLPPPDPWLEPAIDTVETGRMSPCRRDGSWFLKLLHAETKRMEGWCKEMEREAEENDLSEEILGKIRSAVGSAQLLMSQKFQQFYWLCQQNMDPSAMPRPTSQDLAGYWDMLQLSIEDVSMKFDELQRLRLNDWKMMESPERKEERKVPPPIPKKPPKGKFPITREKSLDLPDRQRQEARRRLMAAKRAASFRQNSASERADSIEIYIPEAQTRL

SEQ ID NO: 17884 - protein, 1220 aa, Homo sapiens
MAGAGGQHHPPGAAGGAAAGAGAAVTSAAASAGPGEDSSDSEAEQEGPQKLIRKVSTSGQIRTKTSIKEGQLLKQTSSFQRWKKRYFKLRGRTLYYAKDSKSLIFDEVDLSDASVAEASTKNANNSFTIITPFRRLMLCAENRKEMEDWISSLKSVQTREPYEVAQFNVEHFSGMHNWYACSHARPTFCNVCRESLSGVTSHGLSCEVCKFKAHKRCAVRATNNCKWTTLASIGKDIIEDEDGVAMPHQWLEGNLPVSAKCAVCDKTCGSVLRLQDWKCLWCKTMVHTACKDLYHPICPLGQCKVSIIPPIALNSTDSDGFCRATFSFCVSPLLVFVNSKSGDNQGVKFLRRFKQLLNPAQVFDLMNGGPHLGLRLFQKFDNFRILVCGGDGSVGWVLSEIDKLNLNKQCQLGVLPLGTGNDLARVLGWGGSYDDDTQLPQILEKLERASTKMLDRWSIMTYELKLPPKASLLPGPPEASEEFYMTIYEDSVATHLTKILNSDEHAVVISSAKTLCETVKDFVAKVEKTYDKTLENAVVADAVASKCSVLNEKLEQLLQALHTDSQAAPVLPGLSPLIVEEDAVESSSEESLGESKEQLGDDVTKPSSQKAVKPREIMLRANSLKKAVRQVIEEAGKVMDDPTVHPCEPANQSSDYDSTETDESKEEAKDDGAKESITVKTAPRSPDARASYGHSQTDSVPGPAVAASKENLPVLNTRIICPGLRAGLAASIAGSSIINKMLLANIDPFGATPFIDPDLDSVDGYSEKCVMNNYFGIGLDAKISLEFNNKREEHPEKCRSRTKNLMWYGVLGTRELLQRSYKNLEQRVQLECDGQYIPLPSLQGIAVLNIPSYAGGTNFWGGTKEDDIFAAPSFDDKILEVVAIFDSMQMAVSRVIKLQHHRIAQCRTVKITIFGDEGVPVQVDGEAWVQPPGIIKIVHKNRAQMLTRDRAFESTLKSWEDKQKCDSGKPVLRTHLYIHHAIDLATEEVSQMQLCSQAAEELITRICDAATIHCLLEQELAHAVNACSHALNKANPRCPESLTRDTATEIAINVKALYNETESLLVGRVPLQLESPHEERVSNALHSVEVELQKLTEIPWLYYILHPNEDEEPPMDCTKRNNRSTVFRIVPKFKKEKVQKQKTSSQPVQKWGTEEVAAWLDLLNLGEYKDIFIRHDIRGAELLHLERRDLKDLGIPKVGHVKRILQGIKELGRSTPQSEV

SEQ ID NO: 17885 - protein, 1164 aa, Homo sapiens
MAGAGGQHHPPGAAGGAAAGAGAAVTSAAASAGPGEDSSDSEAEQEGPQKLIRKVSTSGQIRTKTSIKEGQLLKQTSSFQRWKKRYFKLRGRTLYYAKDSKSLIFDEVDLSDASVAEASTKNANNSFTIITPFRRLMLCAENRKEMEDWISSLKSVQTREPYEVAQFNVEHFSGMHNWYACSHARPTFCNVCRESLSGVTSHGLSCEVCKFKAHKRCAVRATNNCKWTTLASIGKDIIEDEDGVAMPHQWLEGNLPVSAKCAVCDKTCGSVLRLQDWKCLWCKTMVHTACKDLYHPICPLGQCKVSIIPPIALNSTDSDGFCRATFSFCVSPLLVFVNSKSGDNQGVKFLRRFKQLLNPAQVFDLMNGGPHLGLRLFQKFDNFRILVCGGDGSVGWVLSEIDKLNLNKQCQLGVLPLGTGNDLARVLGWGGSYDDDTQLPQILEKLERASTKMLDRWSIMTYELKLPPKASLLPGPPEASEEFYMTIYEDSVATHLTKILNSDEHAVVISSAKTLCETVKDFVAKVEKTYDKTLENAVVADAVASKCSVLNEKLEQLLQALHTDSQAAPVLPGLSPLIVEEDAVESSSEESLGESKEQLGDDVTKPSSQKAVKPREIMLRANSLKKAVRQVIEEAGKVMDDPTVHPCEPANQSSDYDSTETDESKEEAKDDGAKESITVKTAPRSPDARASYGHSQTDSVPGPAVAASKENLPVLNTRIICPGLRAGLAASIAGSSIINKMLLANIDPFGATPFIDPDLDSVDGYSEKCVMNNYFGIGLDAKISLEFNNKREEHPEKCRSRTKNLMWYGVLGTRELLQRSYKNLEQRVQLECDGQYIPLPSLQGIAVLNIPSYAGGTNFWGGTKEDDIFAAPSFDDKILEVVAIFDSMQMAVSRVIKLQHHRIAQCRTVKITIFGDEGVPVQVDGEAWVQPPGIIKIVHKNRAQMLTRDRAFESTLKSWEDKQKCDSGKPVLRTHLYIHHAIDLATEEVSQMQLCSQAAEELITRICDAATIHCLLEQELAHAVNACSHALNKANPRCPESLTRDTATEIAINVKALYNETESLLVGRVPLQLESPHEERVSNALHSVEVELQKLTEIPWLYYILHPNEDEEPPMDCTKRNNRSTVFRIVPKFKKEKVQKQKTSSQPGSGDTESGSCEANSPGN

SEQ ID NO: 17886 - protein, 1100 aa, Homo sapiens
MLCAENRKEMEDWISSLKSVQTREPYEVAQFNVEHFSGMHNWYACSHARPTFCNVCRESLSGVTSHGLSCEVCKFKAHKRCAVRATNNCKWTTLASIGKDIIEDEDGVAMPHQWLEGNLPVSAKCAVCDKTCGSVLRLQDWKCLWCKTMVHTACKDLYHPICPLGQCKVSIIPPIALNSTDSDGFCRATFSFCVSPLLVFVNSKSGDNQGVKFLRRFKQLLNPAQVFDLMNGGPHLGLRLFQKFDNFRILVCGGDGSVGWVLSEIDKLNLNKQCQLGVLPLGTGNDLARVLGWGGSYDDDTQLPQILEKLERASTKMLDRWSIMTYELKLPPKASLLPGPPEASEEFYMTIYEDSVATHLTKILNSDEHAVVISSAKTLCETVKDFVAKVEKTYDKTLENAVVADAVASKCSVLNEKLEQLLQALHTDSQAAPVLPGLSPLIVEEDAVESSSEESLGESKEQLGDDVTKPSSQKAVKPREIMLRANSLKKAVRQVIEEAGKVMDDPTVHPCEPANQSSDYDSTETDESKEEAKDDGAKESITVKTAPRSPDARASYGHSQTDSVPGPAVAASKENLPVLNTRIICPGLRAGLAASIAGSSIINKMLLANIDPFGATPFIDPDLDSVDGYSEKCVMNNYFGIGLDAKISLEFNNKREEHPEKCRSRTKNLMWYGVLGTRELLQRSYKNLEQRVQLECDGQYIPLPSLQGIAVLNIPSYAGGTNFWGGTKEDDIFAAPSFDDKILEVVAIFDSMQMAVSRVIKLQHHRIAQCRTVKITIFGDEGVPVQVDGEAWVQPPGIIKIVHKNRAQMLTRDRAFESTLKSWEDKQKCDSGKPVLRTHLYIHHAIDLATEEVSQMQLCSQAAEELITRICDAATIHCLLEQELAHAVNACSHALNKANPRCPESLTRDTATEIAINVKALYNETESLLVGRVPLQLESPHEERVSNALHSVEVELQKLTEIPWLYYILHPNEDEEPPMDCTKRNNRSTVFRIVPKFKKEKVQKQKTSSQPVQKWGTEEVAAWLDLLNLGEYKDIFIRHDIRGAELLHLERRDLKNTVGEKRDTKENGKHMDLGIPKVGHVKRILQGIKELGRSTPQSEV

SEQ ID NO: 17887 - protein, 1084 aa, Homo sapiens
MLCAENRKEMEDWISSLKSVQTREPYEVAQFNVEHFSGMHNWYACSHARPTFCNVCRESLSGVTSHGLSCEVCKFKAHKRCAVRATNNCKWTTLASIGKDIIEDEDGVAMPHQWLEGNLPVSAKCAVCDKTCGSVLRLQDWKCLWCKTMVHTACKDLYHPICPLGQCKVSIIPPIALNSTDSDGFCRATFSFCVSPLLVFVNSKSGDNQGVKFLRRFKQLLNPAQVFDLMNGGPHLGLRLFQKFDNFRILVCGGDGSVGWVLSEIDKLNLNKQCQLGVLPLGTGNDLARVLGWGGSYDDDTQLPQILEKLERASTKMLDRWSIMTYELKLPPKASLLPGPPEASEEFYMTIYEDSVATHLTKILNSDEHAVVISSAKTLCETVKDFVAKVEKTYDKTLENAVVADAVASKCSVLNEKLEQLLQALHTDSQAAPVLPGLSPLIVEEDAVESSSEESLGESKEQLGDDVTKPSSQKAVKPREIMLRANSLKKAVRQVIEEAGKVMDDPTVHPCEPANQSSDYDSTETDESKEEAKDDGAKESITVKTAPRSPDARASYGHSQTDSVPGPAVAASKENLPVLNTRIICPGLRAGLAASIAGSSIINKMLLANIDPFGATPFIDPDLDSVDGYSEKCVMNNYFGIGLDAKISLEFNNKREEHPEKCRSRTKNLMWYGVLGTRELLQRSYKNLEQRVQLECDGQYIPLPSLQGIAVLNIPSYAGGTNFWGGTKEDDIFAAPSFDDKILEVVAIFDSMQMAVSRVIKLQHHRIAQCRTVKITIFGDEGVPVQVDGEAWVQPPGIIKIVHKNRAQMLTRDRAFESTLKSWEDKQKCDSGKPVLRTHLYIHHAIDLATEEVSQMQLCSQAAEELITRICDAATIHCLLEQELAHAVNACSHALNKANPRCPESLTRDTATEIAINVKALYNETESLLVGRVPLQLESPHEERVSNALHSVEVELQKLTEIPWLYYILHPNEDEEPPMDCTKRNNRSTVFRIVPKFKKEKVQKQKTSSQPVQKWGTEEVAAWLDLLNLGEYKDIFIRHDIRGAELLHLERRDLKDLGIPKVGHVKRILQGIKELGRSTPQSEV

SEQ ID NO: 17888 - protein, 1274 aa, Homo sapiens
MSGSCAAPGPGSGSSPAACRFAHYFVLCGIDADSGLEPDELAGENFDQSPLRRTFKSKVLAHYPQNIEWNPFDQDAVNMLCMPKGLSFRTQTDNKDPQFHSFIITREDGSRTYGFVLTFYEEVTSKQICTAMQTLYQMHNAEHYSSVYASSSCSMDSLASSLDEGDTTSLLKLQRYNSYDISRDTLYVSKSICLITPLPFMQACKKFLIQLYKAVTSQQPPPLPLESYIHNILYEVPLPPPGRSLKFYGVYEPVICQRPGPSELPLSDYPLREAFELLGLENLVQVFTCVLLEMQILLYSQDYQRLMTVAEGITTLLFPFQWQHVYVPILPASLLHFLDAPVPYLMGLQSKEGTDRSKLELPQEANLCFVDIDNHFIELPEEFPQFPNKVDFIQELSEVLVQFGIPPEGSLHCSESTSKLKNMVLKDLVNDKKNGNVCTNNISMYELLKGNETIARLQALAKRTGVAVEKMDLSASLGEKDKDLKLHCEEAELRDYQLNVQLREVFANRFTQMFADYEAFVIQTAQDMESWLTNREQMQNFDKASFLSDQPEPYLPFLSRFIETQMFATFIDNKIMSQWEEKDPLLRVFDTRIDKIRLYNVRAPTLRTSIYQKCSTLKEAAQSIEQRLMKMDHTAIHPHLLDMKIGQGKYEQGFFPKLQSDVLATGPTSNNRWVSRSATAQRRKERLRQHSEHVGLDNDLREKYMQEARSLGKNLRQPKLSDLSPAVIAQTNCKFVEGLLKECRMKTKRMLVEKMGHEAVELGHGEANITGLEENTLIASLCDLLERIWSHGLQVKQGKSALWSHLIQFQDREEKQEHLAESPVALGPERRKSDSGVMLPTLRVSLIQDMRHIQNMSEIKTDVGRARAWIRLSLEKKLLSQHLKQLLSNQPLTKKLYKRYAFLRCEEEREQFLYHLLSLNAVDYFCFTSVFTTIMIPYRSVIIPIKKLSNAIITSNPWICVSGELGDTGVMQIPKNLLEMTFECQNLGKLTTVQIGHDNSGLLAKWLVDCVMVRNEITGHTYRFPCGRWLGKGIDDGSLERILIGELMTSASDEDLVKQCRTPPQQKSPTTARRLSITSLTGKNNKPNAGQIQEGIGEAVNNIVKHFHKPEKERGSLTVLLCGENGLVAALEQVFHHGFKSARIFHKNVFIWDFIEKVVAYFETTDQILDNEDDVLIQKSSCKTFCHYVNAINTAPRNIGKDGKFQILVCLGTRDRLLPQWIPLLAECPAITRMYEESALLRDRMTVNSLIRILQTIQDFTIVLEGSLIKGVDV

SEQ ID NO: 17889 - protein, 1309 aa, Homo sapiens
MGTHHHAQLIFVFLVEMRFHRVDQAGLELLTSGNSPASASRSAEITVVSQHAQPGFLYQWLEADRHGKSQGAANTTSGENFDQSPLRRTFKSKVLAHYPQNIEWNPFDQDAVNMLCMPKGLSFRTQTDNKDPQFHSFIITREDGSRTYGFVLTFYEEVTSKQICTAMQTLYQMHNAEHYSSVYASSSCSMDSLASSLDEGDTTSLLKLQRYNSYDISRDTLYVSKSICLITPLPFMQACKKFLIQLYKAVTSQQPPPLPLESYIHNILYEVPLPPPGRSLKFYGVYEPVICQRPGPSELPLSDYPLREAFELLGLENLVQVFTCVLLEMQILLYSQDYQRLMTVAEGITTLLFPFQWQHVYVPILPASLLHFLDAPVPYLMGLQSKEGTDRSKLELPQEANLCFVDIDNHFIELPEEFPQFPNKVDFIQELSEVLVQFGIPPEGSLHCSESTSKLKNMVLKDLVNDKKNGNVCTNNISMYELLKGNETIARLQALAKRTGVAVEKMDLSASLGEKDKDLKLHCEEAELRDYQLNVQLREVFANRFTQMFADYEAFVIQTAQDMESWLTNREQMQNFDKASFLSDQPEPYLPFLSRFIETQMFATFIDNKIMSQWEEKDPLLRVFDTRIDKIRLYNVRAPTLRTSIYQKCSTLKEAAQSIEQRLMKMDHTAIHPHLLDMKIGQGKYEQGFFPKLQSDVLATGPTSNNRWVSRSATAQRRKERLRQHSEHVGLDNDLREKYMQEARSLGKNLRQPKLSDLSPAVIAQTNCKFVEGLLKECRMKTKRMLVEKMGHEAVELGHGEANITGLEENTLIASLCDLLERIWSHGLQVKQGKSALWSHLIQFQDREEKQEHLAESPVALGPERRKSDSGVMLPTLRVSLIQDMRHIQNMSEIKTDVGRARAWIRLSLEKKLLSQHLKQLLSNQPLTKKLYKRYAFLRCEEEREQFLYHLLSLNAVDYFCFTSVFTTIMIPYRSVIIPIKKLSNAIITSNPWICVSGELGDTGVMQIPKNLLEMTFECQNLGKLTTVQIGHDNSGLLAKWLVDCVMVRNEITGHTYRFPCGRWLGKGIDDGSLERILIGELMTSASDEDLVKQCRTPPQQKSPTTARRLSITSLTGKNNKPNAGQIQEGIGEAVNNIVKHFHKPEKERGSLTVLLCGENGLVAALEQVFHHGFKSARIFHKNVFIWDFIEKVVAYFETTDQILDNEDDVLIQKSSCKTFCHYVNAINTAPRNIGKDGKFQILVCLGTRDRLLPQWIPLLAECPAITRMYEESALLRDRMTVNSLIRILQTIQDFTIVLEGSLIKGVDV

SEQ ID NO: 17890 - protein, 507 aa, Homo sapiens
MLCMPKGLSFRTQTDNKDPQFHSFIITREDGSRTYGFVLTFYEEVTSKQICTAMQTLYQMHNAEHYSSVYASSSCSMDSLASSLDEGDTTSLLKLQRYNSYDISRDTLYVSKSICLITPLPFMQACKKFLIQLYKAVTSQQPPPLPLESYIHNILYEVPLPPPGRSLKFYGVYEPVICQRPGPSELPLSDYPLREAFELLGLENLVQVFTCVLLEMQILLYSQDYQRLMTVAEGITTLLFPFQWQHVYVPILPASLLHFLDAPVPYLMGLQSKEGTDRSKLELPQEANLCFVDIDNHFIELPEEFPQFPNKVDFIQELSEVLVQFGIPPEGSLHCSESTSKLKNMVLKDLVNDKKNGNVCTNNISMYELLKGNETIARLQALAKRTGVAVEKMDLSASLGEKDKDLKLHCEEAELRDYQLNVQLREVFANRFTQMFADYEAFVIQTAQDMESWLTNREQMQNFDKVKRTIVFLLWLLVALLLILTFLNFLFFCAYAYPYIIDFVNLF

SEQ ID NO: 17891 - protein, 738 aa, Homo sapiens
MSGSCAAPGPGSGSSPAACRFAHYFVLCGIDADSGLEPDELAVLYQWLEADRHGKSQGAANTTSGENFDQSPLRRTFKSKVLAHYPQNIEWNPFDQDAVNMLCMPKGLSFRTQTDNKDPQFHSFIITREDGSRTYGFVLTFYEEVTSKQICTAMQTLYQMHNAEHYSSVYASSSCSMDSLASSLDEGDTTSLLKLQRYNSYDISRDTLYVSKSICLITPLPFMQACKKFLIQLYKAVTSQQPPPLPLESYIHNILYEVPLPPPGRSLKFYGVYEPVICQRPGPSELPLSDYPLREAFELLGLENLVQVFTCVLLEMQILLYSQDYQRLMTVAEGITTLLFPFQWQHVYVPILPASLLHFLDAPVPYLMGLQSKEGTDRSKLELPQEANLCFVDIDNHFIELPEEFPQFPNKVDFIQELSEVLVQFGIPPEGSLHCSESTSKLKNMVLKDLVNDKKNGNVCTNNISMYELLKGNETIARLQALAKRTGVAVEKMDLSASLGEKDKDLKLHCEEAELRDYQLNVQLREVFANRFTQMFADYEAFVIQTAQDMESWLTNREQMQNFDKASFLSDQPEPYLPFLSRFIETQMFATFIDNKIMSQWEEKDPLLRVFDTRIDKIRLYNVRAPTLRTSIYQKCSTLKEAAQSIEQRLMKMDHTAIHPHLLDMKIGQGKYEQGFFPKLQSDVLATGPTSNNRWVSRSATAQRRKERLRQHSEHVGLDNDLREVCGLPSWGASQQAP

SEQ ID NO: 17892 - protein, 330 aa, Homo sapiens
MSPLSAARAALRVYAVGAAVILAQLLRRCRGGFLEPVFPPRPDRVAIVTGGTDGIGYSTAKHLARLGMHVIIAGNNDSKAKQVVSKIKEETLNDKVEFLYCDLASMTSIRQFVQKFKMKKIPLHVLINNAGVMMVPQRKTRDGFEEHFGLNYLGHFLLTNLLLDTLKESGSPGHSARVVTVSSATHYVAELNMDDLQSSACYSPHAAYAQSKLALVLFTYHLQRLLAAEGSHVTANVVDPGVVNTDVYKHVFWATRLAKKLLGWLLFKTPDEGAWTSIYAAVTPELEGVGGHYLYNEKETKSLHVTYNQKLQQQLWSKSCEMTGVLDVTL

SEQ ID NO: 17893 - protein, 1198 aa, Homo sapiens
MRSLRKKREKPRPEQWKGLPGPPRAPEPEDVAVPGGVDLLTLPQLCFPGGVCVATEPKEDCVHFLVLTDVCGNRTYGVVAQYYRPLHDEYCFYNGKTHRECPGCFVPFAVCVVSRFPYYNSLKDCLSCLLALLKPCKDFEVDSHIKDFAAKLSLIPSPPPGPLHLVFNMKSLQIVLPARADPESPILDLDLHLPLLCFRPEKVLQILTCILTEQRIVFFSSDWALLTLVTECFMAYLYPLQWQHPFVPILSDQMLDFVMAPTSFLMGCHLDHFEEVSKEADGLVLINIDHGSITYSKSTDDNVDIPDVPLLAAQTFIQRVQSLQLHHELHAAHLLSSTDLKEGRAHRRSWQQKLNCQIQQTTLQLLVSIFRDVKNHLNYEHRVFNSEEFLKTRAPGDHQFYKQVLDTYMFHSFLKARLNRRMDAFAQMDLDTQSEEDRINGMLLSPRRPTVEKRASRKSSHLHVTHRRMVVSMPNLQDIAMPELAPRNSSLRLTDTAGCRGSSAVLNVTPKSPYTFKIPEIHFPLESKCVQAYHAHFVSMLSEAMCFLAPDNSLLLARYLYLRGLVYLMQGQLLNALLDFQNLYKTDIRIFPTDLVKRTVESMSAPEWEGAEQAPELMRLISEILDKPHEASKLDDHVKKFKLPKKHMQLGDFMKRVQESGIVKDASIIHRLFEALTVGQEKQIDPETFKDFYNCWKETEAEAQEVSLPWLVMEHLDKNECVCKLSSSVKTNLGVGKIAMTQKRLFLLTEGRPGYLEISTFRNIEEVRRTTTTFLLRRIPTLKIRVASKKEVFEANLKTECDLWHLMVKEMWAGKKLADDHKDPHYVQQALTNVLLMDAVVGTLQSPGAIYAASKLSYFDKMSNEMPMTLPETTLETLKHKINPSAGEAFPQAVDVLLYTPGHLDPAEKVEDAHPKLWCALSEGKVTVFNASSWTIHQHSFKVGTAKVNCMVMADQNQVWVGSEDSVIYIINVHSMSCNKQLTAHCSSVTDLIVQDGQEAPSNVYSCSMDGMVLVWNVSTLQVTSRFQLPRGGLTSIRLHGGRLWCCTGNSIMVMKMNGSLHQELKIEENFKDTSTSFLAFQLLPEEEQLWAACAGRSEVYIWSLKDLAQPPQRVPLEDCSEINCMIRVKKQVWVGSRGLGQGTPKGKIYVIDAERKTVEKELVAHMDTVRTLCSAEDRYVLSGSGREEGKVAIWKGE

SEQ ID NO: 17894 - protein, 1146 aa, Homo sapiens
MRSLRKKREKPRPEQWKGLPGPPRAPEPEDVAVPGGVDLLTLPQLCFPGGVCVATEPKEDCVHFLVLTDVCGNRTYGVVAQYYRPLHDEYCFYNGKTHRECPGCFVPFAVCVVSRFPYYNSLKDCLSCLLALLKPCKDFEVDSHIKDFAAKLSLIPSPPPGPLHLVFNMKSLQIVLPARADPESPILDLDLHLPLLCFRPEKVLQILTCILTEQRIVFFSSDWALLTLVTECFMAYLYPLQWQHPFVPILSDQMLDFVMAPTSFLMGCHLDHFEEVSKEADGLVLINIDHGSITYSKSTDDNVDIPDVPLLAAQTFIQRDVKNHLNYEHRVFNSEEFLKTRAPGDHQFYKQVLDTYMFHSFLKARLNRRMDAFAQMDLDTQSEEDRINGMLLSPRRPTVEKRASRKSSHLHVTHRRMVVSMPNLQDIAMPELAPRNSSLRLTDTAGCRGSSAVLNVTPKSPYTFKIPEIHFPLESKCVQAYHAHFVSMLSEAMCFLAPDNSLLLARYLYLRGLVYLMQGQLLNALLDFQNLYKTDIRIFPTDLVKRTVESMSAPEWEGAEQAPELMRLISEILDKPHEASKLDDHVKKFKLPKKHMQLGDFMKRVQESGIVKDASIIHRLFEALTVGQEKQIDPETFKDFYNCWKETEAEAQEVSLPWLVMEHLDKNECVCKLSSSVKTNLGVGKIAMTQKRLFLLTEGRPGYLEISTFRNIEEVRRTTTTFLLRRIPTLKIRVASKKEVFEANLKTECDLWHLMVKEMWAGKKLADDHKDPHYVQQALTNVLLMDAVVGTLQSPGAIYAASKLSYFDKMSNEMPMTLPETTLETLKHKINPSAGEAFPQAVDVLLYTPGHLDPAEKVEDAHPKLWCALSEGKVTVFNASSWTIHQHSFKVGTAKVNCMVMADQNQVWVGSEDSVIYIINVHSMSCNKQLTAHCSSVTDLIVQDGQEAPSNVYSCSMDGMVLVWNVSTLQVTSRFQLPRGGLTSIRLHGGRLWCCTGNSIMVMKMNGSLHQELKIEENFKDTSTSFLAFQLLPEEEQLWAACAGRSEVYIWSLKDLAQPPQRVPLEDCSEINCMIRVKKQVWVGSRGLGQGTPKGKIYVIDAERKTVEKELVAHMDTVRTLCSAEDRYVLSGSGREEGKVAIWKGE

SEQ ID NO: 17895 - protein, 266 aa, Homo sapiens
MVMADQNQVWVGSEDSVIYIINVHSMSCNKQLTAHCSSVTDLIVQDGQEAPSNVYSCSMDGMVLVWNVSTLQVTSRFQLPRGGLTSIRLHGGRLWCCTGNSIMVMKMNGSLHQELKIEENFKDTSTSFLAFQLLPEEEQLWAACAGRSEVYIWSLKDLAQPPQRVPLEDCSEINCMIRVKKQVGWRARHPQHPRQVSLALAASPCSREPAARPRALLPSPLRVPLLTGTCRVGANGPTGHHVLVSWCGPSTPQRIPPNWMASNDRT

SEQ ID NO: 17896 - protein, 128 aa, Homo sapiens
MRSLRKKREKPRPEQWKGLPGPPRAPEPEDVAVPGGVDLLTLPQLCFPGGVCVATEPKEDCVHFLVLTDVCGNRTYGVVAQYYRPLHDEYCFYNGKTHRECPGCFVPFAVCVVSRFPYYNSLKDCLSW

SEQ ID NO: 17897 - protein, 846 aa, Homo sapiens
MSSSHFASRHRKDISTEMIRTKIAHRKSLSQKENRHKEYERNRHFGLKDVNIPTLEGRILVELDETSQGLVPEKTNVKPRAMKTILGDQRKQMLQKYKEEKQLQKLKEQREKAKRGIFKVGRYRPDMPCFLLSNQNAVKAEPKKAIPSSVRITRSKAKDQMEQTKIDNESDVRAIRPGPRQTSEKKVSDKEKKVVQPVMPTSLRMTRSATQAAKQVPRTVSSTTARKPVTRAANENEPEGKVPSKGRPAKNVETKPDKGISCKVDSEENTLNSQTNATSGMNPDGVLSKMENLPEINTAKIKGKNSFAPKDFMFQPLDGLKTYQVTPMTPRSANAFLTPSYTWTPLKTEVDESQATKEILAQKCKTYSTKTIQQDSNKLPCPLGPLTVWHEEHVLNKNEATTKNLNGLPIKEVPSLERNEGRIAQPHHGVPYFRNILQSETEKLTSHCFEWDRKLELDIPDDAKDLIRTAVGQTRLLMKERFKQFEGLVDDCEYKRGIKETTCTDLDGFWDMVSFQIEDVIHKFNNLIKLEESGWQVNNNMNHNMNKNVFRKKVVSGIASKPKQDDAGRIAARNRLAAIKNAMRERIRQEECAETAVSVIPKEVDKIVFDAGFFRVESPVKLFSGLSVSSEGPSQRLGTPKSVNKAVSQSRNEMGIPQQTTSPENAGPQNTKSEHVKKTLFLSIPESRSSIEDAQCPGLPDLIEENHVVNKTDLKVDCLSSERMSLPLLAGGVADDINTNKKEGISDVVEGMELNSSITSQDVLMSSPEKNTASQNSILEEGETKISQSELFDNKSLTTECHLLDSPGLNCSNPFTQLERRHQEHARHISFGGNLITFSPLQPGEF

SEQ ID NO: 17898 - protein, 765 aa, Homo sapiens
MKTILGDQRKQMLQKYKEEKQLQKLKEQREKAKRGIFKVGRYRPDMPCFLLSNQNAVKAEPKKAIPSSVRITRSKAKDQMEQTKIDNESDVRAIRPGPRQTSEKKVSDKEKKVVQPVMPTSLRMTRSATQAAKQVPRTVSSTTARKPVTRAANENEPEGKVPSKGRPAKNVETKPDKGISCKVDSEENTLNSQTNATSGMNPDGVLSKMENLPEINTAKIKGKNSFAPKDFMFQPLDGLKTYQVTPMTPRSANAFLTPSYTWTPLKTEVDESQATKEILAQKCKTYSTKTIQQDSNKLPCPLGPLTVWHEEHVLNKNEATTKNLNGLPIKEVPSLERNEGRIAQPHHGVPYFRNILQSETEKLTSHCFEWDRKLELDIPDDAKDLIRTAVGQTRLLMKERFKQFEGLVDDCEYKRGIKETTCTDLDGFWDMVSFQIEDVIHKFNNLIKLEESGWQVNNNMNHNMNKNVFRKKVVSGIASKPKQDDAGRIAARNRLAAIKNAMRERIRQEECAETAVSVIPKEVDKIVFDAGFFRVESPVKLFSGLSVSSEGPSQRLGTPKSVNKAVSQSRNEMGIPQQTTSPENAGPQNTKSEHVKKTLFLSIPESRSSIEDAQCPGLPDLIEENHVVNKTDLKVDCLSSERMSLPLLAGGVADDINTNKKEGISDVVEGMELNSSITSQDVLMSSPEKNTASQNSILEEGETKISQSELFDNKSLTTECHLLDSPGLNCSNPFTQLERRHQEHARHISFGGNLITFSPLQPGEF

SEQ ID NO: 17899 - protein, 842 aa, Homo sapiens
MSSSHFASRHRKDISTEMIRTKIAHRKSLSQKENRHKEYERNRHFGLKDVNIPTLEGRILVELDETSQGLVPEKTNVKPRAMKTILGDQRKQMLQKYKEEKQLQKLKEQREKAKRGIFKVGRYRPDMPCFLLSNQNAVKAEPKKAIPSSVRITRSKAKDQMEQTKIDNESDVRAIRPGPRQTSEKKVSDKEKKVVQPVMPTSLRMTRSATQAAKQVPRTVSSTTARKPVTRAANENEPEGKVPSKGRPAKNVETKPDKGISCKVDSEENTLNSQTNATSGMNPDGVLSKMENLPEINTAKIKGKNSFAPKDFMFQPLDGLKTYQVTPMTPRSANAFLTPSYTWTPLKTEVDESQATKEILAQKCKTYSTKTIQQDSNKLPCPLGPLTVWHEEHVLNKNEATTKNLNGLPIKEVPSLERNEGRIAQPHHGVPYFRNILQSETEKLTSHCFEWDRKLELDIPDDAKDLIRTAVGQTRLLMKERFKQFEGLVDDCEYKRGIKETTCTDLDGFWDMVSFQIEDVIHKFNNLIKLEESGWQVNNNMNHNMNKNVFRKKVVSGIASKPKQDDAGRIAARNRLAAIKNAMRERIRQEECAETAVSVIPKEVDKIVFDAGFFRVESPVKLFSGLSVSSEGPSQRLGTPKSVNKAVSQSRNEMGIPQQTTSPENAGPQNTKSEHVKKTLFLSIPESRSSIEDAQCPGLPDLIEENHVVNKTDLKVDCLSSERMSLPLLAGGVADDINTNKKEGISDVVEGMELNSSITSQDVLMSSPEKNTASQNSILEEGETKISQSELFDNKSLTTECHLLDSVGSCYVARAGLEVLGSSDPTTSASRVAGTTARSKLQ

SEQ ID NO: 17900 - protein, 1116 aa, Homo sapiens
MERAISPGLLVRALLLLLLLLGLAARTVAAGRARGLPAPTAEAAFGLGAAAAPTSATRVPAAGAVAAAEVTVEDAEALPAAAGEQEPRGPEPDDETELRPRGRSLVIISTLDGRIAALDPENHGKKQWDLDVGSGSLVSSSLSKPEVFGNKMIIPSLDGALFQWDQDRESMETVPFTVESLLESSYKFGDDVVLVGGKSLTTYGLSAYSGKVRYICSALGCRQWDSDEMEQEEDILLLQRTQKTVRAVGPRSGNEKWNFSVGHFELRYIPDMETRAGFIESTFKPNENTEESKIISDVEEQEAAIMDIVIKVSVADWKVMAFSKKGGHLEWEYQFCTPIASAWLLKDGKVIPISLFDDTSYTSNDDVLEDEEDIVEAARGATENSVYLGMYRGQLYLQSSVRISEKFPSSPKALESVTNENAIIPLPTIKWKPLIHSPSRTPVLVGSDEFDKCLSNDKFSHEEYSNGALSILQYPYDNGYYLPYYKRERNKRSTQITVRFLDNPHYNKNIRKKDPVLLLHWWKEIVATILFCIIATTFIVRRLFHPHPHRQRKESETQCQTENKYDSVSGEANDSSWNDIKNSGYISRYLTDFEPIQCLGRGGFGVVFEAKNKVDDCNYAIKRIRLPNRELAREKVMREVKALAKLEHPGIVRYFNAWLEAPPEKWQEKMDEIWLKDESTDWPLSSPSPMDAPSVKIRRMDPFATKEHIEIIAPSPQRSRSFSVGISCDQTSSSESQFSPLEFSGMDHEDISESVDAAYNLQDSCLTDCDVEDGTMDGNDEGHSFELCPSEASPYVRSRERTSSSIVFEDSGCDNASSKEEPKTNRLHIGNHCANKLTAFKPTSSKSSSEATLSISPPRPTTLSLDLTKNTTEKLQPSSPKVYLYIQMQLCRKENLKDWMNGRCTIEERERSVCLHIFLQIAEAVEFLHSKGLMHRDLKPSNIFFTMDDVVKVGDFGLVTAMDQDEEEQTVLTPMPAYARHTGQVGTKLYMSPEQIHGNSYSHKVDIFSLGLILFELLYPFSTQMERVRTLTDVRNLKFPPLFTQKYPCEYVMVQDMLSPSPMERPEAINIIENAVFEDLDFPGKTVLRQRSRSLSSSGTKHSRQSNNSHSPLPSN

SEQ ID NO: 17901 - protein, 296 aa, Homo sapiens
MTLNNVTMRQGTVGMQPQQQRWSIPADGRHLMVQKEPHQYSHRNRHSATPEDHCRRSWSSDSTDSVISSESGNTYYRVVLIGEQGVGKSTLANIFAGVHDSMDSDCEVLGEDTYERTLMVDGESATIILLDMWENKGENEWLHDHCMQVGDAYLIVYSITDRASFEKASELRIQLRRARQTEDIPIILVGNKSDLVRCREVSVSEGRACAVVFDCKFIETSAAVQHNVKELFEGIVRQVRLRRDSKEKNERRLAYQKRKESMPRKARRFWGKIVAKNNKNMAFKLKSKSCHDLSVL

SEQ ID NO: 17902 - protein, 188 aa, Homo sapiens
MANSGCKDVTGPDEESFLYFAYGSNLLTERIHLRNPSAAFFCVARLQDFKLDFGNSQGKTSQTWHGGIATIFQSPGDEVWGVVWKMNKSNLNSLDEQEGVKSGMYVVIEVKVATQEGKEITCRSYLMTNYESAPPSPQYKKIICMGAKENGLPLEYQEKLKAIEPNDYTGKVSEEIEDIIKKGETQTL

SEQ ID NO: 17903 - protein, 114 aa, Homo sapiens
MANSGCKDVTGPDEESFLYFAYGSNLLTERIHLRNPSAAFFCVARLQDFKLDFGNSQGKTSQTWHGGIATIFQSPGDEVWGVVWKMNKSNLNSLDELFAWVQKKMVCRWSIKRS

SEQ ID NO: 17904 - protein, 94 aa, Homo sapiens
MANSGCKDVTGPDEESFLYFAYGSNLLTERIHLRNPSAAFFCVARLQIICMGAKENGLPLEYQEKLKAIEPNDYTGKVSEEIEDIIKKGETQTL

SEQ ID NO: 17905 - protein, 166 aa, Homo sapiens
MANSGCKDVTGPDEESFLYFAYGSNLLTERIHLRNPSAAFFCVARLQDFKLDFGNSQGKTSQTWHGGIATIFQSPGDEVWGVVWKMNKSNLNSLDEWRKKRHTAFQNQGNHPCKHKTRMWDRDPKIPVQNLSLALCWQAQSGHGTCNRLFAWVQKKMVCRWSIKRS

SEQ ID NO: 17906 - protein, 116 aa, Homo sapiens
MSWRGRSTYRPRPRRYVEPPEMIGPMRPEQFSDEVEPATPEEGEPATQRQDPAAAQEGEDEGASAGQGPKPEADSQEQGHPQTGCECEDGPDGQEMDPPNPEEVKTPEEGEKQSQC

SEQ ID NO: 17907 - protein, 111 aa, Homo sapiens
MSEHVRTRSQSSERGNDQESSQPVGSVIVQEPTEEKRQEEEPPTDNQGIAPSGEIENEGAPAVQGPDMEAFQQELALLKIEDEPGDGPDVREGIMPTFDLTKVLEAGDAQP

SEQ ID NO: 17908 - protein, 1035 aa, Homo sapiens
MAAETLNFGPEWLRALSGGGSVASPPPSPAMPKYKLADYRYGREEMLALYVKENKVPEELQDKEFAAVLQDEPLQPLALEPLTEEEQRNFSLSVNSVAVLRLMGKGAGPPLAGTSRGRGSTRSRGRGRGDSCFYQRSIEEGDGAFGRSPREIQRSQSWDDRGERRFEKSARRDGARCGFEEGGAGPRKEHARSDSENWRSLREEQEEEEEGSWRLGAGPRRDGDRWRSASPDGGPRSAGWREHGERRRKFEFDLRGDRGGCGEEEGRGGGGSSHLRRCRAPEGFEEDKDGLPEWCLDDEDEEMGTFDASGAFLPLKKGPKEPIPEEQELDFQGLEEEEEPSEGLEEEGPEAGGKELTPLPPQEEKSSSPSPLPTLGPLWGTNGDGDETAEKEPPAAEDDIRGIQLSPGVGSSAGPPGDLEDDEGLKHLQQEAEKLVASLQDSSLEEEQFTAAMQTQGLRHSAAATALPLSHGAARKWFYKDPQGEIQGPFTTQEMAEWFQAGYFSMSLLVKRGCDEGFQPLGEVIKMWGRVPFAPGPSPPPLLGNMDQERLKKQQELAAAALYQQLQHQQFLQLVSSRQLPQCALREKAALGDLTPPPPPPPQQQQQQLTAFLQQLQALKPPRGGDQNLLPTMSRSLSVPDSGRLWDVHTSASSQSGGEASLWDIPINSSTQGPILEQLQLQHKFQERREVELRAKREEEERKRREEKRRQQQQEEQKRRQEEEELFRRKHVRQQELLLKLLQQQQAVPVPPAPSSPPPLWAGLAKQGLSMKTLLELQLEGERQLHKQPPPREPARAQAPNHRVQLGGLGTAPLNQWVSEAGPLWGGPDKSGGGSSGLGLWEDTPKSGGSLVRGLGLKNSRSSPSLSDSYSHLSGRPIRKKTEEEEKLLKLLQGIPRPQDGFTQWCEQMLHTLSATGSLDVPMAVAILKEVESPYDVHDYIRSCLGDTLEAKEFAKQFLERRAKQKASQQRQQQQEAWLSSASLQTAFQANHSTKLGPGEGSKAKRRALMLHSDPSILGYSLHGSSGEIESVDDY

SEQ ID NO: 17909 - protein, 1299 aa, Homo sapiens
MAAETQTLNFGPEWLRALSSGGSITSPPLSPALPKYKLADYRYGREEMLALFLKDNKIPSDLLDKEFLPILQEEPLPPLALVPFTEEEQRNFSMSVNSAAVLRLTGRGGGGTVVGAPRGRSSSRGRGRGRGECGFYQRSFDEVEGVFGRGGGREMHRSQSWEERGDRRFEKPGRKDVGRPNFEEGGPTSVGRKHEFIRSESENWRIFREEQNGEDEDGGWRLAGSRRDGERWRPHSPDGPRSAGWREHMERRRRFEFDFRDRDDERGYRRVRSGSGSIDDDRDSLPEWCLEDAEEEMGTFDSSGAFLSLKKVQKEPIPEEQEMDFRPVDEGEECSDSEGSHNEEAKEPDKTNKKEGEKTDRVGVEASEETPQTSSSSARPGTPSDHQSQEASQFERKDEPKTEQTEKAEEETRMENSLPAKVPSRGDEMVADVQQPLSQIPSDTASPLLILPPPVPNPSPTLRPVETPVVGAPGMGSVSTEPDDEEGLKHLEQQAEKMVAYLQDSALDDERLASKLQEHRAKGVSIPLMHEAMQKWYYKDPQGEIQGPFNNQEMAEWFQAGYFTMSLLVKRACDESFQPLGDIMKMWGRVPFSPGPAPPPHMGELDQERLTRQQELTALYQMQHLQYQQFLIQQQYAQVLAQQQKAALSSQQQQQLALLLQQFQTLKMRISDQNIIPSVTRSVSVPDTGSIWELQPTASQPTVWEGGSVWDLPLDTTTPGPALEQLQQLEKAKAAKLEQERREAEMRAKREEEERKRQEELRRQQEEILRRQQEEERKRREEEELARRKQEEALRRQREQEIALRRQREEEERQQQEEALRRLEERRREEEERRKQEELLRKQEEEAAKWAREEEEAQRRLEENRLRMEEEAARLRHEEEERKRKELEVQRQKELMRQRQQQQEALRRLQQQQQQQQLAQMKLPSSSTWGQQSNTTACQSQATLSLAEIQKLEEERERQLREEQRRQQRELMKALQQQQQQQQQKLSGWGNVSKPSGTTKSLLEIQQEEARQMQKQQQQQQQHQQPNRARNNTHSNLHTSIGNSVWGSINTGPPNQWASDLVSSIWSNADTKNSNMGFWDDAVKEVGPRNSTNKNKNNASLSKSVGVSNRQNKKVEEEEKLLKLFQGVNKAQDGFTQWCEQMLHALNTANNLDVPTFVSFLKEVESPYEVHDYIRAYLGDTSEAKEFAKQFLERRAKQKANQQRQQQQLPQQQQQQPPQQPPQQPQQQDSVWGMNHSTLHSVFQTNQSNNQQSNFEAVQSGKKKKKQKMVRADPSLLGFSVNASSERLNMGEIETLDDY

SEQ ID NO: 17910 - protein, 1320 aa, Homo sapiens
MAAETQTLNFGPEWLRALSSGGSITSPPLSPALPKYKLADYRYGREEMLALFLKDNKIPSDLLDKEFLPILQEEPLPPLALVPFTEEEQRNFSMSVNSAAVLRLTGRGGGGTVVGAPRGRSSSRGRGRGRGECGFYQRSFDEVEGVFGRGGGREMHRSQSWEERGDRRFEKPGRKDVGKKNGYYCMYSPVLLLGQPLCQGRPNFEEGGPTSVGRKHEFIRSESENWRIFREEQNGEDEDGGWRLAGSRRDGERWRPHSPDGPRSAGWREHMERRRRFEFDFRDRDDERGYRRVRSGSGSIDDDRDSLPEWCLEDAEEEMGTFDSSGAFLSLKKVQKEPIPEEQEMDFRPVDEGEECSDSEGSHNEEAKEPDKTNKKEGEKTDRVGVASEETPQTSSSSARPGTPSDHQSQEASQFERKDEPKTEQTEKAEEETRMENSLPAKVPSRGDEMVADVQQPLSQIPSDTASPLLILPPPVPNPSPTLRPVETPVVGAPGMGSVSTEPDDEEGLKHLEQQAEKMVAYLQDSALDDERLASKLQEHRAKGVSIPLMHEAMQKWYYKDPQGEIQGPFNNQEMAEWFQAGYFTMSLLVKRACDESFQPLGDIMKMWGRVPFSPGPAPPPHMGELDQERLTRQQELTALYQMQHLQYQQFLIQQQYAQVLAQQQKAALSSQQQQQLALLLQQFQTLKMRISDQNIIPSVTRSVSVPDTGSIWELQPTASQPTVWEGGSVWDLPLDTTTPGPALEQLQQLEKAKAAKLEQERREAEMRAKREEEERKRQEELRRQQEEILRRQQEEERKRREEEELARRKQEEALRRQREQEIALRRQREEEERQQQEEALRRLEERRREEEERRKQEELLRKQEEEAAKWAREEEEAQRRLEENRLRMEEEAARLRHEEEERKRKELEVQRQKELMRQRQQQQEALRRLQQQQQQQQLAQMKLPSSSTWGQQSNTTACQSQATLSLAEIQKLEEERERQLREEQRRQQRELMKALQQQQQQQQQKLSGWGNVSKPSGTTKSLLEIQQEEARQMQKQQQQQQQHQQPNRARNNTHSNLHTSIGNSVWGSINTGPPNQWASDLVSSIWSNADTKNSNMGFWDDAVKEVGPRNSTNKNKNNASLSKSVGVSNRQNKKVEEEEKLLKLFQGVNKAQDGFTQWCEQMLHALNTANNLDVPTFVSFLKEVESPYEVHDYIRAYLGDTSEAKEFAKQFLERRAKQKANQQRQQQQLPQQQQQQPPQQPPQQPQQQDSVWGMNHSTLHSVFQTNQSNNQQSNFEAVQSGKKKKKQKMVRADPSLLGFSVNASSERLNMGEIETLDDY

SEQ ID NO: 17911 - protein, 1286 aa, Homo sapiens
MAAETQTLNFGPEWLRALSSGGSITSPPLSPALPKYKLADYRYGREEMLALFLKDNKIPSDLLDKEFLPILQEEPLPPLALVPFTEEEQRNFSMSVNSAAVLRLTGRGGGGTVVGAPRGRSSSRGRGRGRGECGFYQRSFDEVEGVFGRGGGREMHRSQSWEERGDRRFEKPGRKDVGRPNFEEGGPTSVGRKHEFIRSESENWRIFREEQNGEDEDGGWRLAGSRRDGERWRPHSPGWREHMERRRRFEFDFRDRDDERGYRRVRSGSGSIDDDRDSLPEWCLEDAEEEMGTFDSSGAFLSLKKVQKEPIPEEQEMDFRPVDEGEECSDSEGSHNEEAKEPDKTNKKEGEKTDRVGVEASEETPQTSSSSARPGTPSDHQSQEASQFERKDEPKTEQTEKAEEETRMENSLPAKVPSRGDEMVADVQQPLSQIPSDTASPLLILPPPVPNPSPTLRPVETPVVGAPGMGSVSTEPDDEEGLKHLEQQAEKMVAYLQDSALDDERLASKLQEHRAKGVSIPLMHEAMQKWYYKDPQGEIQGPFNNQEMAEWFQAGYFTMSLLVKRACDESFQPLGDIMKMWGRVPFSPGPAPPPHMGELDQERLTRQQELTALYQMQHLQYQQFLIQQQYAQVLAQQQKAALSSQQQQQLALLLQQFQTLKMRISDQNIIPSVTRSVSVPDTGSIWELQPTASQPTVWEGGSVWDLPLDTTTPGPALEQLQQLEKAKAAKLEQERREAEMRAKREEEERKRQEELRRQQEEILRRQQEEERKRREEEELARRKQEEALRRQREQEIALRRQREEEERQQQEEALRRLEERRREEEERRKQEELLRKQEEEAAKWAREEEEAQRRLEENRLRMEEEAARLRHEEEERKRKELEVQRQKELMRQRQQQQEALRRLQQQQQQQQLAQMKLPSSSTWGQQSNTTACQSQATLSLAEIQKLEEERERQLREEQRRQQRELMKALQQQQQQQQQKLSGWGNVSKPSGTTKSLLEIQQEEARQMQKQQQQQQQHQQPNRARNNTHSNLHTSIGNSVWGSINTGPPNQWASDLVSSIWSNADTKNSNMGFWDDAVKEVGPRNSTNKNKNNASLSKSVGVSNRQNKKVEEEEKLLKLFQGVNKAQDGFTQWCEQMLHALNTANNLDVPTFVSFLKEVESPYEVHDYIRAYLGDTSEAKEFAKQFLERRAKQKANQQRQQQQQPPQQPPQQPQQQDSVWGMNHSTLHSVFQTNQSNNQQSNFEAVQSGKKKKKQKMVRADPSLLGFSVNASSERLNMGEIETLDDY

SEQ ID NO: 17912 - protein, 1293 aa, Homo sapiens
MAAETQTLNFGPEWLRALSSGGSITSPPLSPALPKYKLADYRYGREEMLALFLKDNKIPSDLLDKEFLPILQEEPLPPLALVPFTEEEQRNFSMSVNSAAVLRLTGRGGGGTVVGAPRGRSSSRGRGRGRGECGFYQRSFDEVEGVFGRGGGREMHRSQSWEERGDRRFEKPGRKDVGRPNFEEGGPTSVGRKHEFIRSESENWRIFREEQNGEDEDGGWRLAGSRRDGERWRPHSPGWREHMERRRRFEFDFRDRDDERGYRRVRSGSGSIDDDRDSLPEWCLEDAEEEMGTFDSSGAFLSLKKVQKEPIPEEQEMDFRPVDEGEECSDSEGSHNEEAKEPDKTNKKEGEKTDRVGVEASEETPQTSSSSARPGTPSDHQSQEASQFERKDEPKTEQTEKAEEETRMENSLPAKVPSRGDEMVADVQQPLSQIPSDTASPLLILPPPVPNPSPTLRPVETPVVGAPGMGSVSTEPDDEEGLKHLEQQAEKMVAYLQDSALDDERLASKLQEHRAKGVSIPLMHEAMQKWYYKDPQGEIQGPFNNQEMAEWFQAGYFTMSLLVKRACDESFQPLGDIMKMWGRVPFSPGPAPPPHMGELDQERLTRQQELTALYQMQHLQYQQFLIQQQYAQVLAQQQKAALSSQQQQQLALLLQQFQTLKMRISDQNIIPSVTRSVSVPDTGSIWELQPTASQPTVWEGGSVWDLPLDTTTPGPALEQLQQLEKAKAAKLEQERREAEMRAKREEEERKRQEELRRQQEEILRRQQEEERKRREEEELARRKQEEALRRQREQEIALRRQREEEERQQQEEALRRLEERRREEEERRKQEELLRKQEEEAAKWAREEEEAQRRLEENRLRMEEEAARLRHEEEERKRKELEVQRQKELMRQRQQQQEALRRLQQQQQQQQLAQMKLPSSSTWGQQSNTTACQSQATLSLAEIQKLEEERERQLREEQRRQQRELMKALQQQQQQQQQKLSGWGNVSKPSGTTKSLLEIQQEEARQMQKQQQQQQQHQQPNRARNNTHSNLHTSIGNSVWGSINTGPPNQWASDLVSSIWSNADTKNSNMGFWDDAVKEVGPRNSTNKNKNNASLSKSVGVSNRQNKKVEEEEKLLKLFQGVNKAQDGFTQWCEQMLHALNTANNLDVPTFVSFLKEVESPYEVHDYIRAYLGDTSEAKEFAKQFLERRAKQKANQQRQQQQLPQQQQQQPPQQPPQQPQQQDSVWGMNHSTLHSVFQTNQSNNQQSNFEAVQSGKKKKKQKMVRADPSLLGFSVNASSERLNMGEIETLDDY

SEQ ID NO: 17913 - protein, 314 aa, Homo sapiens
MSSTAAFYLLSTLGGYLVTSFLLLKYPTLLHQRKKQRFLSKHISHRGGAGENLENTMAAFQHAVKIGTDMLELDCHITKDEQVVVSHDENLKRATGVNVNISDLKYCELPPYLGKLDVSFQRACQCEGKDNRIPLLKEVFEAFPNTPINIDIKVNNNVLIKKVSELVKRYNREHLTVWGNANYEIVEKCYKENSDIPILFSLQRVLLILGLFFTGLLPFVPIREQFFEIPMPSIILKLKEPHTMSRSQKFLIWLSDLLLMRKALFDHLTARGIQVYIWVLNEEQEYKRAFDLGATGVMTDYPTKLRDFLHNFSA

SEQ ID NO: 17914 - protein, 290 aa, Homo sapiens
MSSTAAFYLLSTLGGYLVTSFLLLKYPTLLHQRKKQRFLSKHISHRGGAGENLENTMAAFQHAVKIGTDMLELDCHITKDEQVVVSHDENLKRATGVNVNISDLKYCELPPYLGKLDVSFQRACQCEGKDNRIPLLKEVFEAFPNTPINIDIKVNNNVLIKKVSELVKRYNREHLTVWGNANYEIVEKCYKENSDIPILFSLQRVLLILGLFFTGLLPFVPIREQFFEIPMPSIILKLKEPHTMSRSQKFLIWLSDLLLMRKALFDHLTARGIQVSFWNDAFWKQHSSPV

SEQ ID NO: 17915 - protein, 289 aa, Homo sapiens
MSSTAAFYLLSTLGGYLVTSFLLLKYPTLLHQRKKQRFLSKHISHRGGAGENLENTMAAFQHAVKIGTDMLELDCHITKDEQVVVSHDENLKRATGVNVNISDLKYCELPPYLGKLDVSFQRACQCEGKDNRIPLLKEVFEAFPNTPINIDIKVNNNVLIKKVSELVKRYNREHLTVWGNANYEIVEKCYKENSDIPILFSLQRVLLILGLFFTGLLPFVPIREQFFEIPMPSIILKLKEPHTMSRSQKFLIWLSDLLLMRKALFEPLHPASKRNFEGHCSYLVVSCYF

SEQ ID NO: 17916 - protein, 148 aa, Homo sapiens
MATPARAPESPPSADPALVAGPAEEAECPPPRQPQPAQNVLAAPRLRAPSSRGLGAAEFGGAAGNVEAPGETFAQRVSWGPAESPPGSFSSSSLGAPLPSRTLFPSLEGDFDSVTFASVLRASGRRACCGRAVPLPGQKIHLQIARQR

SEQ ID NO: 17917 - protein, 86 aa, Homo sapiens
MATPARAPESPPSADPALVAGPAEEAECPPPRQPQPAQNVLAAPRLRAPSSRGLGAAEFGGAAGNVEAPGETFAQRKIHLQIARQR

SEQ ID NO: 17918 - protein, 318 aa, Homo sapiens
MSLLLYYALPALGSYAMLSIFFLRRPHLLHTPRAPTFRIRLGAHRGGSGELLENTMEAMENSMAQRSDLLELDCQLTRDRVVVVSHDENLCRQSGLNRDVGSLDFEDLPLYKEKLEVYFSPGHFAHGSDRRMVRLEDLFQRFPRTPMSVEIKGKNEELIREIAGLVRRYDRNEITIWASEKSSVMKKCKAANPEMPLSFTISRGFWVLLSYYLGLLPFIPIPEKFFFCFLPNIINRTYFPFSCSCLNQLLAVVSKWLIMRKSLIRHLEERGVQVVFWCLNEESDFEAAFSVGATGVITDYPTALRHYLDNHGPAARTS

SEQ ID NO: 17919 - protein, 256 aa, Homo sapiens
MAQRSDLLELDCQLTRDRVVVVSHDENLCRQSGLNRDVGSLDFEDLPLYKEKLEVYFSPGHFAHGSDRRMVRLEDLFQRFPRTPMSVEIKGKNEELIREIAGLVRRYDRNEITIWASEKSSVMKKCKAANPEMPLSFTISRGFWVLLSYYLGLLPFIPIPEKFFFCFLPNIINRTYFPFSCSCLNQLLAVVSKWLIMRKSLIRHLEERGVQVVFWCLNEESDFEAAFSVGATGVITDYPTALRHYLDNHGPAARTS

SEQ ID NO: 17920 - protein, 346 aa, Homo sapiens
MRLLFLAVLRPHTGNAVTAQRVRAHLEAAGHVCVLKDAFDFESRSEIANLILAENCEAALALHLYRGGRLLQGHRIPFGVIFGGTDVNEDANQAEKNTVMGRVLEEARFAVAFTESMKEMAQAQWPHAKGKVYVQSQGIATTPNAAFNWNTFLQRSEINQSADNLHIFLLICGLRQVKDPLYLVDAFSAWHQEEPNVHLVIVGPEVDPVFTREVKAKVKRAAGVRLIGEMPQEDLHAVVKNCFAVVNSSVSEGMSAAILEAMDLEVPVLARNIPGNAAVVKHEVTGLLFSNPQEFVHLAKRLVSDPALEKEIVVNGREYVRMYHSWQVERDTYQQLIRKLEGSTED

SEQ ID NO: 17921 - protein, 266 aa, Homo sapiens
MRLLFLAVLRPHTGNAVTAQRVRAHLEAAGHVCVLKDAFDFESRSEIANLILAENCEAALALHLYRGGRLLQGHRIPFGVIFGGTDVNEDANQAEKNTVMGRVLEEARFAVAFTESMKEMAQAQWVDPVFTREVKAKVKRAAGVRLIGEMPQEDLHAVVKNCFAVVNSSVSEGMSAAILEAMDLEVPVLARNIPGNAAVVKHEVTGLLFSNPQEFVHLAKRLVSDPALEKEIVVNGREYVRMYHSWQVERDTYQQLIRKLEGSTED

SEQ ID NO: 17922 - protein, 152 aa, Homo sapiens
MRLLFLAVLRPHTGNAVTAQRVRAHLEAAGHVCVLKDAFDFESRSEIANLILAENCEAALALHLYRGGRLLQGHRIPFGVIFGGTDVNEDANQAEKNTVMGRVLEEASRMLRVRSMSRVKELQQHQTPLLTGIPFFNALRLTKVLIICTYFF

SEQ ID NO: 17923 - protein, 623 aa, Homo sapiens
MLLFLWIETSSEYFNFDWVTFLGTGYWFFWSIFILSLARILTAYSSLLLLLGFLLLWERIELYLHLCHKILILLVILLCVILMFIICKFWKERWLVAGLSMQIFAPYVHLVSITVMVILFWPVAFYVACLEREVRMRRYRMTHSEKKRLKQCNVITRLRGLQVPVGLPFLLILLGLYLMPLGIYSPCIQEKENLGPKPTIFGHRGAPMLGPENTMMSFEKAVEHGAHGLETDIHLSYDHVPFLMHDFDLKRTTNIGEVQPESACENPAFFNWDFLSTLNAGKWFVKPELRPFYNMKPLSEADKERARNQSIPTLADLLTLAEKERKFVIFDLHRPPPKHPLRHTFVRQVVSVILASKIEQHLIFWLPAHDRQYVRSVAPGFQHVGRLVSIETLAKNNISIINVDYKKLFPNGLRDYKAANIHINVYTVNEPWLFSLAWCSRINSVTTDNIGLLSQLDHPHFFMTPKFYVFMWLLADIISVLFIVAIFCFHWRRETEKEKLFETSSTRTDTQSGNLHIAMKPPVRVVEGPWTLAALYPALPKSGKEHQGHFNFAAPSKKLLPIKNAVTPLKPGKHEIQPPMPTVVFELTQAPTRQATSEATFQTTLPTLKVDKPTMPSIEVPYP

SEQ ID NO: 17924 - protein, 520 aa, Homo sapiens
MLLFLWIETSSEYFNFDWVTFLGTGYWFFWSIFILSLARILTAYSSLLLLLGFLLLWERIELYLHLCHKILILLVILLCVILMFIICKFWKERWLVAGLSMQIFAPYVHLVSITVMVILFWPVAFYVACLEREVRMRRYRMTHSEKKRLKQCNVITRLRGLQVPVGLPFLLILLGLYLMPLGIYSPCIQEKENLGPKPTIFGHRGAPMLGPENTMMSFEKAVEHGAHGLETDIHLSYDHVPFLMHDFDLKRTTNIGEVQPESACENPAFFNWDFLSTLNAGKWFVKPELRPFYNMKPLSEADKERARNQSIPTLADLLTLAEKERKFVIFDLHRPPPKHPLRHTFVRQVVSVILASKIEQHLIFWLPAHDRQYVRSVAPGFQHVGRLVSIETLAKNNISIINVDYKKLFPNGLRDYKAANIHINVYTVNEPWLFSLAWCSRINSVTTDNIGLLSQLDHPHFFMTPKFYVFMWLLADIISVLFIVAIFCFHWRRETEKEKLFETSSTRTDTQSGSKNEEDR

SEQ ID NO: 17925 - protein, 116 aa, Homo sapiens
MDYYRKYAAIFLVTLSVFLHVLHSAPDVQDCPECTLQENPFFSQPGAPILQCMGCCFSRAYPTPLRSKKTMLVQKNVTSESTCCVAKSYNRVTVMGGFKVENHTACHCSTCYYHKS

SEQ ID NO: 17926 - protein, 605 aa, Homo sapiens
MVRHQPLQYYEPQLCLSCLTGIYGCRWKRYQRSHDDTTPWERLWFLLLTFTFGLTLTWLYFWWEVHNDYDEFNWYLYNRMGYWSDWPVPILVTTAAAFAYIAGLLVLALCHIAVGQQMNLHWLHKIGLVVILASTVVAMSAVAQLWEDEWEVLLISLQGTAPFLHVGAVAAVTMLSWIVAGQFARAERTSSQVTILCTFFTVVFALYLAPLTISSPCIMEKKDLGPKPALIGHRGAPMLAPEHTLMSFRKALEQKLYGLQADITISLDGVPFLMHDTTLRRTTNVEEEFPELARRPASMLNWTTLQRLNAGQWFLKTDPFWTASSLSPSDHREAQNQSICSLAELLELAKGNATLLLNLRDPPREHPYRSSFINVTLEAVLHSGFPQHQVMWLPSRQRPLVRKVAPGFQQTSGSKEAVASLRRGHIQRLNLRYTQVSRQELRDYASWNLSVNLYTVNAPWLFSLLWCAGVPSVTSDNSHALSQVPSPLWIMPPDEYCLMWVTADLVSFTLIVGIFVLQKWRLGGIRSYNPEQIMLSAAVRRTSRDVSIMKEKLIFSEISDGVEVSDVLSVCSDNSYDTYANSTATPVGPRGGGSHTKTLIERSGR

SEQ ID NO: 17927 - protein, 486 aa, Homo sapiens
MVRHQPLQYYEPQLCLSCLTGIYGCRWKRYQRSHDDTTPGTAPFLHVGAVAAVTMLSWIVAGQFARAERTSSQVTILCTFFTVVFALYLAPLTISSPCIMEKKDLGPKPALIGHRGAPMLAPEHTLMSFRKALEQKLYGLQADITISLDGVPFLMHDTTLRRTTNVEEEFPELARRPASMLNWTTLQRLNAGQWFLKTDPFWTASSLSPSDHREAQNQSICSLAELLELAKGNATLLLNLRDPPREHPYRSSFINVTLEAVLHSGFPQHQVMWLPSRQRPLVRKVAPGFQQTSGSKEAVASLRRGHIQRLNLRYTQVSRQELRDYASWNLSVNLYTVNAPWLFSLLWCAGVPSVTSDNSHALSQVPSPLWIMPPDEYCLMWVTADLVSFTLIVGIFVLQKWRLGGIRSYNPEQIMLSAAVRRTSRDVSIMKEKLIFSEISDGVEVSDVLSVCSDNSYDTYANSTATPVGPRGGGSHTKTLIERSGR

SEQ ID NO: 17928 - protein, 467 aa, Homo sapiens
MSAVAQLWEDEWEVLLISLQGTAPFLHVGAVAAVTMLSWIVAGQFARAERTSSQVTILCTFFTVVFALYLAPLTISSPCIMEKKDLGPKPALIGHRGAPMLAPEHTLMSFRKALEQKLYGLQADITISLDGVPFLMHDTTLRRTTNVEEEFPELARRPASMLNWTTLQRLNAGQWFLKTDPFWTASSLSPSDHREAQNQSICSLAELLELAKGNATLLLNLRDPPREHPYRSSFINVTLEAVLHSGFPQHQVMWLPSRQRPLVRKVAPGFQQTSGSKEAVASLRRGHIQRLNLRYTQVSRQELRDYASWNLSVNLYTVNAPWLFSLLWCAGVPSVTSDNSHALSQVPSPLWIMPPDEYCLMWVTADLVSFTLIVGIFVLQKWRLGGIRSYNPEQIMLSAAVRRTSRDVSIMKEKLIFSEISDGVEVSDVLSVCSDNSYDTYANSTATPVGPRGGGSHTKTLIERSGR

SEQ ID NO: 17929 - protein, 387 aa, Homo sapiens
MEKKDLGPKPALIGHRGAPMLAPEHTLMSFRKALEQKLYGLQADITISLDGVPFLMHDTTLRRTTNVEEEFPELARRPASMLNWTTLQRLNAGQWFLKTDPFWTASSLSPSDHREAQNQSICSLAELLELAKGNATLLLNLRDPPREHPYRSSFINVTLEAVLHSGFPQHQVMWLPSRQRPLVRKVAPGFQQTSGSKEAVASLRRGHIQRLNLRYTQVSRQELRDYASWNLSVNLYTVNAPWLFSLLWCAGVPSVTSDNSHALSQVPSPLWIMPPDEYCLMWVTADLVSFTLIVGIFVLQKWRLGGIRSYNPEQIMLSAAVRRTSRDVSIMKEKLIFSEISDGVEVSDVLSVCSDNSYDTYANSTATPVGPRGGGSHTKTLIERSGR

SEQ ID NO: 17930 - protein, 360 aa, Homo sapiens
MSFRKALEQKLYGLQADITISLDGVPFLMHDTTLRRTTNVEEEFPELARRPASMLNWTTLQRLNAGQWFLKTDPFWTASSLSPSDHREAQNQSICSLAELLELAKGNATLLLNLRDPPREHPYRSSFINVTLEAVLHSGFPQHQVMWLPSRQRPLVRKVAPGFQQTSGSKEAVASLRRGHIQRLNLRYTQVSRQELRDYASWNLSVNLYTVNAPWLFSLLWCAGVPSVTSDNSHALSQVPSPLWIMPPDEYCLMWVTADLVSFTLIVGIFVLQKWRLGGIRSYNPEQIMLSAAVRRTSRDVSIMKEKLIFSEISDGVEVSDVLSVCSDNSYDTYANSTATPVGPRGGGSHTKTLIERSGR

SEQ ID NO: 17931 - protein, 178 aa, Homo sapiens
MGNSLLRENRRQQNTQEMPWNVRMQSPKQRTSRCWDHHIAEGCFCLPWKKILIFEKRQDSQNENERMSSTPIQDNVDQTYSEELCYTLINHRVLCTRPSGNSAEEYYENVPCKAERPRESLGGTETEYSLLHMPSTDPRHARSPEDEYELLMPHRISSHFLQQPRPLMAPSETQFSHL

SEQ ID NO: 17932 - protein, 180 aa, Homo sapiens
MGNSLLRENSFRRQQNTQEMPWNVRMQSPKQRTSRCWDHHIAEGCFCLPWKKILIFEKRQDSQNENERMSSTPIQDNVDQTYSEELCYTLINHRVLCTRPSGNSAEEYYENVPCKAERPRESLGGTETEYSLLHMPSTDPRHARSPEDEYELLMPHRISSHFLQQPRPLMAPSETQFSHL

SEQ ID NO: 17933 - protein, 163 aa, Homo sapiens
MGNSLLRENRRQQNTQEMPWNVRMQSPKQRTSRKKILIFEKRQDSQNENERMSSTPIQDNVDQTYSEELCYTLINHRVLCTRPSGNSAEEYYENVPCKAERPRESLGGTETEYSLLHMPSTDPRHARSPEDEYELLMPHRISSHFLQQPRPLMAPSETQFSHL

SEQ ID NO: 17934 - protein, 736 aa, Homo sapiens
MATEGMILTNHDHQIRVGVLTVSDSCFRNLAEDRSGINLKDLVQDPSLLGGTISAYKIVPDEIEEIKETLIDWCDEKELNLILTTGGTGFAPRDVTPEATKEVIEREAPGMALAMLMGSLNVTPLGMLSRPVCGIRGKTLIINLPGSKKGSQECFQFILPALPHAIDLLRDAIVKVKEVHDELEDLPSPPPPLSPPPTTSPHKQTEDKGVQCEEEEEEKKDSGVASTEDSSSSHITAAAIAAKIPDSIISRGVQVLPRDTASLSTTPSESPRAQATSRLSTASCPTPKVQSRCSSKENILRASHSAVDITKVARRHRMSPFPLTSMDKAFITVLEMTPVLGTEIINYRDGMGRVLAQDVYAKDNLPPFPASVKDGYAVRAADGPGDRFIIGESQAGEQPTQTVMPGQVMRVTTGAPIPCGADAVVQVEDTELIRESDDGTEELEVRILVQARPGQDIRPIGHDIKRGECVLAKGTHMGPSEIGLLATVGVTEVEVNKFPVVAVMSTGNELLNPEDDLLPGKIRDSNRSTLLATIQEHGYPTINLGIVGDNPDDLLNALNEGISRADVIITSGGVSMGEKDYLKQVLDIDLHAQIHFGRVFMKPGLPTTFATLDIDGVRKIIFALPGNPVSAVVTCNLFVVPALRKMQGILDPRPTIIKARLSCDVKLDPRPEYHRCILTWHHQEPLPWAQSTGNQMSSRLMSMRSANGLLMLPPKTEQYVELHKGEVVDVMVIGRL

SEQ ID NO: 17935 - protein, 769 aa, Homo sapiens
MATEGMILTNHDHQIRVGVLTVSDSCFRNLAEDRSGINLKDLVQDPSLLGGTISAYKIVPDEIEEIKETLIDWCDEKELNLILTTGGTGFAPRDVTPEATKEVIEREAPGMALAMLMGSLNVTPLGMLSRPVCGIRGKTLIINLPGSKKGSQECFQFILPALPHAIDLLRDAIVKVKEVHDELEDLPSPPPPLSPPPTTSPHKQTEDKGVQCEEEEEEKKDSGVASTEDSSSSHITAAAIAAKKHPFYTSPAVVMAHGEQPIPGLINYSHHSTDERIPDSIISRGVQVLPRDTASLSTTPSESPRAQATSRLSTASCPTPKVQSRCSSKENILRASHSAVDITKVARRHRMSPFPLTSMDKAFITVLEMTPVLGTEIINYRDGMGRVLAQDVYAKDNLPPFPASVKDGYAVRAADGPGDRFIIGESQAGEQPTQTVMPGQVMRVTTGAPIPCGADAVVQVEDTELIRESDDGTEELEVRILVQARPGQDIRPIGHDIKRGECVLAKGTHMGPSEIGLLATVGVTEVEVNKFPVVAVMSTGNELLNPEDDLLPGKIRDSNRSTLLATIQEHGYPTINLGIVGDNPDDLLNALNEGISRADVIITSGGVSMGEKDYLKQVLDIDLHAQIHFGRVFMKPGLPTTFATLDIDGVRKIIFALPGNPVSAVVTCNLFVVPALRKMQGILDPRPTIIKARLSCDVKLDPRPEYHRCILTWHHQEPLPWAQSTGNQMSSRLMSMRSANGLLMLPPKTEQYVELHKGEVVDVMVIGRL

SEQ ID NO: 17936 - protein, 385 aa, Homo sapiens
MALPHDSNETSYLLPPNNEDWGRQTIPDFVYGQKDLMAEGIQWPRNAPGIPDALPQSPFDAALCSAWKQRVELGLFRYRLRELQTQILPGAVGFVAQLNVERGVQRRPPQTIKSVRQAFDPVQFNFNKIRPGEVLFRLHREPDLPGTLLQEDILVVINVSPLEWGHVLLVPEPARQLPQRLLPGALRAGIEAVLLSLHPGFRVGFNSLGGLASVNHLHLHGYYLAHRLPVEQAPSEPLDPGGHLHLLQDLPAPGFLFYTRGPGPDLESLISRVCRATDYLTDHEIAHNLFVTRGAPPGKTSPSSALTGVRVILWARKSSFGIKDGEAFNVALCELAGHLPVKTSQDFSSLTEAAAVALIQDCRLPPSQAEDVQAALVALMSQEEQ

SEQ ID NO: 17937 - protein, 315 aa, Homo sapiens
MTHQDLSITAKLINGGVAGLVGVTCVFPIDLAKTRLQNQHGKAMYKGMIDCLMKTARAEGFFGMYRGAAVNLTLVTPEKAIKLAANDFFRRLLMEDGMQRNLKMEMLAGCGAGMCQVVVTCPMEMLKIQLQDAGRLAVHHQGSASAPSTSRSYTTGSASTHRRPSATLIAWELLRTQGLAGLYRGLGATLLRDIPFSIIYFPLFANLNNLGFNELAGKASFAHSFVSGCVAGSIAAVAVTPLDVLKTRIQTLKKGLGEDMYSGITDCARKLWIQEGPSAFMKGAGCRALVIAPLFGIAQGVYFIGIGERILKCFD

SEQ ID NO: 17938 - protein, 1580 aa, Homo sapiens
MEAQSHSSTTTEKKKVENSIVKCSTRTDVSEKAVASSTTSNEDESPGQTYHRERRNAITMQPQNVQGLSKVSEEPSTSSDERASLIKKEIHGSLPHVAEPSVPYRGTVFAMDPRNGYMEPHYHPPHLFPAFHPPVPIDARHHEGRYHYDPSPIPPLHMTSALSSSPTYPDLPFIRISPHRNPTAASESPFSPPHPYINPYMDYIRSLHSSPSLSMISATRGLSPTDAPHAGVSPAEYYHQMALLTGQRSPYADIIPSAATAGTGAIHMEYLHAMDSTRFSSPRLSARPSRKRTLSISPLSDHSFDLQTMIRTSPNSLVTILNNSRSSSSASGSYGHLSASAISPALSFTYSSAPVSLHMHQQILSRQQSLGSAFGHSPPLIHPAPTFPTQRPIPGIPTVLNPVQVSSGPSESSQNKPTSESAVSSTGDPMHNKRSKIKPDEDLPSPGARGQQEQPEGTTLVKEEGDKDESKQEPEVIYETNCHWEGCAREFDTQEQLVHHINNDHIHGEKKEFVCRWLDCSREQKPFKAQYMLVVHMRRHTGEKPHKCTFEGCTKAYSRLENLKTHLRSHTGEKPYVCEHEGCNKAFSNASDRAKHQNRTHSNEKPYVCKIPGCTKRYTDPSSLRKHVKTVHGPEAHVTKKQRGDIHPRPPPPRDSGSHSQSRSPGRPTQGALGEQQDLSNTTSKREECLQVKTVKAEKPMTSQPSPGGQSSCSSQQSPISNYSNSGLELPLTDGGSIGDLSAIDETPIMDSTISTATTALALQARRNPAGTKWMEHVKLERLKQVNGMFPRLNPILPPKAPAVSPLIGNGTQSNNTCSLGGPMTLLPGRSDLSGVDVTMLNMLNRRDSSASTISSAYLSSRRSSGISPCFSSRRSSEASQAEGRPQNVSVADSYDPISTDASRRSSEASQSDGLPSLLSLTPAQQYRLKAKYAAATGGPPPTPLPNMERMSLKTRLALLGDALEPGVALPPVHAPRRCSDGGAHGYGRRHLQPHDAPGHGVRRASDPVRTGSEGLALPRVPRFSSLSSCNPPAMATSAEKRSLVLQNYTRPEGGQSRNFHSSPCPPSITENVTLESLTMDADANLNDEDFLPDDVVQYLNSQNQAGYEQHFPSALPDDSKVPHGPGDFDAPGLPDSHAGQQFHALEQPCPEGSKTDLPIQWNEVSSGSADLSSSKLKCGPRPAVPQTRAFGFCNGMVVHPQNPLRSGPAGGYQTLGENSNPYGGPEHLMLHNSPGSGTSGNAFHEQPCKAPQYGNCLNRQPVAPGALDGACGAGIQASKLKSTPMQGSGGQLNFGLPVAPNESAGSMVNGMQNQDPVGQGYLAHQLLGDSMQHPGAGRPGQQMLGQISATSHINIYQGPESCLPGAHGMGSQPSSLAVVRGYQPCASFGGSRRQAMPRDSLALQSGQLSDTSQTCRVNGIKMEMKGQPHPLCSNLQNYSGQFYDQTVGFSQQDTKAGSFSISDASCLLQGTSAKNSELLSPGANQVTSTVDSLDSHDLEGVQIDFDAIIDDGDHSSLMSGALSPSIIQNLSHSSSRLTTPRASLPFPALSMSTTNMAIGDMSSLLTSLAEESKFLAVMQ

SEQ ID NO: 17939 - protein, 109 aa, Homo sapiens
MKEEDSSFKLCVPGIVALQSPPNKAFRSTDTVGFLESELKKLLGMQQESRLWKLGSQEGRELLTRPEITVVEGEGYEVQRRLRHLPSPISVAQCLLLEEKGEMGNWPPE

SEQ ID NO: 17940 - protein, 88 aa, Homo sapiens
MKEEDSSFKLCVPGIVALQSPPNKAFRSTDTVGFLESELKKLLGMQQESRLWKLGSQEGRELLTRPEITVVECLLLEEKGEMGNWPPE

SEQ ID NO: 17941 - protein, 530 aa, Homo sapiens
MLLWPLLLLLLLLPTLALLRQQRSQDARLSWLAGLQHRVAWGALVWAATWQRRRLEQSTLHVHQSQQQALRWCLQGAQRPHCSLRRSTDISTFRNHLPLTKASQTQQEDSGEQPLPPTSNQDLGEASLQATLLGLAALNKAYPEVLAQGRTARVTLTSPWPRPLPWPGNTLGQVGTPGTKDPRALLLDALRSPGLRALEAGTAVELLDVFLGLETDGEELAGAIAAGNPGAPLRERAAELREALEQGPRGLALRLWPKLQVVVTLDAGGQAEAVAALGALWCQGLAFFSPAYAASGGVLGLNLQPEQPHGLYLLPPGAPFIELLPVKEGTQEEAASTLLLAEAQQGKEYELVLTDRASLTRCRLGDVVRVVGAYNQCPVVRFICRLDQTLSVRGEDIGEDLFSEALGRAVGQWAGAKLLDHGCVESSILDSSAGSAPHYEVFVALRGLRNLSEENRDKLDHCLQEASPRYKSLRFWGSVGPARVHLVGQGAFRALRAALAACPSSPFPPAMPRVLRHRHLAQCLQERVVS

SEQ ID NO: 17942 - protein, 474 aa, Homo sapiens
MLLWPLLLLLLLLPTLALLRQQRSQDARLSWLAGLQHRVAWGALVWAATWQRRRLEQSTLHVHQSQQQALRWCLQGAQRPHCSLRRSTDISTFRNHLPLTKASQTQQEDSGEQPLPPTSNQDLGEASLQATLLGLAALNKAYPEVLAQGRTARVTLTSPWPRPLPWPGNTLGQVGTPGTKDPRALLLDALRSPGLRALEAGTAVELLDVFLGLETDGEELAGAIAAGNPGAPLRERAAELREALEQGPRGLALRLWPKLQVVVTLDAGGQAEAVAALGALWCQGLAFFSPAYAASGGVLGLNLQPEQPHGLYLLPPGAPFIELLPVKEGTQEEAASTLLLAEAQQGKEYELVLTDRASLTRCRLGDVVRVVGAYNQCPVVRFICRLDQTLSVRGEDIGEDLFSEALGRAVGQWAGAKLLDHGCVESSILEWGRTDRAEDTRLGSCPFTGSMCAHGVYSQIPLRALLPTTRCLWR

SEQ ID NO: 17943 - protein, 491 aa, Homo sapiens
MLLWPLLLLLLLLPTLALLRQQRSQDARLSWLAGLQHRVAWGALVWAATWQRRRLEQSTLHVHQSQQQALRWCLQGAQRPHCSLRRSTDISTFRNHLPLTKAYPEVLAQGRTARVTLTSPWPRPLPWPGNTLGQVGTPGTKDPRALLLDALRSPGLRALEAGTAVELLDVFLGLETDGEELAGAIAAGNPGAPLRERAAELREALEQGPRGLALRLWPKLQVVVTLDAGGQAEAVAALGALWCQGLAFFSPAYAASGGVLGLNLQPEQPHGLYLLPPGAPFIELLPVKEGTQEEAASTLLLAEAQQGKEYELVLTDRASLTRCRLGDVVRVVGAYNQCPVVRFICRLDQTLSVRGEDIGEDLFSEALGRAVGQWAGAKLLDHGCVESSILDSSAGSAPHYEVFVALRGLRNLSEENRDKLDHCLQEASPRYKSLRFWGSVGPARVHLVGQGAFRALRAALAACPSSPFPPAMPRVLRHRHLAQCLQERVVS

SEQ ID NO: 17944 - protein, 686 aa, Homo sapiens
MGCFCAVPEEFYCEVLLLDESKLTLTTQQQGIKKSTKGSVVLDHVFHHVNLVEIDYFGLRYCDRSHQTYWLDPAKTLAEHKELINTGPPYTLYFGIKFYAEDPCKLKEEITRYQFFLQVKQDVLQGRLPCPVNTAAQLGAYAIQSELGDYDPYKHTAGYVSEYRFVPDQKEELEEAIERIHKTLMGQIPSEAELNYLRTAKSLEMYGVDLHPVYGENKSEYFLGLTPVGVVVYKNKKQVGKYFWPRITKVHFKETQFELRVLGKDCNETSFFFEARSKTACKHLWKCSVEHHTFFRMPENESNSLSRKLSKFGSIRYKHRYSGRTALQMSRDLSIQLPRPDQNVTRSRSKTYPKRIAQTQPAESNSISRITANMENGENEGTIKIIAPSPVKSFKKAKNENSPDTQRSKSHAPWEENGPQSGLYNSPSDRTKSPKFPYTRRRNPSCGSDNDSVQPVRRRKAHNSGEDSDLKQRRRSRSRCNTSSGSESENSNREYRKKRNRIRQENDMVDSAPQWEAVLRRQKEKNQADPNNRRSRHRSRSRSPDIQAKEELWKHIQKELVDPSGLSEEQLKEIPYTKIETQGDPIRIRHSHSPRSYRQYRRSQCSDGERSVLSEVNSKTDLVPPLPVTRSSDAQGSGDATVHQRRNGSKDSLMEEKPQTSTNNLAGKHTAKTIKTIQASRLKTET

SEQ ID NO: 17945 - protein, 229 aa, Homo sapiens
MGNILTCCINSHCGWPRGKDAPCYESDTDIYETVAAATSESTTVEPGKLDVGATEGQDLQHISNQKMPTGPPEDRLSLKFLPSSEEDNDDAKILPSPVQGSSEDNLSLVCLPRSEDDDCDDDDDDDAQILPSRVQGGCYRFDSSSCSSEDNLSLVCLPRSEDDDCDDDDDDAQILPSPVQACSEDSLFLRCSLRHKDEEEEDDDDIHITARIESDLTLESLSDEEIHPG

SEQ ID NO: 17946 - protein, 443 aa, Homo sapiens
MRRQVMAALVVSGAAEQGGRDGPGRGRAPRGRVANQIPPEILKNPQLQAAIRVLPSNYNFEIPKTIWRIQQAQAKKVALQMPEGLLLFACTIVDILERFTEAEVMVMGDVTYGACCVDDFTARALGADFLVHYGHSCLIPMDTSAQDFRVLYVFVDIRIDTTHLLDSLRLTFPPATALALVSTIQFVSTLQAAAQELKAEYRVSVPQCKPLSPGEILGCTSPRLSKEVEAVVYLGDGRFHLESVMIANPNVPAYRYDPYSKVLSREHYDHQRMQAARQEAIATARSAKSWGLILGTLGRQGSPKILEHLESRLRALGLSFVRLLLSEIFPSKLSLLPEVDVWVQVACPRLSIDWGTAFPKPLLTPYEAAVALRDISWQQPYPMDFYAGSSLGPWTVNHGQDRRPHAPGRPARGKVQEGSARPPSAVACEDCSCRDEKVAPLAP

SEQ ID NO: 17947 - protein, 363 aa, Homo sapiens
MPEGLLLFACTIVDILERFTEAEVMVMGDVTYGACCVDDFTARALGADFLVHYGHSCLIPMDTSAQDFRVLYVFVDIRIDTTHLLDSLRLTFPPATALALVSTIQFVSTLQAAAQELKAEYRVSVPQCKPLSPGEILGCTSPRLSKEVEAVVYLGDGRFHLESVMIANPNVPAYRYDPYSKVLSREHYDHQRMQAARQEAIATARSAKSWGLILGTLGRQGSPKILEHLESRLRALGLSFVRLLLSEIFPSKLSLLPEVDVWVQVACPRLSIDWGTAFPKPLLTPYEAAVALRDISWQQPYPMDFYAGSSLGPWTVNHGQDRRPHAPGRPARGKVQEGSARPPSAVACEDCSCRDEKVAPLAP

SEQ ID NO: 17948 - protein, 303 aa, Homo sapiens
MDTSAQDFRVLYVFVDIRIDTTHLLDSLRLTFPPATALALVSTIQFVSTLQAAAQELKAEYRVSVPQCKPLSPGEILGCTSPRLSKEVEAVVYLGDGRFHLESVMIANPNVPAYRYDPYSKVLSREHYDHQRMQAARQEAIATARSAKSWGLILGTLGRQGSPKILEHLESRLRALGLSFVRLLLSEIFPSKLSLLPEVDVWVQVACPRLSIDWGTAFPKPLLTPYEAAVALRDISWQQPYPMDFYAGSSLGPWTVNHGQDRRPHAPGRPARGKVQEGSARPPSAVACEDCSCRDEKVAPLAP

SEQ ID NO: 17949 - protein, 736 aa, Homo sapiens
MAGSSTGGGGVGETKVIYHLDEEETPYLVKIPVPAERITLGDFKSVLQRPAGAKYFFKSMDQDFGVVKEEISDDNARLPCFNGRVVSWLVSSDNPQPEMAPPVHEPRAELAPPAPPLPPLPPERTSGIGDSRPPSFHPNVSSSHENLEPETETESVVSLRRERPRRRDSSEHGAGGHRTGGPSRLERHLAGYESSSTLMTSELESTSLGDSDEEDTMSRFSSSTEQSSASRLLKRHRRRRKQRPPRLERTSSFSSVTDSTMSLNIITVTLNMEKYNFLGISIVGQSNERGDGGIYIGSIMKGGAVAADGRIEPGDMLLQVNDMNFENMSNDDAVRVLRDIVHKPGPIVLTVAKCWDPSPQAYFTLPRNEPIQPIDPAAWVSHSAALTGTFPAYPGSSSMSTITSGSSLPDGCEGRGLSVHTDMASVTKAMAAPESGLEVRDRMWLKITIPNAFLGSDVVDWLYHHVEGFPERREARKYASGLLKAGLIRHTVNKITFSEQCYYVFGDLSGGCESYLVNLSLNDNDGSSGASDQDTLAPLPGATPWPLLPTFSYQYPAPHPYSPQPPPYHELSSYTYGGGSASSQHSEGSRSSGSTRSDGGAGRTGRPEERAPESKSGSGSESEPSSRGGSLRRGGEASGTSDGGPPPSRGSTGGAPNLRAHPGLHPYGPPPGMALPYNPMMVVMMPPPPPPVPPAVQPPGAPPVRDLGSVPPELTASRQSFHMAMGNPSEFFVDVM

SEQ ID NO: 17950 - protein, 489 aa, Homo sapiens
MESMFSSPAEAALQRETGVPGLLTPLPDLDGVYELERVAGFVRDLGCERVALQFPDQLLGDAVAVAARLEETTGSKMFILGDTAYGSCCVDVLGAEQAGAQALIHFGPACLSPPARPLPVAFVLRQRSVALELCVKAFEAQNPDPKAPVVLLSEPACAHALEALATLLRPRYLDLLVSSPAFPQPVGSLSPEPMPLERFGRRFPLAPGRRLEEYGAFYVGGSKASPDPDLDPDLSRLLLGWAPGQPFSSCCPDTGKTQDEGARAGRLRARRRYLVERARDARVVGLLAGTLGVAQHREALAHLRNLTQAAGKRSYVLALGRPTPAKLANFPEVDVFVLLACPLGALAPQLSGSFFQPILAPCELEAACNPAWPPPGLAPHLTHYADLLPGSPFHVALPPPESELWETPDVSLITGDLRPPPAWKSSNDHGSLALTPRPQLELAESSPAASFLSSRSWQGLEPRLGQTPVTEAVSGRRGIAIAYEDEGSG

SEQ ID NO: 17951 - protein, 261 aa, Homo sapiens
MESMFSSPAEAALQRETGVPGLLTPLPDLDGVYELERVAGFVRDLGCERVALQFPDQLLGDAVAVAARLEETTGSKMFILGDTAYGSCCVDVLGAEQAGAQALIHFGPACLSPPARPLPVAFVLRQRSVALELCVKAFEAQNPDPKAPVVLLSEPACAHALGSPFHVALPPPESELWETPDVSLITGDLRPPPAWKSSNDHGSLALTPRPQLELAESSPAASFLSSRSWQGLEPRLGQTPVTEAVSGRRGIAIAYEDEGSG

SEQ ID NO: 17952 - protein, 354 aa, Homo sapiens
MLWLWLHDWRRRQGQRCSFWVTQPTAEALATLLRPRYLDLLVSSPAFPQPVGSLSPEPMPLERFGRRFPLAPGRRLEEYGAFYVGGSKASPDPDLDPDLSRLLLGWAPGQPFSSCCPDTGKTQDEGARAGRLRARRRYLVERARDARVVGLLAGTLGVAQHREALAHLRNLTQAAGKRSYVLALGRPTPAKLANFPEVDVFVLLACPLGALAPQLSGSFFQPILAPCELEAACNPAWPPPGLAPHLTHYADLLPGSPFHVALPPPESELWETPDVSLITGDLRPPPAWKSSNDHGSLALTPRPQLELAESSPAASFLSSRSWQGLEPRLGQTPVTEAVSGRRGIAIAYEDEGSG

SEQ ID NO: 17953 - protein, 307 aa, Homo sapiens
MALKQEMAKSLLKTASLSGRTKLLHQTGLSLYSTSHGFYEEEVKKTLQQFPGGSIDLQKEDNGIGILTLNNPSRMNAFSGVMMLQLLEKVIELENWTEGKGLIVRGAKNTFSSGSDLNAVKSLGTPEDGMAVCMFMQNTLTRFMRLPLISVALVQGWALGGGAEFTTACDFRLMTPESKIRFVHKEMGIIPSWGGTTRLVEIIGSRQALKVLSGALKLDSKNALNIGMVEEVLQSSDETKSLEEAQEWLKQFIQGPPEVIRALKKSVCSGRELYLEEALQNERDLLGTVWGGPANLEAIAKKGKFNK

SEQ ID NO: 17954 - protein, 301 aa, Homo sapiens
MAKSLLKTASLSGRTKLLHQTGLSLYSTSHGFYEEEVKKTLQQFPGGSIDLQKEDNGIGILTLNNPSRMNAFSGVMMLQLLEKVIELENWTEGKGLIVRGAKNTFSSGSDLNAVKSLGTPEDGMAVCMFMQNTLTRFMRLPLISVALVQGWALGGGAEFTTACDFRLMTPESKIRFVHKEMGIIPSWGGTTRLVEIIGSRQALKVLSGALKLDSKNALNIGMVEEVLQSSDETKSLEEAQEWLKQFIQGPPEVIRALKKSVCSGRELYLEEALQNERDLLGTVWGGPANLEAIAKKGKFNK

SEQ ID NO: 17955 - protein, 226 aa, Homo sapiens
MMLQLLEKVIELENWTEGKGLIVRGAKNTFSSGSDLNAVKSLGTPEDGMAVCMFMQNTLTRFMRLPLISVALVQGWALGGGAEFTTACDFRLMTPESKIRFVHKEMGIIPSWGGTTRLVEIIGSRQALKVLSGALKLDSKNALNIGMVEEVLQSSDETKSLEEAQEWLKQFIQGPPEVIRALKKSVCSGRELYLEEALQNERDLLGTVWGGPANLEAIAKKGKFNK

SEQ ID NO: 17956 - protein, 70 aa, Homo sapiens
MMLQLLEKVIELENWTEGKGLIVRGAKNTFSSGSDLNAVKSLGTPETSFNKCCAGSRLGIGWRSRIYYSM

SEQ ID NO: 17957 - protein, 145 aa, Homo sapiens
MAKSLLKTASLSGRTKLLHQTGLSLYSTSHGFYEEEVKKTLQQFPGGSIDLQKEDNGIGILTLNNPSRMNAFSGVMMLQLLEKVIELENWTEGKGLIVRGAKNTFSSGSDLNAVKSLGTPETSFNKCCAGSRLGIGWRSRIYYSM

SEQ ID NO: 17958 - protein, 284 aa, Homo sapiens
MAKSLLKTASLSGRTKLLHQTGLSLYSTSHGFYEEEVKKTLQQFPGGSIDLQKEDNGIGILTLNNPSRMNAFSGVMMLQLLEKVIELENWTEGKGLIVRGAKNTFSSGSDLNAVKSLGLQRRLPLISVALVQGWALGGGAEFTTACDFRLMTPESKIRFVHKEMGIIPSWGGTTRLVEIIGSRQALKVLSGALKLDSKNALNIGMVEEVLQSSDETKSLEEAQEWLKQFIQGPPEVIRALKKSVCSGRELYLEEALQNERDLLGTVWGGPANLEAIAKKGKFNK

SEQ ID NO: 17959 - protein, 97 aa, Homo sapiens
MKEPGPNFVTVRKGLHSFKMAFVKHLLLFLSPRLECSGSITDHCSLHLPVQEILMSQPPEQLGLQTNLGNQESSGMMKLFMPRPKVLAQYESIQFMP

SEQ ID NO: 17960 - protein, 70 aa, Homo sapiens
MYSYWRLECSGSITDHCSLHLPVQEILMSQPPEQLGLQTNLGNQESSGMMKLFMPRPKVLAQYESIQFMP

SEQ ID NO: 17961 - protein, 91 aa, Homo sapiens
MKEPGPNFVTVRKGLHSFKMAFVKHLLLECSGSITDHCSLHLPVQEILMSQPPEQLGLQTNLGNQESSGMMKLFMPRPKVLAQYESIQFMP

SEQ ID NO: 17962 - protein, 37 aa, Homo sapiens
MKEPGPNFVTVRKGLHSFKMAFVKHLLQTLEIKKVLE

SEQ ID NO: 17963 - protein, 43 aa, Homo sapiens
MSQPPEQLGLQTNLGNQESSGMMKLFMPRPKVLAQYESIQFMP

SEQ ID NO: 17964 - protein, 47 aa, Homo sapiens
MHNIMMVKLKKKKSTTNLGNQESSGMMKLFMPRPKVLAQYESIQFMP

SEQ ID NO: 17965 - protein, 150 aa, Homo sapiens
MGVQPPNFSWVLPGRLAGLALPRLPAHYQFLLDLGVRHLVSLTERGPPHSDSCPGLTLHRLRIPDFCPPAPDQIDRFVQIVDEANARGEAVGVHCALGFGRTGTMLACYLVKERGLAAGDAIAEIRRLRPGSIETYEQEKAVFQFYQRTK

SEQ ID NO: 17966 - protein, 1301 aa, Homo sapiens
MKIITYFCIWAVAWAIPVPQSKPLERHVEKSMNLHLLARSNVSVQDELNASGTIKESGVLVHEGDRGRQENTQDGHKGEGNGSKWAEVGGKSFSTYSTLANEEGNIEGWNGDTGKAETYGHDGIHGKEENITANGIQGQVSIIDNAGATNRSNTNGNTDKNTQNGDVGDAGHNEDVAVVQEDGPQVAGSNNSTDNEDEIIENSCRNEGNTSEITPQINSKRNGTKEAEVTPGTGEDAGLDNSDGSPSGNGADEDEDEGSGDDEDEEAGNGKDSSNNSKGQEGQDHGKEDDHDSSIGQNSDSKEYYDPEGKEDPHNEVDGDKTSKSEENSAGIPEDNGSQRIEDTQKLNHRESKRVENRITKESETHAVGKSQDKGIEIKGPSSGNRNITKEVGKGNEGKEDKGQHGMILGKGNVKTQGEVVNIEGPGQKSEPGNKVGHSNTGSDSNSDGYDSYDFDDKSMQGDDPNSSDESNGNDDANSESDNNSSSRGDASYNSDESKDNGNGSDSKGAEDDDSDSTSDTNNSDSNGNGNNGNDDNDKSDSGKGKSDSSDSDSSDSSNSSDSSDSSDSDSSDSNSSSDSDSSDSDSSDSSDSDSSDSSNSSDSSDSSDSSDSSDSSDSSDSKSDSSKSESDSSDSDSKSDSSDSNSSDSSDNSDSSDSSNSSNSSDSSDSSDSSDSSSSSDSSNSSDSSDSSDSSNSSESSDSSDSSDSDSSDSSDSSNSNSSDSDSSNSSDSSDSSNSSDSSDSSDSSNSSDSSDSSDSSNSSDSSDSSDSSDSSDSSNSSDSNDSSNSSDSSDSSNSSDSSNSSDSSDSSDSSDSDSSNSSDSSNSSDSSDSSNSSDSSDSSDSSDGSDSDSSNRSDSSNSSDSSDSSDSSNSSDSSDSSDSNESSNSSDSSDSSNSSDSDSSDSSNSSDSSDSSNSSDSSESSNSSDNSNSSDSSNSSDSSDSSDSSNSSDSSNSSDSSNSSDSSDSNSSDSSDSSNSSDSSDSSDSSDSSDSSDSSNSSDSSDSSDSSDSSNSSDSSNSSDSSNSSDSSDSSDSSDSSDSSDSSDSSDSSNSSDSSDSSDSSDSSDSSDSSDSSDSSESSDSSDSSNSSDSSDSSDSSDSSDSSDSSDSSDSSDSSNSSDSSDSSDSSDSSDSSNSSDSSDSSESSDSSDSSDSSDSSDSSDSSDSSDSSDSSNSSDSSDSSDSSDSSDSSDSSDSSDSSDSSDSSDSSDSSDSSDSSDSSDSSDSNESSDSSDSSDSSDSSNSSDSSDSSDSSDSTSDSNDESDSQSKSGNGNNNGSDSDSDSEGSDSNHSTSDD

SEQ ID NO: 17967 - protein, 588 aa, Homo sapiens
MGGTARGPGRKDAGPPGAGLPPQQRRLGDGVYDTFMMIDETKCPPCSNVLCNPSEPPPPRRLNMTTEQFTGDHTQHFLDGGEMKVEQLFQEFGNRKSNTIQSDGISDSEKCSPTVSQGKSSDCLNTVKSNSSSKAPKVVPLTPEQALKQYKHHLTAYEKLEIINYPEIYFVGPNAKKRHGVIGGPNNGGYDDADGAYIHVPRDHLAYRYEVLKIIGKGSFGQVARVYDHKLRQYVALKMVRNEKRFHRQAAEEIRILEHLKKQDKTGSMNVIHMLESFTFRNHVCMAFELLSIDLYELIKKNKFQGFSVQLVRKFAQSILQSLDALHKNKIIHCDLKPENILLKHHGRSSTKVIDFGSSCFEYQKLYTYIQSRFYRAPEIILGSRYSTPIDIWSFGCILAELLTGQPLFPGEDEGDQLACMMELLGMPPPKLLEQSKRAKYFINSKGIPRYCSVTTQADGRVVLVGGRSRRGKKRGPPGSKDWGTALKGCDDYLFIEFLKRCLHWDPSARLTPAQALRHPWISKSVPRPLTTIDKVSGKRVVNPASAFQGLGSKLPPVVGIANKLKANLMSETNGSIPLCSVLPKLIS

SEQ ID NO: 17968 - protein, 568 aa, Homo sapiens
MKWKEKLGDGVYDTFMMIDETKCPPCSNVLCNPSEPPPPRRLNMTTEQFTGDHTQHFLDGGEMKVEQLFQEFGNRKSNTIQSDGISDSEKCSPTVSQGKSSDCLNTVKSNSSSKAPKVVPLTPEQALKQYKHHLTAYEKLEIINYPEIYFVGPNAKKRHGVIGGPNNGGYDDADGAYIHVPRDHLAYRYEVLKIIGKGSFGQVARVYDHKLRQYVALKMVRNEKRFHRQAAEEIRILEHLKKQDKTGSMNVIHMLESFTFRNHVCMAFELLSIDLYELIKKNKFQGFSVQLVRKFAQSILQSLDALHKNKIIHCDLKPENILLKHHGRSSTKVIDFGSSCFEYQKLYTYIQSRFYRAPEIILGSRYSTPIDIWSFGCILAELLTGQPLFPGEDEGDQLACMMELLGMPPPKLLEQSKRAKYFINSKGIPRYCSVTTQADGRVVLVGGRSRRGKKRGPPGSKDWGTALKGCDDYLFIEFLKRCLHWDPSARLTPAQALRHPWISKSVPRPLTTIDKVSGKRVVNPASAFQGLGSKLPPVVGIANKLKANLMSETNGSIPLCSVLPKLIS

SEQ ID NO: 17969 - protein, 69 aa, Homo sapiens
MAQDLSEKDLLKMEVEQLKKEVKNTRIPISKAGKEIKEYVEAQAGNDPFLKGIPEDKNPFKEKGGCLIS

SEQ ID NO: 17970 - protein, 1226 aa, Homo sapiens
MNPRQGYSLSGYYTHPFQGYEHRQLRYQQPGPGSSPSSFLLKQIEFLKGQLPEAPVIGKQTPSLPPSLPGLRPRFPVLLASSTRGRQVDIRGVPRGVHLRSQGLQRGFQHPSPRGRSLPQRGVDCLSSHFQELSIYQDQEQRILKFLEELGEGKATTAHDLSGKLGTPKKEINRVLYSLAKKGKLQKEAGTPPLWKIAVSTQAWNQHSGVVRPDGHSQGAPNSDPSLEPEDRNSTSVSEDLLEPFIAVSAQAWNQHSGVVRPDSHSQGSPNSDPGLEPEDSNSTSALEDPLEFLDMAEIKEKICDYLFNVSDSSALNLAKNIGLTKARDINAVLIDMERQGDVYRQGTTPPIWHLTDKKRERMQIKRNTNSVPETAPAAIPETKRNAEFLTCNIPTSNASNNMVTTEKVENGQEPVIKLENRQEARPEPARLKPPVHYNGPSKAGYVDFENGQWATDDIPDDLNSIRAAPGEFRAIMEMPSFYSHGLPRCSPYKKLTECQLKNPISGLLEYAQFASQTCEFNMIEQSGPPHEPRFKFQVVINGREFPPAEAGSKKVAKQDAAMKAMTILLEEAKAKDSGKSEESSHYSTEKESEKTAESQTPTPSATSFFSGKSPVTTLLECMHKLGNSCEFRLLSKEGPAHEPKFQYCVAVGAQTFPSVSAPSKKVAKQMAAEEAMKALHGEATNSMASDNQPEGMISESLDNLESMMPNKVRKIGELVRYLNTNPVGGLLEYARSHGFAAEFKLVDQSGPPHEPKFVYQAKVGGRWFPAVCAHSKKQGKQEAADAALRVLIGENEKAERMGFTEVTPVTGASLRRTMLLLSRSPEAQPKTLPLTGSTFHDQIAMLSHRCFNTLTNSFQPSLLGRKILAAIIMKKDSEDMGVVVSLGTGNRCVKGDSLSLKGETVNDCHAEIISRRGFIRFLYSELMKYNSQTAKDSIFEPAKGGEKLQIKKTVSFHLYISTAPCGDGALFDKSCSDRAMESTESRHYPVFENPKQGKLRTKVENGEGTIPVESSDIVPTWDGIRLGERLRTMSCSDKILRWNVLGLQGALLTHFLQPIYLKSVTLGYLFSQGHLTRAICCRVTRDGSAFEDGLRHPFIVNHPKVGRVSIYDSKRQSGKTKETSVNWCLADGYDLEILDGTRGTVDGPRNELSRVSKKNIFLLFKKLCSFRYRRDLLRLSYGEAKKAARDYETAKNYFKKGLKDMGYGNWISKPQEEKNFYLCPV

SEQ ID NO: 17971 - protein, 1200 aa, Homo sapiens
MNPRQGYSLSGYYTHPFQGYEHRQLRYQQPGPGSSPSSFLLKQIEFLKGQLPEAPVIGKQTPSLPPSLPGLRPRFPVLLASSTRGRQVDIRGVPRGVHLRSQGLQRGFQHPSPRGRSLPQRGVDCLSSHFQELSIYQDQEQRILKFLEELGEGKATTAHDLSGKLGTPKKEINRVLYSLAKKGKLQKEAGTPPLWKIAVSTQAWNQHSGVVRPDGHSQGAPNSDPSLEPEDRNSTSVSEDLLEPFIAVSAQAWNQHSGVVRPDSHSQGSPNSDPGLEPEDSNSTSALEDPLEFLDMAEIKEKICDYLFNVSDSSALNLAKNIGLTKARDINAVLIDMERQGDVYRQGTTPPIWHLTDKKRERMQIKRNTNSVPETAPAAIPETKRNAEFLTCNIPTSNASNNMVTTEKVENGQEPVIKLENRQEARPEPARLKPPVHYNGPSKAGYVDFENGQWATDDIPDDLNSIRAAPGEFRAIMEMPSFYSHGLPRCSPYKKLTECQLKNPISGLLEYAQFASQTCEFNMIEQSGPPHEPRFKFQVVINGREFPPAEAGSKKVAKQDAAMKAMTILLEEAKAKDSGKSEESSHYSTEKESEKTAESQTPTPSATSFFSGKSPVTTLLECMHKLGNSCEFRLLSKEGPAHEPKFQYCVAVGAQTFPSVSAPSKKVAKQMAAEEAMKALHGEATNSMASDNQPEGMISESLDNLESMMPNKVRKIGELVRYLNTNPVGGLLEYARSHGFAAEFKLVDQSGPPHEPKFVYQAKVGGRWFPAVCAHSKKQGKQEAADAALRVLIGENEKAERMGFTELPLTGSTFHDQIAMLSHRCFNTLTNSFQPSLLGRKILAAIIMKKDSEDMGVVVSLGTGNRCVKGDSLSLKGETVNDCHAEIISRRGFIRFLYSELMKYNSQTAKDSIFEPAKGGEKLQIKKTVSFHLYISTAPCGDGALFDKSCSDRAMESTESRHYPVFENPKQGKLRTKVENGEGTIPVESSDIVPTWDGIRLGERLRTMSCSDKILRWNVLGLQGALLTHFLQPIYLKSVTLGYLFSQGHLTRAICCRVTRDGSAFEDGLRHPFIVNHPKVGRVSIYDSKRQSGKTKETSVNWCLADGYDLEILDGTRGTVDGPRNELSRVSKKNIFLLFKKLCSFRYRRDLLRLSYGEAKKAARDYETAKNYFKKGLKDMGYGNWISKPQEEKNFYLCPV

SEQ ID NO: 17972 - protein, 1181 aa, Homo sapiens
MNPRQGYSLSGYYTHPFQGYEHRQLRYQQPGPGSSPSSFLLKQIEFLKGQLPEAPVIGKQTPSLPPSLPGLRPRFPVLLASSTRGRQVDIRGVPRGVHLRSQGLQRGFQHPSPRGRSLPQRGVDCLSSHFQELSIYQDQEQRILKFLEELGEGKATTAHDLSGKLGTPKKEINRVLYSLAKKGKLQKEAGTPPLWKIAVSTQAWNQHSGVVRPDGHSQGAPNSDPSLEPEDRNSTSVSEDLLEPFIAVSAQAWNQHSGVVRPDSHSQGSPNSDPGLEPEDSNSTSALEDPLEFLDMAEIKEKICDYLFNVSDSSALNLAKNIGLTKARDINAVLIDMERQGDVYRQGTTPPIWHLTDKKRERMQIKRNTNSVPETAPAAIPETKRNAEFLTCNIPTSNASNNMVTTEKVENGQEPVIKLENRQEARPEPARLKPPVHYNGPSKAGYVDFENGQWATDDIPDDLNSIRAAPGEFRAIMEMPSFYSHGLPRCSPYKKLTECQLKNPISGLLEYAQFASQTCEFNMIEQSGPPHEPRFKFQVVINGREFPPAEAGSKKVAKQDAAMKAMTILLEEAKAKDSGKSEESSHYSTEKESEKTAESQTPTPSATSFFSGKSPVTTLLECMHKLGNSCEFRLLSKEGPAHEPKFQYCVAVGAQTFPSVSAPSKKVAKQMAAEEAMKALHGEATNSMASDNQVRKIGELVRYLNTNPVGGLLEYARSHGFAAEFKLVDQSGPPHEPKFVYQAKVGGRWFPAVCAHSKKQGKQEAADAALRVLIGENEKAERMGFTELPLTGSTFHDQIAMLSHRCFNTLTNSFQPSLLGRKILAAIIMKKDSEDMGVVVSLGTGNRCVKGDSLSLKGETVNDCHAEIISRRGFIRFLYSELMKYNSQTAKDSIFEPAKGGEKLQIKKTVSFHLYISTAPCGDGALFDKSCSDRAMESTESRHYPVFENPKQGKLRTKVENGEGTIPVESSDIVPTWDGIRLGERLRTMSCSDKILRWNVLGLQGALLTHFLQPIYLKSVTLGYLFSQGHLTRAICCRVTRDGSAFEDGLRHPFIVNHPKVGRVSIYDSKRQSGKTKETSVNWCLADGYDLEILDGTRGTVDGPRNELSRVSKKNIFLLFKKLCSFRYRRDLLRLSYGEAKKAARDYETAKNYFKKGLKDMGYGNWISKPQEEKNFYLCPV

SEQ ID NO: 17973 - protein, 1269 aa, Homo sapiens
MMSPICDQTIDSRLKVEKATWWGRVGGGSRPHWQPPGVRPCPEEVQDPGYSLSGYYTHPFQGYEHRQLRYQQPGPGSSPSSFLLKQIEFLKGQLPEAPVIGKQTPSLPPSLPGLRPRFPVLLASSTRGRQVDIRGVPRGVHLRSQGLQRGFQHPSPRGRSLPQRGVDCLSSHFQELSIYQDQEQRILKFLEELGEGKATTAHDLSGKLGTPKKEINRVLYSLAKKGKLQKEAGTPPLWKIAVSTQAWNQHSGVVRPDGHSQGAPNSDPSLEPEDRNSTSVSEDLLEPFIAVSAQAWNQHSGVVRPDSHSQGSPNSDPGLEPEDSNSTSALEDPLEFLDMAEIKEKICDYLFNVSDSSALNLAKNIGLTKARDINAVLIDMERQGDVYRQGTTPPIWHLTDKKRERMQIKRNTNSVPETAPAAIPETKRNAEFLTCNIPTSNASNNMVTTEKVENGQEPVIKLENRQEARPEPARLKPPVHYNGPSKAGYVDFENGQWATDDIPDDLNSIRAAPGEFRAIMEMPSFYSHGLPRCSPYKKLTECQLKNPISGLLEYAQFASQTCEFNMIEQSGPPHEPRFKFQVVINGREFPPAEAGSKKVAKQDAAMKAMTILLEEAKAKDSGKSEESSHYSTEKESEKTAESQTPTPSATSFFSGKSPVTTLLECMHKLGNSCEFRLLSKEGPAHEPKFQYCVAVGAQTFPSVSAPSKKVAKQMAAEEAMKALHGEATNSMASDNQPEGMISESLDNLESMMPNKVRKIGELVRYLNTNPVGGLLEYARSHGFAAEFKLVDQSGPPHEPKFVYQAKVGGRWFPAVCAHSKKQGKQEAADAALRVLIGENEKAERMGFTEVTPVTGASLRRTMLLLSRSPEAQPKTLPLTGSTFHDQIAMLSHRCFNTLTNSFQPSLLGRKILAAIIMKKDSEDMGVVVSLGTGNRCVKGDSLSLKGETVNDCHAEIISRRGFIRFLYSELMKYNSQTAKDSIFEPAKGGEKLQIKKTVSFHLYISTAPCGDGALFDKSCSDRAMESTESRHYPVFENPKQGKLRTKVENGEGTIPVESSDIVPTWDGIRLGERLRTMSCSDKILRWNVLGLQGALLTHFLQPIYLKSVTLGYLFSQGHLTRAICCRVTRDGSAFEDGLRHPFIVNHPKVGRVSIYDSKRQSGKTKETSVNWCLADGYDLEILDGTRGTVDGPRNELSRVSKKNIFLLFKKLCSFRYRRDLLRLSYGEAKKAARDYETAKNYFKKGLKDMGYGNWISKPQEEKNFYLCPV

SEQ ID NO: 17974 - protein, 931 aa, Homo sapiens
MAEIKEKICDYLFNVSDSSALNLAKNIGLTKARDINAVLIDMERQGDVYRQGTTPPIWHLTDKKRERMQIKRNTNSVPETAPAAIPETKRNAEFLTCNIPTSNASNNMVTTEKVENGQEPVIKLENRQEARPEPARLKPPVHYNGPSKAGYVDFENGQWATDDIPDDLNSIRAAPGEFRAIMEMPSFYSHGLPRCSPYKKLTECQLKNPISGLLEYAQFASQTCEFNMIEQSGPPHEPRFKFQVVINGREFPPAEAGSKKVAKQDAAMKAMTILLEEAKAKDSGKSEESSHYSTEKESEKTAESQTPTPSATSFFSGKSPVTTLLECMHKLGNSCEFRLLSKEGPAHEPKFQYCVAVGAQTFPSVSAPSKKVAKQMAAEEAMKALHGEATNSMASDNQPEGMISESLDNLESMMPNKVRKIGELVRYLNTNPVGGLLEYARSHGFAAEFKLVDQSGPPHEPKFVYQAKVGGRWFPAVCAHSKKQGKQEAADAALRVLIGENEKAERMGFTEVTPVTGASLRRTMLLLSRSPEAQPKTLPLTGSTFHDQIAMLSHRCFNTLTNSFQPSLLGRKILAAIIMKKDSEDMGVVVSLGTGNRCVKGDSLSLKGETVNDCHAEIISRRGFIRFLYSELMKYNSQTAKDSIFEPAKGGEKLQIKKTVSFHLYISTAPCGDGALFDKSCSDRAMESTESRHYPVFENPKQGKLRTKVENGEGTIPVESSDIVPTWDGIRLGERLRTMSCSDKILRWNVLGLQGALLTHFLQPIYLKSVTLGYLFSQGHLTRAICCRVTRDGSAFEDGLRHPFIVNHPKVGRVSIYDSKRQSGKTKETSVNWCLADGYDLEILDGTRGTVDGPRNELSRVSKKNIFLLFKKLCSFRYRRDLLRLSYGEAKKAARDYETAKNYFKKGLKDMGYGNWISKPQEEKNFYLCPV

SEQ ID NO: 17975 - protein, 204 aa, Homo sapiens
MAEQEPTAEQLAQIAAENEEDEHSVNYKPPAQKSIQEIQELDKDDESLRKYKEALLGRVAVSADPNVPNVVVTGLTLVCSSAPGPLELDLTGDLESFKKQSFVLKEGVEYRIKISFRVNREIVSGMKYIQHTYRKGVKIDKTDYMVGSYGPRAEEYEFLTPVEEAPKGMLARGSYSIKSRFTDDDKTDHLSWEWNLTIKKDWKD

SEQ ID NO: 17976 - protein, 160 aa, Homo sapiens
MAEQEPTAEQLAQIAAENEEDEHSVNYKPPAQKSIQEIQELDKDDESLRKYKEALLGRVAVSADPNVPNVVVTGLTLVCSSAPGPLELDLTGDLESFKKQSFVLKEGVEYRIKISFRVNREIVSGMKYIQHTYRKGVKNDDKTDHLSWEWNLTIKKDWKD

SEQ ID NO: 17977 - protein, 430 aa, Homo sapiens
MSQLRATKSGLVVRAVICIFIFLYLRNPTPAESEEEPAQPEVVECGFYPDELCSALFEGKGAAPQIAKFCKTPHKSEIHAHLHTPGNCSRISRGLHFITRPLSAEEGDFSLAYIITIHKELAMFVQLLRAIYVPQNVYCIHVDEKAPMKYKTAVQTLVNCFENVFISSKTEKVAYAGFTRLQADINCMKVLVHSKFQWNYVINLCGQDFPIKTNREIIHYIRSKWSDKNITPGVIQPLHIKSKTSQSHLEFVPKGSIYAPPNNRFKDKPPHNLTIYFGSAYYVLTRKFVEFILTDIHAKDMLQWSKDIRSPEQHYWVTLNRLKDAPGATPNAGWEGNVRAIKRKSEEGNVHDGCKGRYVEDICVYGPGDLPWLIQSPSLFANKFEPSTDPLVVTCLERRHRLQVLRQAEVPIEPHWHFQQQSHFNMRLNR

SEQ ID NO: 17978 - protein, 99 aa, Homo sapiens
MEPEQMLEGQTQVAENPHSEYGLTDNVERIVENEKINAEKSSKQKVDLQSLPTRAYLDQTVVPILLQGLAVLAKERPPNPIEFLASYLLKNKAQFEDRN

SEQ ID NO: 17979 - protein, 333 aa, Homo sapiens
MPLGLGRRKKAPPLVENEEAEPGRGGLGVGEPGPLGGGGSGGPQMGLPPPPPALRPRLVFHTQLAHGSPTGRIEGFTNVKELYGKIAEAFRLPTAEVMFCTLNTHKVDMDKLLGGQIGLEDFIFAHVKGQRKEVEVFKSEDALGLTITDNGAGYAFIKRIKEGSVIDHIHLISVGDMIEAINGQSLLGCRHYEVARLLKELPRGRTFTLKLTEPRKAFDMISQRSAGGRPGSGPQLGTGRGTLRLRSRGPATVEDLPSAFEEKAIEKVDDLLESYMGIRDTELAATMVELGKDKRNPDELAEALDERLGDFAFPDEFVFDVWGAIGDAKVGRY

SEQ ID NO: 17980 - protein, 236 aa, Homo sapiens
MFCTLNTHKVDMDKLLGGQIGLEDFIFAHVKGQRKEVEVFKSEDALGLTITDNGAGYAFIKRIKEGSVIDHIHLISVGDMIEAINGQSLLGCRHYEVARLLKELPRGRTFTLKLTEPRKAFDMISQRSAGGRPGSGPQLGTGRGTLRLRSRGPATVEDLPSAFEEKAIEKVDDLLESYMGIRDTELAATMVELGKDKRNPDELAEALDERLGDFAFPDEFVFDVWGAIGDAKVGRY

SEQ ID NO: 17981 - protein, 254 aa, Homo sapiens
MILNKALMLGALALTTVMSPCGGEDIVADHVASYGVNLYQSYGPSGQYTHEFDGDEQFYVDLGRKETVWCLPVLRQFRFDPQFALTNIAVLKHNLNSLIKRSNSTAATNEVPEVTVFSKSPVTLGQPNILICLVDNIFPPVVNITWLSNGHSVTEGVSETSFLSKSDHSFFKISYLTLLPSAEESYDCKVEHWGLDKPLLKHWEPEIPAPMSELTETVVCALGLSVGLVGIVVGTVFIIRGLRSVGASRHQGPL

SEQ ID NO: 17982 - protein, 281 aa, Homo sapiens
MHKARLRGHCARAGKSVRLASSGMTRRDPLTNKVALVTASTDWIGFAVAQRLAQDGAHVVVSRRKQQNVDQAVATLQGEGLSMTGTVCHVGKMKDWERLVATAMKLHGVIDILSLSITNSKRGLFWFTLLQTAEEAWDRNLDINGKALALMIKAVVPEMEKRGGGSVGFLASVAAFRPLPGFSPYNVSKTALLGLNKTLAIELAPRNIRVNCLAPGLIKTSFSRMLWMDKEKEESMKETLRIRRLGEPEDSLGIVSFLCSEDASYLTGETVMVGGGTPSRL

SEQ ID NO: 17983 - protein, 419 aa, Homo sapiens
MKNQLRGPPARAHMSTSGAAAAGGTRAGSEPGAGSGSGAGTGAGAATGAGAMPCKSAEWLQEELEARGGASLLLLDCRPHELFESSHIETAINLAIPGLMLRRLRKGNLPIRSIIPNHADKERFATRCKAATVLLYDEATAEWQPEPGAPASVLGLLLQKLRDDGCQAYYLQGGFNKFQTEYSEHCETNVDSSSSPSSSPPTSVLGLGGLRISSDCSDGESDRELPSSATESDGSPVPSSQPAFPVQILPYLYLGCAKDSTNLDVLGKYGIKYILNVTPNLPNAFEHGGEFTYKQIPISDHWSQNLSQFFPEAISFIDEARSKKCGVLVHCLAGISRSVTVTVAYLMQKMNLSLNDAYDFVKRKKSNISPNFNFMGQLLDFERTLGLSSPCDNHASSEQLYFSTPTNHNLFPLNTLEST

SEQ ID NO: 17984 - protein, 368 aa, Homo sapiens
MPCKSAEWLQEELEARGGASLLLLDCRPHELFESSHIETAINLAIPGLMLRRLRKGNLPIRSIIPNHADKERFATRCKAATVLLYDEATAEWQPEPGAPASVLGLLLQKLRDDGCQAYYLQGGFNKFQTEYSEHCETNVDSSSSPSSSPPTSVLGLGGLRISSDCSDGESDRELPSSATESDGSPVPSSQPAFPVQILPYLYLGCAKDSTNLDVLGKYGIKYILNVTPNLPNAFEHGGEFTYKQIPISDHWSQNLSQFFPEAISFIDEARSKKCGVLVHCLAGISRSVTVTVAYLMQKMNLSLNDAYDFVKRKKSNISPNFNFMGQLLDFERTLGLSSPCDNHASSEQLYFSTPTNHNLFPLNTLEST

SEQ ID NO: 17985 - protein, 266 aa, Homo sapiens
MWWFQQGLSFLPSALVIWTSAAFIFSYITAVTLHHIDPALPYISDTGTVAPEKCLFGAMLNIAAVLCIATIYVRYKQVHALSPEENVIIKLNKAGLVLGILSCLGLSIVANFQKTTLFAAHVSGAVLTFGMGSLYMFVQTILSYQMQPKIHGKQVFWIRLLLVIWCGVSALSMLTCSSVLHSGNFGTDLEQKLHWNPEDKGYVLHMITTAAEWSMSFSFFGFFLTYIRDFQKISLRVEANLHGLTLYDTAPCPINNERTRLLSRDI

SEQ ID NO: 17986 - protein, 2590 aa, Homo sapiens
MNLLRRSGKRRRSESGSDSFSGSGGDSSASPQFLSGSVLSPPPGLGRCLKAAAAGECKPTVPDYERDKLLLANWGLPKAVLEKYHSFGVKKMFEWQAECLLLGQVLEGKNLVYSAPTSAGKTLVAELLILKRVLEMRKKALFILPFVSVAKEKKYYLQSLFQEVGIKVDGYMGSTSPSRHFSSLDIAVCTIERANGLINRLIEENKMDLLGMVVVDELHMLGDSHRGYLLELLLTKICYITRKSASCQADLASSLSNAVQIVGMSATLPNLELVASWLNAELYHTDFRPVPLLESVKVGNSIYDSSMKLVREFEPMLQVKGDEDHVVSLCYETICDNHSVLLFCPSKKWCEKLADIIAREFYNLHHQAEGLVKPSECPPVILEQKELLEVMDQLRRLPSGLDSVLQKTVPWGVAFHHAGLTFEERDIIEGAFRQGLIRVLAATSTLSSGVNLPARRVIIRTPIFGGRPLDILTYKQMVGRAGRKGVDTVGESILICKNSEKSKGIALLQGSLKPVRSCLQRREGEEVTGSMIRAILEIIVGGVASTSQDMHTYAACTFLAASMKEGKQGIQRNQESVQLGAIEACVMWLLENEFIQSTEASDGTEGKVYHPTHLGSATLSSSLSPADTLDIFADLQRAMKGFVLENDLHILYLVTPMFEDWTTIDWYRFFCLWEKLPTSMKRVAELVGVEEGFLARCVKGKVVARTERQHRQMAIHKRFFTSLVLLDLISEVPLREINQKYGCNRGQIQSLQQSAAVYAGMITVFSNRLGWHNMELLLSQFQKRLTFGIQRELCDLVRVSLLNAQRARVLYASGFHTVADLARANIVEVEVILKNAVPFKSARKAVDEEEEAVEERRNMRTIWVTGRKGLTEREAAALIVEEARMILQQDLVEMGVQWNPCALLHSSTCSLTHSESEVKEHTFISQTKSSYKKLTSKNKSNTIFSDSYIKHSPNIVQDLNKSREHTSSFNCNFQNGNQEHQTCSIFRARKRASLDINKEKPGASQNEGKTSDKKVVQTFSQKTKKAPLNFNSEKMSRSFRSWKRRKHLKRSRDSSPLKDSGACRIHLQGQTLSNPSLCEDPFTLDEKKTEFRNSGPFAKNVSLSGKEKDNKTSFPLQIKQNCSWNITLTNDNFVEHIVTGSQSKNVTCQATSVVSEKGRGVAVEAEKINEVLIQNGSKNQNVYMKHHDIHPINQYLRKQSHEQTSTITKQKNIIERQMPCEAVSSYINRDSNVTINCERIKLNTEENKPSHFQALGDDISRTVIPSEVLPSAGAFSKSEGQHENFLNISRLQEKTGTYTTNKTKNNHVSDLGLVLCDFEDSFYLDTQSEKIIQQMATENAKLGAKDTNLAAGIMQKSLVQQNSMNSFQKECHIPFPAEQHPLGATKIDHLDLKTVGTMKQSSDSHGVDILTPESPIFHSPILLEENGLFLKKNEVSVTDSQLNSFLQGYQTQETVKPVILLIPQKRTPTGVEGECLPVPETSLNMSDSLLFDSFSDDYLVKEQLPDMQMKEPLPSEVTSNHFSDSLCLQEDLIKKSNVNENQDTHQQLTCSNDESIIFSEMDSVQMVEALDNVDIFPVQEKNHTVVSPRALELSDPVLDEHHQGDQDGGDQDERAEKSKLTGTRQNHSFIWSGASFDLSPGLQRILDKVSSPLENEKLKSMTINFSSLNRKNTELNEEQEVISNLETKQVQGISFSSNNEVKSKIEMLENNANHDETSSLLPRKESNIVDDNGLIPPTPIPTSASKLTFPGILETPVNPWKTNNVLQPGESYLFGSPSDIKNHDLSPGSRNGFKDNSPISDTSFSLQLSQDGLQLTPASSSSESLSIIDVASDQNLFQTFIKEWRCKKRFSISLACEKIRSLTSSKTATIGSRFKQASSPQEIPIRDDGFPIKGCDDTLVVGLAVCWGGRDAYYFSLQKEQKHSEISASLVPPSLDPSLTLKDRMWYLQSCLRKESDKECSVVIYDFIQSYKILLLSCGISLEQSYEDPKVACWLLDPDSQEPTLHSIVTSFLPHELPLLEGMETSQGIQSLGLNAGSEHSGRYRASVESILIFNSMNQLNSLLQKENLQDVFRKVEMPSQYCLALLELNGIGFSTAECESQKHIMQAKLDAIETQAYQLAGHSFSFTSSDDIAEVLFLELKLPPNREMKNQGSKKTLGSTRRGIDNGRKLRLGRQFSTSKDVLNKLKALHPLPGLILEWRRITNAITKVVFPLQREKCLNPFLGMERIYPVSQSHTATGRITFTEPNIQNVPRDFEIKMPTLVGESPPSQAVGKGLLPMGRGKYKKGFSVNPRCQAQMEERAADRGMPFSISMRHAFVPFPGGSILAADYSQLELRILAHLSHDRRLIQVLNTGADVFRSIAAEWKMIEPESVGDDLRQQAKQICYGIIYGMGAKSLGEQMGIKENDAACYIDSFKSRYTGINQFMTETVKNCKRDGFVQTILGRRRYLPGIKDNNPYRKAHAERQAINTIVQGSAADIVKIATVNIQKQLETFHSTFKSHGHREGMLQSDQTGLSRKRKLQGMFCPIRGGFFILQLHDELLYEVAEEDVVQVAQIVKNEMESAVKLSVKLKVKVKIGASWGELKDFDV

SEQ ID NO: 17987 - protein, 1762 aa, Homo sapiens
MNSFLSFPISLCSARKAVDEEEEAVEERRNMRTIWVTGRKGLTEREAAALIVEEARMILQQDLVEMGVQWNPCALLHSSTCSLTHSESEVKEHTFISQTKSSYKKLTSKNKSNTIFSDSYIKHSPNIVQDLNKSREHTSSFNCNFQNGNQEHQTCSIFRARKRASLDINKEKPGASQNEGKTSDKKVVQTFSQKTKKAPLNFNSEKMSRSFRSWKRRKHLKRSRDSSPLKDSGACRIHLQGQTLSNPSLCEDPFTLDEKKTEFRNSGPFAKNVSLSGKEKDNKTSFPLQIKQNCSWNITLTNDNFVEHIVTGSQSKNVTCQATSVVSEKGRGVAVEAEKINEVLIQNGSKNQNVYMKHHDIHPINQYLRKQSHEQTSTITKQKNIIERQMPCEAVSSYINRDSNVTINCERIKLNTEENKPSHFQALGDDISRTVIPSEVLPSAGAFSKSEGQHENFLNISRLQEKTGTYTTNKTKNNHVSDLGLVLCDFEDSFYLDTQSEKIIQQMATENAKLGAKDTNLAAGIMQKSLVQQNSMNSFQKECHIPFPAEQHPLGATKIDHLDLKTVGTMKQSSDSHGVDILTPESPIFHSPILLEENGLFLKKNEVSVTDSQLNSFLQGYQTQETVKPVILLIPQKRTPTGVEGECLPVPETSLNMSDSLLFDSFSDDYLVKEQLPDMQMKEPLPSEVTSNHFSDSLCLQEDLIKKSNVNENQDTHQQLTCSNDESIIFSEMDSVQMVEALDNVDIFPVQEKNHTVVSPRALELSDPVLDEHHQGDQDGGDQDERAEKSKLTGTRQNHSFIWSGASFDLSPGLQRILDKVSSPLENEKLKSMTINFSSLNRKNTELNEEQEVISNLETKQVQGISFSSNNEVKSKIEMLENNANHDETSSLLPRKESNIVDDNGLIPPTPIPTSASKLTFPGILETPVNPWKTNNVLQPGESYLFGSPSDIKNHDLSPGSRNGFKDNSPISDTSFSLQLSQDGLQLTPASSSSESLSIIDVASDQNLFQTFIKEWRCKKRFSISLACEKIRSLTSSKTATIGSRFKQASSPQEIPIRDDGFPIKGCDDTLVVGLAVCWGGRDAYYFSLQKEQKHSEISASLVPPSLDPSLTLKDRMWYLQSCLRKESDKECSVVIYDFIQSYKILLLSCGISLEQSYEDPKVACWLLDPDSQEPTLHSIVTSFLPHELPLLEGMETSQGIQSLGLNAGSEHSGRYRASVESILIFNSMNQLNSLLQKENLQDVFRKVEMPSQYCLALLELNGIGFSTAECESQKHIMQAKLDAIETQAYQLAGHSFSFTSSDDIAEVLFLELKLPPNREMKNQGSKKTLGSTRRGIDNGRKLRLGRQFSTSKDVLNKLKALHPLPGLILEWRRITNAITKVVFPLQREKCLNPFLGMERIYPVSQSHTATGRITFTEPNIQNVPRDFEIKMPTLVGESPPSQAVGKGLLPMGRGKYKKGFSVNPRCQAQMEERAADRGMPFSISMRHAFVPFPGGSILAADYSQLELRILAHLSHDRRLIQVLNTGADVFRSIAAEWKMIEPESVGDDLRQQAKQICYGIIYGMGAKSLGEQMGIKENDAACYIDSFKSRYTGINQFMTETVKNCKRDGFVQTILGRRRYLPGIKDNNPYRKAHAERQAINTIVQGSAADIVKIATVNIQKQLETFHSTFKSHGHREGMLQSDQTGLSRKRKLQGMFCPIRGGFFILQLHDELLYEVAEEDVVQVAQIVKNEMESAVKLSVKLKVKVKIGASWGELKDFDV

SEQ ID NO: 17988 - protein, 4471 aa, Homo sapiens
MVPEEVEVEIDEIPVLSEEGEEEEETYSQKVESVDKVRAKRVSLRTESLGQPLNREDEEMDKEISEKLPSKRTAKHIMEKMHLHMLCTPLPEEFLDQNVVFFLRNTKEAISEATDMKEAMEIMPETLEYGIINANVLHFLKNIICQVFLPALSFNQHRTSTTVGVTSGEVSNSSEHESDLPPMPGEAVEYHSIQLIRDEFLMNVQKFASNIQRTMQQLEGEIKLEMPIISVEGEVSDLAADPETVDILEQCVINWLNQISTAVEAQLKKTPQGKGPLAEIEFWRERNATLSALHEQTKLPIVRKVLDVIKESDSMLVANLQPVFTELFKFHTEASDNVRFLSTVERYFKNITHGSGFHVVLDTIPAMMSALRMVWIISRHYNKDERMIPLMERIAWEIAERVCRVVNLRTLFKENRASAQSKTLEARNTLRLWKKAYFDTRAKIEASGREDRWEFDRKRLFERTDYMATICQDLSDVLQILEEFYNIFGPELKAVTGDPKRIDDVLCRVDGLVTPMENLTFDPFSIKSSQFWKYVMDEFKIEVLIDIINKIFVQNLENPPLYKNHPPVAGAIYWERSLFFRIKHTILRFQEVQEILDSDRGQEVKQKYLEVGRTMKEYEDRKYEQWMEVTEQVLPALMKKSLLTKSSIATEEPSTLERGAVFAINFSPALREIINETKYLEQLGFTVPELARNVALQEDKFLRYTAGIQRMLDHYHMLIGTLNDAESVLLKDHSQELLRVFRSGYKRLNWNSLGIGDYITGCKQAIGKFESLVHQIHKNADDISSRLTLIEAINLFKYPAAKSEEELPGVKEFFEHIERERASDVDHMVRWYLAIGPLLTKVEGLVVHTNTGKAPKLASYYKYWEKKIYEVLTKLILKNLQSFNSLILGNVPLFHTETILTAPEIILHPNTNEIDKMCFHCVRNCVEITKHFVRWMNGSCIECPPQKGEEEEVVIINFYNDISLNPQIIEQAVMIPQNVHRILINLMKYLQKWKRYRPLWKLDKAIVMEKFAAKKPPCVAYDEKLQFYSKIAYEVMRHPLIKDEHCIRLQLRHLANTVQENAKSWVISLGKLLNESAKEELYNLHEEMEHLAKNLRKIPNTLEDLKFVLATIAEIRSKSLVMELRYRDVQERYRTMAMYNLFPPDAEKELVDKIESIWSNLFNDSVNVEHALGDIKRTFTELTRGEIMNYRVQIEEFAKRFYSEGPGSVGDDLDKGVELLGVYERELARHEKSRQELANAEKLFDLPITMYPELLKVQKEMSGLRMIYELYEGLKVAKEEWSQTLWINLNVQILQEGIEGFLRALRKLPRPVRGLSVTYYLEAKMKAFKDSIPLLLDLKNEALRDRHWKELMEKTSVFFEMTETFTLENMFAMELHKHTDVLNEIVTAAIKEVAIEKAVKEILDTWENMKFTVVKYCKGTQERGYILGSVDEIIQSLDDNTFNLQSISGSRFVGPFLQTVHKWEKTLSLIGEVIEIWMLVQRKWMYLESIFIGGDIRSQLPEEAKKFDNIDKVFKRIMGETLKDPVIKRCCEAPNRLSDLQNVSEGLEKCQKSLNDYLDSKRNAFPRFFFISDDELLSILGSSDPLCVQEHMIKMYDNIASLRFNDGDSGEKLVSAMISAEGEVMEFRKILRAEGRVEDWMTAVLNEMRRTNRLITKEAIFRYCEDRSRVDWMLLYQGMVVLAASQVWWTWEVEDVFHKAQKGEKQAMKNYGRKMHRQIDELVTRITMPLSKNDRKKYNTVLIIDVHARDIVDSFIRGSILEAREFDWESQLRFYWDREPDELNIRQCTGTFGYGYEYMGLNGRLVITPLTDRIYLTLTQALSMYLGGAPAGPAGTGKTETTKDLAKALGLLCVVTNCGEGMDYRAVGKIFSGLAQCGAWGCFDEFNRIDASVLSVISSQIQTIRNALIHQLTTFQFEGQEISLDSRMGIFITMNPGYAGRTELPESVKALFRPVVVIVPDLQQICEIMLFSEGFLEAKTLAKKMTVLYKLAREQLSKQYHYDFGLRALKSVLVMAGELKRGSSDLREDVVLMRALRDMNLPKFVFEDVPLFLGLISDLFPGLDCPRVRYPDFNDAVEQVLEENGYAVLPIQVDKVVQMFETMLTRHTTMVVGPTRGGKSVVINTLCQAQTKLGLTTKLYILNPKAVSVIELYGILDPTTRDWTDGVLSNIFREINKPTDKKERKYILFDGDVDALWVENMNSVMDDNRLLTLANGERIRLQAHCALLFEVGDLQYASPATVSRCGMVYVDPKNLKYRPYWKKWVNQIPNKVEQYNLNSLFEKYVPYLMDVIVEGIVDGRQAEKLKTIVPQTDLNMVTQLAKMLDALLEGEIEDLDLLECYFLEALYCSLGASLLEDGRMKFDEYIKRLASLSTVDTEGVWANPGELPGQLPTLYDFHFDNKRNQWVPWSKLVPEYIHAPERKFINILVHTVDTTRTTWILEQMVKIKQPVIFVGESGTSKTATTQNFLKNLSEETNIVLMVNFSSRTTSMDIQRNLEANVEKRTKDTYGPPMGKRLLVFMDDMNMPRVDEYGTQQPIALLKLLLEKGYLYDRGKELNCKSIRDLGFIAAMGKAGGGRNEVDPRFISLFSVFNVPFPSEESLHLIYSSILKGHTSTFHESIVAVSGKLTFCTLALYKNIVQDLPPTPSKFHYIFNLRDLSRVFNGLVLTNPERFQTVAQMVRVWRNECLRVFHDRLISETDKQLVQQHIGSLVVEHFKDDVEVVMRDPILFGDFQMALHEGEPRIYEDIQDYEAAKALFQEILEEYNESNTKMNLVLFDDALEHLTRVHRIIRMDRGHALLVGVGGSGKQSLSRLAAFTASCEVFEILLSRGYSENSFREDLKSLYLKLGIENKAMIFLFTDAHVAEEGFLELINNMLTSGIVPALFSEEEKESILSQIGQEALKQGMGPAKESVWQYFVNKSANNLHIVLGMSPVGDTLRTWCRNFPGMVNNTGIDWFMPWPPQALHAVAKSFLGYNPMIPAENIENVVKHVVLVHQSVDHYSQQFLQKLRRSNYVTPKNYLDFINTYSKLLDEKTQCNIAQCKRLDGGLDKLKEATIQLDELNQKLAEQKIVLAEKSAACEALLEEIAVNTAVAEEKKKLAEEKAMEIEEQNKVIAMEKAEAETTLAEVMPILEAAKLELQKLDKSDVTEIRSFAKPPKQVQTVCECILIMKGYKELNWKTAKGVMSDPNFLRSLMEIDFDSITQSQVKNIKGLLKTLNTTTEEMEAVSKAGLGMLKFVEAVMGYCDVFREIKPKREKVARLERNFYLTKRELERIQNELAAIQKELETLGAKYEAAILEKQKLQEEAEIMERRLIAADKLISGLGSENIRWLNDLDELMHRRVKLLGDCLLCAAFLSYEGAFTWEFRDEMVNRIWQNDILEREIPLSQPFRLESLLTDDVEISRWGSQGLPPDELSVQNGILTTRASRFPLCIDPQQQALNWIKRKEEKNNLRVASFNDPDFLKQLEMSIKYGTPFLFRDVDEYIDPVIDNVLEKNIKVSQGRQFIILGDKEVDYDSNFRLYLNTKLANPRYSPSVFGKAMVINYTVTLKGLEDQLLSVLVAYERRELEEQREHLIQETSENKNLLKDLEDSLLRELATSTGNMLDNVDLVHTLEETKSKATEVSEKLKLAEKTALDIDRLRDGYRPAARRGAILFFVLSEMALVNSMYQYSLIAFLEVFRLSLKKSLPDSILMKRLRNIMDTLTFSIYNHGCTGLFERHKLLFSFNMTIKIEQAEGRVPQEELDFFLKGNISLEKSKRKKPCAWLSDQGWEDIILLSEMFSDNFGQLPDDVENNQTVWQEWYDLDSLEQFPVPLGYDNNITPFQKLLILRCFRVDRVYRAVTDYVTVTMGEKYVQPPMISFEAIFEQSTPHSPIVFILSPGSDPATDLMKLAERSGFGGNRLKFLAMGQGQEKVALQLLETAVARGQWLMLQNCHLLVKWLKDLEKSLERITKPHPDFRLWLTTDPTKGFPIGILQKSLKVVTEPPNGLKLNMRATYFKISHEMLDQCPHPAFKPLVYVLAFFHAVVQERRKFGKIGWNVYYDFNESDFQVCMEILNTYLTKAFQQRDPRIPWGSLKYLIGEVMYGGRAIDSFDRRILTIYMDEYLGDFIFDTFQPFHFFRNKEVDYKIPVGDEKEKFVEAIEALPLANTPEVFGLHPNAEIGYYTQAARDMWAHLLELQPQTGESSSGISRDDYIGQVAKEIENKMPKVFDLDQVRKRLGTGLSPTSVVLLQELERFNKLVVRMTKSLAELQRALAGEVGMSNELDDVARSLFIGHIPNIWRRLAPDTLKSLGNWMVYFLRRFSQYMLWVTESEPSVMWLSGLHIPESYLTALVQATCRKNGWPLDRSTLFTQVTKFQDADEVNERAGQGCFVSGLYLEGADWDIEKGCLIKSKPKVLVVDLPILKIIPIEAHRLKLQNTFRTPVYTTSMRRNAMGVGLVFEADLFTTRHISHWVLQGVCLTLNSD

SEQ ID NO: 17989 - protein, 1095 aa, Homo sapiens
MVPEEVEVEIDEIPVLSEEGEEEEETYSQKVESVDKVRAKRVSLRTESLGQPLNREDEEMDKEISEKLPSKRTAKHIMEKMHLHMLCTPLPEEFLDQNVVFFLRNTKEAISEATDMKEAMEIMPETLEYGIINANVLHFLKNIICQVFLPALSFNQHRTSTTVGVTSGEVSNSSEHESDLPPMPGEAVEYHSIQLIRDEFLMNVQKFASNIQRTMQQLEGEIKLEMPIISVEGEVSDLAADPETVDILEQCVINWLNQISTAVEAQLKKTPQGKGPLAEIEFWRERNATLSALHEQTKLPIVRKVLDVIKESDSMLVANLQPVFTELFKFHTEASDNVRFLSTVERYFKNITHGSGFHVVLDTIPAMMSALRMVWIISRHYNKDERMIPLMERIAWEIAERVCRVVNLRTLFKENRASAQSKTLEARNTLRLWKKAYFDTRAKIEASGREDRWEFDRKRLFERTDYMATICQDLSDVLQILEEFYNIFGPELKAVTGDPKRIDDVLCRVDGLVTPMENLTFDPFSIKSSQFWKYVMDEFKIEVLIDIINKIFVQNLENPPLYKNHPPVAGAIYWERSLFFRIKHTILRFQEVQEILDSDRGQEVKQKYLEVGRTMKEYEDRKYEQWMEVTEQVLPALMKKSLLTKSSIATEEPSTLERGAVFAINFSPALREIINETKYLEQLGFTVPELARNVALQEDKFLRYTAGIQRMLDHYHMLIGTLNDAESVLLKDHSQELLRVFRSGYKRLNWNSLGIGDYITGCKQAIGKFESLVHQIHKNADDISSRLTLIEAINLFKYPAAKSEEELPGVKEFFEHIERERASDVDHMVRWYLAIGPLLTKVEGLVVHTNTGKAPKLASYYKYWEKKIYEVLTKLILKNLQSFNSLILGNVPLFHTETILTAPEIILHPNTNEIDKMCFHCVRNCVEITKHFVRWMNGSCIECPPQKGEEEEVVIINFYNDISLNPQIIEQAVMIPQNVHRILINLMKYLQKWKRYRPLWKLDKAIVMEKFAAKKPPCVAYDEKLQFYSKIAYEVMRHPLIKDEHCIRLQLRHLANTVQENAKSWVISLGKLLNESAKEELYNLHEEMEVLNRCV

SEQ ID NO: 17990 - protein, 777 aa, Homo sapiens
MDSKESLTPGREENPSSVLAQERGDVMDFYKTLRGGATVKVSASSPSLAVASQSDSKQRRLLVDFPKGSVSNAQQPDLSKAVSLSMGLYMGETETKVMGNDLGFPQQGQISLSSGETDLKLLEESIANLNRSTSVPENPKSSASTAVSAAPTEKEFPKTHSDVSSEQQHLKGQTGTNGGNVKLYTTDQSTFDILQDLEFSSGSPGKETNESPWRSDLLIDENCLLSPLAGEDDSFLLEGNSNEDCKPLILPDTKPKIKDNGDLVLSSPSNVTLPQVKTEKEDFIELCTPGVIKQEKLGTVYCQASFPGANIIGNKMSAISVHGVSTSGGQMYHYDMNTASLSQQQDQKPIFNVIPPIPVGSENWNRCQGSGDDNLTSLGTLNFPGRTVFSNGYSSPSMRPDVSSPPSSSSTATTGPPPKLCLVCSDEASGCHYGVLTCGSCKVFFKRAVEGQHNYLCAGRNDCIIDKIRRKNCPACRYRKCLQAGMNLEARKTKKKIKGIQQATTGVSQETSENPGNKTIVPATLPQLTPTLVSLLEVIEPEVLYAGYDSSVPDSTWRIMTTLNMLGGRQVIAAVKWAKAIPGFRNLHLDDQMTLLQYSWMFLMAFALGWRSYRQSSANLLCFAPDLIINEQRMTLPCMYDQCKHMLYVSSELHRLQVSYEEYLCMKTLLLLSSVPKDGLKSQELFDEIRMTYIKELGKAIVKREGNSSQNWQRFYQLTKLLDSMHEVVENLLNYCFQTFLDKTMSIEFPEMLAEIITNQIPKYSNGNIKKLLFHQK

SEQ ID NO: 17991 - protein, 742 aa, Homo sapiens
MDSKESLTPGREENPSSVLAQERGDVMDFYKTLRGGATVKVSASSPSLAVASQSDSKQRRLLVDFPKGSVSNAQQPDLSKAVSLSMGLYMGETETKVMGNDLGFPQQGQISLSSGETDLKLLEESIANLNRSTSVPENPKSSASTAVSAAPTEKEFPKTHSDVSSEQQHLKGQTGTNGGNVKLYTTDQSTFDILQDLEFSSGSPGKETNESPWRSDLLIDENCLLSPLAGEDDSFLLEGNSNEDCKPLILPDTKPKIKDNGDLVLSSPSNVTLPQVKTEKEDFIELCTPGVIKQEKLGTVYCQASFPGANIIGNKMSAISVHGVSTSGGQMYHYDMNTASLSQQQDQKPIFNVIPPIPVGSENWNRCQGSGDDNLTSLGTLNFPGRTVFSNGYSSPSMRPDVSSPPSSSSTATTGPPPKLCLVCSDEASGCHYGVLTCGSCKVFFKRAVEGQHNYLCAGRNDCIIDKIRRKNCPACRYRKCLQAGMNLEARKTKKKIKGIQQATTGVSQETSENPGNKTIVPATLPQLTPTLVSLLEVIEPEVLYAGYDSSVPDSTWRIMTTLNMLGGRQVIAAVKWAKAIPGFRNLHLDDQMTLLQYSWMFLMAFALGWRSYRQSSANLLCFAPDLIINEQRMTLPCMYDQCKHMLYVSSELHRLQVSYEEYLCMKTLLLLSSVPKDGLKSQELFDEIRMTYIKELGKAIVKREGNSSQNWQRFYQLTKLLDSMHENVMWLKPESTSHTLI

SEQ ID NO: 17992 - protein, 778 aa, Homo sapiens
MDSKESLTPGREENPSSVLAQERGDVMDFYKTLRGGATVKVSASSPSLAVASQSDSKQRRLLVDFPKGSVSNAQQPDLSKAVSLSMGLYMGETETKVMGNDLGFPQQGQISLSSGETDLKLLEESIANLNRSTSVPENPKSSASTAVSAAPTEKEFPKTHSDVSSEQQHLKGQTGTNGGNVKLYTTDQSTFDILQDLEFSSGSPGKETNESPWRSDLLIDENCLLSPLAGEDDSFLLEGNSNEDCKPLILPDTKPKIKDNGDLVLSSPSNVTLPQVKTEKEDFIELCTPGVIKQEKLGTVYCQASFPGANIIGNKMSAISVHGVSTSGGQMYHYDMNTASLSQQQDQKPIFNVIPPIPVGSENWNRCQGSGDDNLTSLGTLNFPGRTVFSNGYSSPSMRPDVSSPPSSSSTATTGPPPKLCLVCSDEASGCHYGVLTCGSCKVFFKRAVEGRQHNYLCAGRNDCIIDKIRRKNCPACRYRKCLQAGMNLEARKTKKKIKGIQQATTGVSQETSENPGNKTIVPATLPQLTPTLVSLLEVIEPEVLYAGYDSSVPDSTWRIMTTLNMLGGRQVIAAVKWAKAIPGFRNLHLDDQMTLLQYSWMFLMAFALGWRSYRQSSANLLCFAPDLIINEQRMTLPCMYDQCKHMLYVSSELHRLQVSYEEYLCMKTLLLLSSVPKDGLKSQELFDEIRMTYIKELGKAIVKREGNSSQNWQRFYQLTKLLDSMHEVVENLLNYCFQTFLDKTMSIEFPEMLAEIITNQIPKYSNGNIKKLLFHQK

SEQ ID NO: 17993 - protein, 743 aa, Homo sapiens
MDSKESLTPGREENPSSVLAQERGDVMDFYKTLRGGATVKVSASSPSLAVASQSDSKQRRLLVDFPKGSVSNAQQPDLSKAVSLSMGLYMGETETKVMGNDLGFPQQGQISLSSGETDLKLLEESIANLNRSTSVPENPKSSASTAVSAAPTEKEFPKTHSDVSSEQQHLKGQTGTNGGNVKLYTTDQSTFDILQDLEFSSGSPGKETNESPWRSDLLIDENCLLSPLAGEDDSFLLEGNSNEDCKPLILPDTKPKIKDNGDLVLSSPSNVTLPQVKTEKEDFIELCTPGVIKQEKLGTVYCQASFPGANIIGNKMSAISVHGVSTSGGQMYHYDMNTASLSQQQDQKPIFNVIPPIPVGSENWNRCQGSGDDNLTSLGTLNFPGRTVFSNGYSSPSMRPDVSSPPSSSSTATTGPPPKLCLVCSDEASGCHYGVLTCGSCKVFFKRAVEGRQHNYLCAGRNDCIIDKIRRKNCPACRYRKCLQAGMNLEARKTKKKIKGIQQATTGVSQETSENPGNKTIVPATLPQLTPTLVSLLEVIEPEVLYAGYDSSVPDSTWRIMTTLNMLGGRQVIAAVKWAKAIPGFRNLHLDDQMTLLQYSWMFLMAFALGWRSYRQSSANLLCFAPDLIINEQRMTLPCMYDQCKHMLYVSSELHRLQVSYEEYLCMKTLLLLSSVPKDGLKSQELFDEIRMTYIKELGKAIVKREGNSSQNWQRFYQLTKLLDSMHENVMWLKPESTSHTLI

SEQ ID NO: 17994 - protein, 593 aa, Homo sapiens
MDSKESLTPGREENPSSVLAQERGDVMDFYKTLRGGATVKVSASSPSLAVASQSDSKQRRLLVDFPKGSVSNAQQPDLSKAVSLSMGLYMGETETKVMGNDLGFPQQGQISLSSGETDLKLLEESIANLNRSTSVPENPKSSASTAVSAAPTEKEFPKTHSDVSSEQQHLKGQTGTNGGNVKLYTTDQSTFDILQDLEFSSGSPGKETNESPWRSDLLIDENCLLSPLAGEDDSFLLEGNSNEDCKPLILPDTKPKIKDNGDLVLSSPSNVTLPQVKTEKEDFIELCTPGVIKQEKLGTVYCQASFPGANIIGNKMSAISVHGVSTSGGQMYHYDMNTASLSQQQDQKPIFNVIPPIPVGSENWNRCQGSGDDNLTSLGTLNFPGRTVFSNGYSSPSMRPDVSSPPSSSSTATTGPPPKLCLVCSDEASGCHYGVLTCGSCKVFFKRAVEGQHNYLCAGRNDCIIDKIRRKNCPACRYRKCLQAGMNLEAVPKDGLKSQELFDEIRMTYIKELGKAIVKREGNSSQNWQRFYQLTKLLDSMHEVVENLLNYCFQTFLDKTMSIEFPEMLAEIITNQIPKYSNGNIKKLLFHQK

SEQ ID NO: 17995 - protein, 558 aa, Homo sapiens
MDSKESLTPGREENPSSVLAQERGDVMDFYKTLRGGATVKVSASSPSLAVASQSDSKQRRLLVDFPKGSVSNAQQPDLSKAVSLSMGLYMGETETKVMGNDLGFPQQGQISLSSGETDLKLLEESIANLNRSTSVPENPKSSASTAVSAAPTEKEFPKTHSDVSSEQQHLKGQTGTNGGNVKLYTTDQSTFDILQDLEFSSGSPGKETNESPWRSDLLIDENCLLSPLAGEDDSFLLEGNSNEDCKPLILPDTKPKIKDNGDLVLSSPSNVTLPQVKTEKEDFIELCTPGVIKQEKLGTVYCQASFPGANIIGNKMSAISVHGVSTSGGQMYHYDMNTASLSQQQDQKPIFNVIPPIPVGSENWNRCQGSGDDNLTSLGTLNFPGRTVFSNGYSSPSMRPDVSSPPSSSSTATTGPPPKLCLVCSDEASGCHYGVLTCGSCKVFFKRAVEGQHNYLCAGRNDCIIDKIRRKNCPACRYRKCLQAGMNLEAVPKDGLKSQELFDEIRMTYIKELGKAIVKREGNSSQNWQRFYQLTKLLDSMHENVMWLKPESTSHTLI

SEQ ID NO: 17996 - protein, 751 aa, Homo sapiens
MDFYKTLRGGATVKVSASSPSLAVASQSDSKQRRLLVDFPKGSVSNAQQPDLSKAVSLSMGLYMGETETKVMGNDLGFPQQGQISLSSGETDLKLLEESIANLNRSTSVPENPKSSASTAVSAAPTEKEFPKTHSDVSSEQQHLKGQTGTNGGNVKLYTTDQSTFDILQDLEFSSGSPGKETNESPWRSDLLIDENCLLSPLAGEDDSFLLEGNSNEDCKPLILPDTKPKIKDNGDLVLSSPSNVTLPQVKTEKEDFIELCTPGVIKQEKLGTVYCQASFPGANIIGNKMSAISVHGVSTSGGQMYHYDMNTASLSQQQDQKPIFNVIPPIPVGSENWNRCQGSGDDNLTSLGTLNFPGRTVFSNGYSSPSMRPDVSSPPSSSSTATTGPPPKLCLVCSDEASGCHYGVLTCGSCKVFFKRAVEGQHNYLCAGRNDCIIDKIRRKNCPACRYRKCLQAGMNLEARKTKKKIKGIQQATTGVSQETSENPGNKTIVPATLPQLTPTLVSLLEVIEPEVLYAGYDSSVPDSTWRIMTTLNMLGGRQVIAAVKWAKAIPGFRNLHLDDQMTLLQYSWMFLMAFALGWRSYRQSSANLLCFAPDLIINEQRMTLPCMYDQCKHMLYVSSELHRLQVSYEEYLCMKTLLLLSSVPKDGLKSQELFDEIRMTYIKELGKAIVKREGNSSQNWQRFYQLTKLLDSMHEVVENLLNYCFQTFLDKTMSIEFPEMLAEIITNQIPKYSNGNIKKLLFHQK

SEQ ID NO: 17997 - protein, 716 aa, Homo sapiens
MDFYKTLRGGATVKVSASSPSLAVASQSDSKQRRLLVDFPKGSVSNAQQPDLSKAVSLSMGLYMGETETKVMGNDLGFPQQGQISLSSGETDLKLLEESIANLNRSTSVPENPKSSASTAVSAAPTEKEFPKTHSDVSSEQQHLKGQTGTNGGNVKLYTTDQSTFDILQDLEFSSGSPGKETNESPWRSDLLIDENCLLSPLAGEDDSFLLEGNSNEDCKPLILPDTKPKIKDNGDLVLSSPSNVTLPQVKTEKEDFIELCTPGVIKQEKLGTVYCQASFPGANIIGNKMSAISVHGVSTSGGQMYHYDMNTASLSQQQDQKPIFNVIPPIPVGSENWNRCQGSGDDNLTSLGTLNFPGRTVFSNGYSSPSMRPDVSSPPSSSSTATTGPPPKLCLVCSDEASGCHYGVLTCGSCKVFFKRAVEGQHNYLCAGRNDCIIDKIRRKNCPACRYRKCLQAGMNLEARKTKKKIKGIQQATTGVSQETSENPGNKTIVPATLPQLTPTLVSLLEVIEPEVLYAGYDSSVPDSTWRIMTTLNMLGGRQVIAAVKWAKAIPGFRNLHLDDQMTLLQYSWMFLMAFALGWRSYRQSSANLLCFAPDLIINEQRMTLPCMYDQCKHMLYVSSELHRLQVSYEEYLCMKTLLLLSSVPKDGLKSQELFDEIRMTYIKELGKAIVKREGNSSQNWQRFYQLTKLLDSMHENVMWLKPESTSHTLI

SEQ ID NO: 17998 - protein, 751 aa, Homo sapiens
MDSKESLTPGREENPSSVLAQERGDVMDFYKTLRGGATVKVSASSPSLAVASQSDSKQRRLLVDFPKGSVSNAQQPDLSKAVSLSMGLYMGETETKVMGNDLGFPQQGQISLSSGETDLKLLEESIANLNRSTSVPENPKSSASTAVSAAPTEKEFPKTHSDVSSEQQHLKGQTGTNGGNVKLYTTDQSTFDILQDLEFSSGSPGKETNESPWRSDLLIDENCLLSPLAGEDDSFLLEGNSNEDCKPLILPDTKPKIKDNGDLVLSSPSNVTLPQVKTEKEDFIELCTPGVIKQEKLGTVYCQASFPGANIIASLSQQQDQKPIFNVIPPIPVGSENWNRCQGSGDDNLTSLGTLNFPGRTVFSNGYSSPSMRPDVSSPPSSSSTATTGPPPKLCLVCSDEASGCHYGVLTCGSCKVFFKRAVEGQHNYLCAGRNDCIIDKIRRKNCPACRYRKCLQAGMNLEARKTKKKIKGIQQATTGVSQETSENPGNKTIVPATLPQLTPTLVSLLEVIEPEVLYAGYDSSVPDSTWRIMTTLNMLGGRQVIAAVKWAKAIPGFRNLHLDDQMTLLQYSWMFLMAFALGWRSYRQSSANLLCFAPDLIINEQRMTLPCMYDQCKHMLYVSSELHRLQVSYEEYLCMKTLLLLSSVPKDGLKSQELFDEIRMTYIKELGKAIVKREGNSSQNWQRFYQLTKLLDSMHEVVENLLNYCFQTFLDKTMSIEFPEMLAEIITNQIPKYSNGNIKKLLFHQK

SEQ ID NO: 17999 - protein, 692 aa, Homo sapiens
MGLYMGETETKVMGNDLGFPQQGQISLSSGETDLKLLEESIANLNRSTSVPENPKSSASTAVSAAPTEKEFPKTHSDVSSEQQHLKGQTGTNGGNVKLYTTDQSTFDILQDLEFSSGSPGKETNESPWRSDLLIDENCLLSPLAGEDDSFLLEGNSNEDCKPLILPDTKPKIKDNGDLVLSSPSNVTLPQVKTEKEDFIELCTPGVIKQEKLGTVYCQASFPGANIIGNKMSAISVHGVSTSGGQMYHYDMNTASLSQQQDQKPIFNVIPPIPVGSENWNRCQGSGDDNLTSLGTLNFPGRTVFSNGYSSPSMRPDVSSPPSSSSTATTGPPPKLCLVCSDEASGCHYGVLTCGSCKVFFKRAVEGQHNYLCAGRNDCIIDKIRRKNCPACRYRKCLQAGMNLEARKTKKKIKGIQQATTGVSQETSENPGNKTIVPATLPQLTPTLVSLLEVIEPEVLYAGYDSSVPDSTWRIMTTLNMLGGRQVIAAVKWAKAIPGFRNLHLDDQMTLLQYSWMFLMAFALGWRSYRQSSANLLCFAPDLIINEQRMTLPCMYDQCKHMLYVSSELHRLQVSYEEYLCMKTLLLLSSVPKDGLKSQELFDEIRMTYIKELGKAIVKREGNSSQNWQRFYQLTKLLDSMHEVVENLLNYCFQTFLDKTMSIEFPEMLAEIITNQIPKYSNGNIKKLLFHQK

SEQ ID NO: 18000 - protein, 688 aa, Homo sapiens
MGETETKVMGNDLGFPQQGQISLSSGETDLKLLEESIANLNRSTSVPENPKSSASTAVSAAPTEKEFPKTHSDVSSEQQHLKGQTGTNGGNVKLYTTDQSTFDILQDLEFSSGSPGKETNESPWRSDLLIDENCLLSPLAGEDDSFLLEGNSNEDCKPLILPDTKPKIKDNGDLVLSSPSNVTLPQVKTEKEDFIELCTPGVIKQEKLGTVYCQASFPGANIIGNKMSAISVHGVSTSGGQMYHYDMNTASLSQQQDQKPIFNVIPPIPVGSENWNRCQGSGDDNLTSLGTLNFPGRTVFSNGYSSPSMRPDVSSPPSSSSTATTGPPPKLCLVCSDEASGCHYGVLTCGSCKVFFKRAVEGQHNYLCAGRNDCIIDKIRRKNCPACRYRKCLQAGMNLEARKTKKKIKGIQQATTGVSQETSENPGNKTIVPATLPQLTPTLVSLLEVIEPEVLYAGYDSSVPDSTWRIMTTLNMLGGRQVIAAVKWAKAIPGFRNLHLDDQMTLLQYSWMFLMAFALGWRSYRQSSANLLCFAPDLIINEQRMTLPCMYDQCKHMLYVSSELHRLQVSYEEYLCMKTLLLLSSVPKDGLKSQELFDEIRMTYIKELGKAIVKREGNSSQNWQRFYQLTKLLDSMHEVVENLLNYCFQTFLDKTMSIEFPEMLAEIITNQIPKYSNGNIKKLLFHQK

SEQ ID NO: 18001 - protein, 680 aa, Homo sapiens
MGNDLGFPQQGQISLSSGETDLKLLEESIANLNRSTSVPENPKSSASTAVSAAPTEKEFPKTHSDVSSEQQHLKGQTGTNGGNVKLYTTDQSTFDILQDLEFSSGSPGKETNESPWRSDLLIDENCLLSPLAGEDDSFLLEGNSNEDCKPLILPDTKPKIKDNGDLVLSSPSNVTLPQVKTEKEDFIELCTPGVIKQEKLGTVYCQASFPGANIIGNKMSAISVHGVSTSGGQMYHYDMNTASLSQQQDQKPIFNVIPPIPVGSENWNRCQGSGDDNLTSLGTLNFPGRTVFSNGYSSPSMRPDVSSPPSSSSTATTGPPPKLCLVCSDEASGCHYGVLTCGSCKVFFKRAVEGQHNYLCAGRNDCIIDKIRRKNCPACRYRKCLQAGMNLEARKTKKKIKGIQQATTGVSQETSENPGNKTIVPATLPQLTPTLVSLLEVIEPEVLYAGYDSSVPDSTWRIMTTLNMLGGRQVIAAVKWAKAIPGFRNLHLDDQMTLLQYSWMFLMAFALGWRSYRQSSANLLCFAPDLIINEQRMTLPCMYDQCKHMLYVSSELHRLQVSYEEYLCMKTLLLLSSVPKDGLKSQELFDEIRMTYIKELGKAIVKREGNSSQNWQRFYQLTKLLDSMHEVVENLLNYCFQTFLDKTMSIEFPEMLAEIITNQIPKYSNGNIKKLLFHQK

SEQ ID NO: 18002 - protein, 462 aa, Homo sapiens
MSAISVHGVSTSGGQMYHYDMNTASLSQQQDQKPIFNVIPPIPVGSENWNRCQGSGDDNLTSLGTLNFPGRTVFSNGYSSPSMRPDVSSPPSSSSTATTGPPPKLCLVCSDEASGCHYGVLTCGSCKVFFKRAVEGQHNYLCAGRNDCIIDKIRRKNCPACRYRKCLQAGMNLEARKTKKKIKGIQQATTGVSQETSENPGNKTIVPATLPQLTPTLVSLLEVIEPEVLYAGYDSSVPDSTWRIMTTLNMLGGRQVIAAVKWAKAIPGFRNLHLDDQMTLLQYSWMFLMAFALGWRSYRQSSANLLCFAPDLIINEQRMTLPCMYDQCKHMLYVSSELHRLQVSYEEYLCMKTLLLLSSVPKDGLKSQELFDEIRMTYIKELGKAIVKREGNSSQNWQRFYQLTKLLDSMHEVVENLLNYCFQTFLDKTMSIEFPEMLAEIITNQIPKYSNGNIKKLLFHQK

SEQ ID NO: 18003 - protein, 447 aa, Homo sapiens
MYHYDMNTASLSQQQDQKPIFNVIPPIPVGSENWNRCQGSGDDNLTSLGTLNFPGRTVFSNGYSSPSMRPDVSSPPSSSSTATTGPPPKLCLVCSDEASGCHYGVLTCGSCKVFFKRAVEGQHNYLCAGRNDCIIDKIRRKNCPACRYRKCLQAGMNLEARKTKKKIKGIQQATTGVSQETSENPGNKTIVPATLPQLTPTLVSLLEVIEPEVLYAGYDSSVPDSTWRIMTTLNMLGGRQVIAAVKWAKAIPGFRNLHLDDQMTLLQYSWMFLMAFALGWRSYRQSSANLLCFAPDLIINEQRMTLPCMYDQCKHMLYVSSELHRLQVSYEEYLCMKTLLLLSSVPKDGLKSQELFDEIRMTYIKELGKAIVKREGNSSQNWQRFYQLTKLLDSMHEVVENLLNYCFQTFLDKTMSIEFPEMLAEIITNQIPKYSNGNIKKLLFHQK

SEQ ID NO: 18004 - protein, 442 aa, Homo sapiens
MNTASLSQQQDQKPIFNVIPPIPVGSENWNRCQGSGDDNLTSLGTLNFPGRTVFSNGYSSPSMRPDVSSPPSSSSTATTGPPPKLCLVCSDEASGCHYGVLTCGSCKVFFKRAVEGQHNYLCAGRNDCIIDKIRRKNCPACRYRKCLQAGMNLEARKTKKKIKGIQQATTGVSQETSENPGNKTIVPATLPQLTPTLVSLLEVIEPEVLYAGYDSSVPDSTWRIMTTLNMLGGRQVIAAVKWAKAIPGFRNLHLDDQMTLLQYSWMFLMAFALGWRSYRQSSANLLCFAPDLIINEQRMTLPCMYDQCKHMLYVSSELHRLQVSYEEYLCMKTLLLLSSVPKDGLKSQELFDEIRMTYIKELGKAIVKREGNSSQNWQRFYQLTKLLDSMHEVVENLLNYCFQTFLDKTMSIEFPEMLAEIITNQIPKYSNGNIKKLLFHQK

SEQ ID NO: 18005 - protein, 144 aa, Homo sapiens
MDSEEEEEVPQPMPSIPEDLESQKAMVAFFNSAVASAEEEQARLCGQLKECTASAWLICWPRPRRNLRQQPQPQELGVIPCVGRPTRPCRGPWRSCGRVHRTVPEPEGSAEGGGVHQQAGPGQGRGEGEAAGAGVACGRLQQVA

SEQ ID NO: 18006 - protein, 97 aa, Homo sapiens
MDSEEEEEVPQPMPSIPEDLESQKAMVAFFNSAVASAEEEQARLCGQLKECTASAWLICWPRPRRNLRQQPQPQELGVIPCVGRPTRPCRGPWRSCG

SEQ ID NO: 18007 - protein, 633 aa, Homo sapiens
MESGPKMLAPVCLVENNNEQLLVNQQAIQILEKISQPVVVVAIVGLYRTGKSYLMNHLAGQNHGFPLGSTVQSETKGIWMWCVPHPSKPNHTLVLLDTEGLGDVEKGDPKNDSWIFALAVLLCSTFVYNSMSTINHQALEQLHYVTELTELIKAKSSPRPDGVEDSTEFVSFFPDFLWTVRDFTLELKLNGHPITEDEYLENALKLIQGNNPRVQTSNFPRECIRRFFPKRKCFVFDRPTNDKDLLANIEKVSEKQLDPKFQEQTNIFCSYIFTHARTKTLREGITVTGNRLGTLAVTYVEAINSGAVPCLENAVITLAQRENSAAVQRAADYYSQQMAQRVKLPTDTLQELLDMHAACEREAIAIFMEHSFKDENQEFQKKFMETTMNKKGDFLLQNEESSVQYCQAKLNELSKGLMESISAGSFSVPGGHKLYMETKERIEQDYWQVPRKGVKAKEVFQRFLESQMVIEESILQSDKALTDREKAVAVDRAKKEAAEKEQELLKQKLQEQQQQMEAQDKSRKENIAQLKEKLQMEREHLLREQIMMLEHTQKVQNDWLHEGFKKKYEEMNAEISQFKRMIDTTKNDDTPWIARTLDNLADELTAILSAPAKLIGHGVKGVSSLFKKHKLPF

SEQ ID NO: 18008 - protein, 296 aa, Homo sapiens
MAQRVKLPTDTLQELLDMHAACEREAIAIFMEHSFKDENQEFQKKFMETTMNKKGDFLLQNEESSVQYCQAKLNELSKGLMESISAGSFSVPGGHKLYMETKERIEQDYWQVPRKGVKAKEVFQRFLESQMVIEESILQSDKALTDREKAVAVDRAKKEAAEKEQELLKQKLQEQQQQMEAQDKSRKENIAQLKEKLQMEREHLLREQIMMLEHTQKVQNDWLHEGFKKKYEEMNAEISQFKRMIDTTKNDDTPWIARTLDNLADELTAILSAPAKLIGHGVKGVSSLFKKHKLPF

SEQ ID NO: 18009 - protein, 254 aa, Homo sapiens
MAISGVPVLGFFIIAVLMSAQESWAIKEEHVIIQAEFYLNPDQSGEFMFDFDGDEIFHVDMAKKETVWRLEEFGRFASFEAQGALANIAVDKANLEIMTKRSNYTPITNVPPEVTVLTNSPVELREPNVLICFIDKFTPPVVNVTWLRNGKPVTTGVSETVFLPREDHLFRKFHYLPFLPSTEDVYDCRVEHWGLDEPLLKHWEFDAPSPLPETTENVVCALGLTVGLVGIIIGTIFIIKGLRKSNAAERRGPL

SEQ ID NO: 18010 - protein, 638 aa, Homo sapiens
MASEIHMPGPVCLTENTKGHLVVNSEALEILSAITQPVVVVAIVGLYRTGKSYLMNKLAGKNKGFPLGCTVKSETKGIWMWCVPHPSKPNHTLILLDTEGLGDMEKSDPKSDSWIFALAVLLSSSFVYNSMGTINHQALEQLHYVTELTELIRAKSCPRPDEVEDSSEFVSFFPDFIWTVRDFTLELKLDGHPITEDEYLENALKLISGKNPQIQNSNKPREWIRHFFPKQKCFVFDRPINDKKLLLHVEEVREDQLDSNFQMQSENFCSYIFTHAKTKTLREGILVTGNRLGMLVETYLDAINSGATPCLENAMAVLAQCENSAAVQRAANHYSQQMAQQVRFPTDTLQELLDVHAVCEREAIAVFMEYSFKDKSQEFQKKLVDTMEKKKEDFVLQNEEASAKYCQAELKRLSELLTESISRGTFFVPGGHNIYLEAKKKIEQDYTLVPRKGVKADEVLQSFLQSQVVIEESILQSDKALTAGEKAIAAKQAKKEAAEKEQELLRQKQKEQQQMMEAQERSFQENIAQLKKKMERERENYMRELRKMLSHKMKVLEELLTEGFKEIFESLNEEINRLKEQIEAAENEEPSVFSQILDVAGSIFIAALPGAAKLVDLGMKILSSLCNRLRNPGKKIIS

SEQ ID NO: 18011 - protein, 456 aa, Homo sapiens
MRKSPGLSDCLWAWILLLSTLTGRSYGQPSLQDELKDNTTVFTRILDRLLDGYDNRLRPGLGERVTEVKTDIFVTSFGPVSDHDMEYTIDVFFRQSWKDERLKFKGPMTVLRLNNLMASKIWTPDTFFHNGKKSVAHNMTMPNKLLRITEDGTLLYTMRLTVRAECPMHLEDFPMDAHACPLKFGSYAYTRAEVVYEWTREPARSVVVAEDGSRLNQYDLLGQTVDSGIVQSSTGEYVVMTTHFHLKRKIGYFVIQTYLPCIMTVILSQVSFWLNRESVPARTVFGVTTVLTMTTLSISARNSLPKVAYATAMDWFIAVCYAFVFSALIEFATVNYFTKRGYAWDGKSVVPEKPKKVKDPLIKKNNTYAPTATSYTPNLARGDPGLATIAKSATIEPKEVKPETKPPEPKKTFNSVSKIDRLSRIAFPLLFGIFNLVYWATYLNREPQLKAPTPHQ

SEQ ID NO: 18012 - protein, 4265 aa, Homo sapiens
MEQPNSKGYSLGRTPQGPECSSAPAVQVGTHRGLEYNPGKILPGSDYGLGNPPALDPKLPHLPLPPAPPTLSDLGQPRKSPLTGTDKKYPLMKQRGFYSDILSPGTLDQLGEVCRGPRMSQNLLRQADLDKFTPRVGSFEVPEDFQERMEQQCIGSTTRLLAQTDFPLQAYEPKMQVPFQVLPGQHPRKIEIERRKQQYLSLDIEQLLFSQGIDSNKLMPRHLDHQHPQTIEQGHDPIFPIYLPLKVFDNEDFDCRTPREWINMGLEPGSLDRKPVPGKALLPTDDFLGHEDPKSQKLKYKWCEVGVLDYDEEKKLYLVHKTDEKGLVRDEMGRPILNAGVTTEGRPPLQVCQYWVPRIQLLFCAEDPCMFAQRVVQANALRKNTEALLLYNLYVDCMPSDGQHVISEQSLSKIKQWALSTPRMRKGPSVLEHLSSLAREVSLDYERSMNKINFDHVVSSKPETFSYVTLPKKEEEQVPERGLVSVPKYHFWEQKEDFTFVSLLTRPEVITALSKVRAECNKVTAMSLFHSSLSKYSHLEEFEQIQSQTFSQVQMFLKDSWISSLKVAMRSSLRDMSKGWYNLYETNWEVYLMSKLRKLMELVKYMLQDTLRFLVQDSLASFSQFISDTCCSVLNCTDDMVWGDDLINSPYRPRKNPLFIMDLVLDSSGVHYSTPLEQFEASLLNLFDKGILATHAVPQLEKLVMEDIFISGDPLLESVGLHEPLVEELRATIASAVSKAMIPLQAYAKEYRKYLELNNNDIASFLKTYQTQGLLAQEVREVVLTHLREKEILDSSLPSSIIIGPFYINTDNVKQSLSKKRKALATSVLDILAKNLHKEVDSICEEFRSISRKIYEKPNSIEELAELREWMKGIPERLVGLEERIVKVMDDYQVMDEFLYNLSSDDFNDKWIASNWPSKILGQIELVQQQHVEDEEKFRKIQIMDQNNFQEKLEGLQLVVAGFSIHVEISRAHEIANEVRRVKKQLKDCQQLAMLYNNRERIFSLPITNYDKLSRMVKEFQPYLDLWTTASDWLRWSESWMNDPLSAIDAEQLEKNVVEAFKTMHKCVKQFKDMPACQEVALDIRARIEEFKPYIPLIQGLRNPGMRIRHWETLSNQININVRPKANLTFARCLEMNLQDHIESISKVAEVAGKEYAIEQALDKMEKEWSTILFNVLPYKATDTYILKSPDEASQLLDDHIVMTQNMSFSPYKKPFEQRINSWENKLKLTQEVLEEWLNCQRSWLYLEPIFSSEDINQQLPVESKRYQTMERIWKKIMKNAYENREVINVCSDLRMLDSLRDCNKILDLVQKGLSEYLETKRSAFPRFYFLSDDELLEILSQTKDPTAVQPHLRKCFENIARLLFQEDLEITHMYSAEGEEVQLCFSIYPSSNVEDWLREVERSMKASVHDIIEKAIRAYPTMPRTQWVLNWPGQVTIAGCQTYWTMEVAEALEAGNLRSQLFPQLCQQLSDLVALVRGKLSRMQRAVLSALIVIEVHAKDVVSKLIQENVVSVNDFQWISQLRYYWTNNDLYIRAVNAEFIYGYEYLGNSGRLVITPLTDRCYLTLTGALHLKFGGAPAGPAGTGKTETTKDLGKALAIQTVVFNCSDQLDFMAMGKFFKGLASAGAWACFDEFNRIDIEVLSVVAQQITTIQKAQQQRVERFMFEGVEIPLVPSCAVFITMNPGYAGRTELPDNLKALFRPVAMMVPDYAMITEISLYSFGFNEASVLAKKITTTFKLSSEQLSSQDHYDFGMRAVKTVISAAGNLKRENPSMNEELICLRAIRDVNVPKFLQEDLKLFSGIVSDLFPTIKEEDTDYGILDEAIREACRNSNLKDVEGFLTKCIQLYETTVVRHGLMLVGPTGSGKSTCYRVLAAAMTSLKGQPSISGGMYEAVNYYVLNPKSITMGQLYGEFDLLTHEWTDGIFSSFIRAGAITSDTNKKWYMFDGPVDAIWIENMNTVLDDNKKLCLSSGEIIKLTEAMTMMFEVQDLAVASPATVSRCGMVYLEPSILGLMPFIECWLRKLPPLLKPYEEHFKALFVSFLEESISFVRSSVKEVIASTNCNLTMSLLKLLDCFFKPFLPREGLKKIPSEKLSRIVELIEPWFIFSLIWSVGATGDSSGRTSFSHWLRLKMENEQLTLLFPEEGLVFDYRLEDAGISGTNDSEDEEEEYKQVAWVKWMDSSAPFTMVPDTNYCNIIVPTMDTVQMSHLLDMLLTNKKPVLCIGPTGTGKTLTISDKLLKNLALDYISHFLTFSARTSANQTQDFIDSKLDKRRKGVFGPPLGRNFIFFIDDLNMPALETYGAQPPIELLRQWMDHGGWYDRKIIGAFKNLVDINFVCAMGPPGGGRNTVTPRLMRHFNYLSFAEMDEVSKKRIFSTILGNWLDGLLGEKSYRERVPGAPHIAHFTEPLVEATIMVYATITSQLLPTPAKSHYTFNLRDLSKVFQGMLMADPAKVEDQVQLLRLWYHENCRVFRDRLVNEEDRSWFDQLLKRCMEQWEVTFNKVCPFQPILYGDFMSPGSDVKSYELITSESKMMQVIEEYIEDYNQINTAKLKLVLFMDAMSHICRISRTLRQALGNALLLGVGGSGRSSLTRLASHMAEYECFQIELSKNYGMSEWRDDVKKVLLKAGLQNLPITFLFSDTQIKNESFLEDINNVLNSGDIPNLYTADEQDQIVSTMRPYIQEQGLQPTKANLMAAYTGRVRSNIHMVLCMSPIGEVFRARLRQFPSLVNCCTIDWFNEWPAEALKSVATVFLNEIPELESSQEEIQGLIQVCVYIHQSVSKKCIEYLAELTRHNYVTPKSYLELLHIFSILIGQKKLELKTAKNRMKSGLDKLLRTSEDVAKMQEDLESMHPLLEEAAKDTMLTMEQIKVDTAIAEETRNSVQTEEIKANEKAKKAQAIADDAQKDLDEALPALDAALASLRNLNKNDVTEVRAMQRPPPGVKLVIEAVCIMKGIKPKKVPGEKPGTKVDDYWEPGKGLLQDPGHFLESLFKFDKDNIGDVVIKAIQPYIDNEEFQPATIAKVSKACTSICQWVRAMHKYHFVAKAVEPKRQALLEAQDDLGVTQRILDEAKQRLREVEDGIATMQAKYRECITKKEELELKCEQCEQRLGRAGKLINGLSDEKVRWQETVENLQYMLNNISGDVLVAAGFVAYLGPFTGQYRTVLYDSWVKQLRSHNVPHTSEPTLIGTLGNPVKIRSWQIAGLPNDTLSVENGVINQFSQRWTHFIDPQSQANKWIKNMEKDNGLDVFKLSDRDFLRSMENAIRFGKPCLLENVGEELDPALEPVLLKQTYKQQGNTVLKLGDTVIPYHEDFRMYITTKLPNPHYTPEISTKLTLINFTLSPSGLEDQLLGQVVAEERPDLEEAKNQLIISNAKMRQELKDIEDQILYRLSSSEGNPVDDMELIKVLEASKMKAAEIQAKVRIAEQTEKDIDLTRMEYIPVAIRTQILFFCVSDLANVDPMYQYSLEWFLNIFLSGIANSERADNLKKRISNINRYLTYSLYSNVCRSLFEKHKLMFAFLLCVRIMMNEGKINQSEWRYLLSGGSISIMTENPAPDWLSDRAWRDILALSNLPTFSSFSSDFVKHLSEFRVIFDSLEPHREPLPGIWDQYLDQFQKLLVLRCLRGDKVTNAMQDFVATNLEPRFIEPQTANLSVVFKDSNSTTPLIFVLSPGTDPAADLYKFAEEMKFSKKLSAISLGQGQGPRAEAMMRSSIERGKWVFFQNCHLAPSWMPALERLIEHINPDKVHRDFRLWLTSLPSNKFPVSILQNGSKMTIEPPRGVRANLLKSYSSLGEDFLNSCHKVMEFKSLLLSLCLFHGNALERRKFGPLGFNIPYEFTDGDLRICISQLKMFLDEYDDIPYKVLKYTAGEINYGGRVTDDWDRRCIMNILEDFYNPDVLSPEHSYSASGIYHQIPPTYDLHGYLSYIKSLPLNDMPEIFGLHDNANITFAQNETFALLGTIIQLQPKSSSAGSQGREEIVEDVTQNILLKVPEPINLQWVMAKYPVLYEESMNTVLVQEVIRYNRLLQVITQTLQDLLKALKGLVVMSSQLELMAASLYNNTVPELWSAKAYPSLKPLSSWVMDLLQRLDFLQAWIQDGIPAVFWISGFFFPQAFLTGTLQNFARKFVISIDTISFDFKVMFEAPSELTQRPQVGCYIHGLFLEGARWDPEAFQLAESQPKELYTEMAVIWLLPTPNRKAQDQDFYLCPIYKTLTRAGTLSTTGHSTNYVIAVEIPTHQPQRHWIKRGVALICALDY

SEQ ID NO: 18013 - protein, 1205 aa, Homo sapiens
MEQPNSKGYSLGRTPQGPECSSAPAVQVGTHRGLEYNPGKILPGSDYGLGNPPALDPKLPHLPLPPAPPTLSDLGQPRKSPLTGTDKKYPLMKQRGFYSDILSPGTLDQLGEVCRGPRMSQNLLRQADLDKFTPRVGSFEVPEDFQERMEQQCIGSTTRLLAQTDFPLQAYEPKMQVPFQVLPGQHPRKIEIERRKQQYLSLDIEQLLFSQGIDSNKLMPRHLDHQHPQTIEQGHDPIFPIYLPLKVFDNEDFDCRTPREWINMGLEPGSLDRKPVPGKALLPTDDFLGHEDPKSQKLKYKWCEVGVLDYDEEKKLYLVHKTDEKGLVRDEMGRPILNAGVTTEGRPPLQVCQYWVPRIQLLFCAEDPCMFAQRVVQANALRKNTEALLLYNLYVDCMPSDGQHVISEQSLSKIKQWALSTPRMRKGPSVLEHLSSLAREVSLDYERSMNKINFDHVVSSKPETFSYVTLPKKEEEQVPERGLVSVPKYHFWEQKEDFTFVSLLTRPEVITALSKVRAECNKVTAMSLFHSSLSKYSHLEEFEQIQSQTFSQVQMFLKDSWISSLKVAMRSSLRDMSKGWYNLYETNWEVYLMSKLRKLMELVKYMLQDTLRFLVQDSLASFSQFISDTCCSVLNCTDDMVWGDDLINSPYRPRKNPLFIMDLVLDSSGVHYSTPLEQFEASLLNLFDKGILATHAVPQLEKLVMEDIFISGDPLLESVGLHEPLVEELRATIASAVSKAMIPLQAYAKEYRKYLELNNNDIASFLKTYQTQGLLAQEVREVVLTHLREKEILDSSLPSSIIIGPFYINTDNVKQSLSKKRKALATSVLDILAKNLHKEVDSICEEFRSISRKIYEKPNSIEELAELREWMKGIPERLVGLEERIVKVMDDYQVMDEFLYNLSSDDFNDKWIASNWPSKILGQIELVQQQHVEDEEKFRKIQIMDQNNFQEKLEGLQLVVAGFSIHVEISRAHEIANEVRRVKKQLKDCQQLAMLYNNRERIFSLPITNYDKLSRMVKEFQPYLDLWTTASDWLRWSESWMNDPLSAIDAEQLEKNVVEAFKTMHKCVKQFKDMPACQEVALDIRARIEEFKPYIPLIQGLRNPGMRIRHWETLSNQININVRPKANLTFARCLEMNLQDHIESISKVAEVAGKEYAIEQVGSHQRAQPLQPGPAGQPDLLLWQPQPLGRMTVISPIPGVMRPRG

SEQ ID NO: 18014 - protein, 3165 aa, Homo sapiens
MEQPNSKGYSLGRTPQGPECSSAPAVQVGTHRGLEYNPGKILPGSDYGLGNPPALDPKLPHLPLPPAPPTLSDLGQPRKSPLTGTDKKYPLMKQRGFYSDILSPGTLDQLGEVCRGPRMSQNLLRQADLDKFTPRVGSFEVPEDFQERMEQQCIGSTTRLLAQTDFPLQAYEPKMQVPFQVLPGQHPRKIEIERRKQQYLSLDIEQLLFSQGIDSNKLMPRHLDHQHPQTIEQGHDPIFPIYLPLKVFDNEDFDCRTPREWINMGLEPGSLDRKPVPGKALLPTDDFLGHEDPKSQKLKYKWCEVGVLDYDEEKKLYLVHKTDEKGLVRDEMGRPILNAGVTTEGRPPLQVCQYWVPRIQLLFCAEDPCMFAQRVVQANALRKNTEALLLYNLYVDCMPSDGQHVISEQSLSKIKQWALSTPRMRKGPSVLEHLSSLAREVSLDYERSMNKINFDHVVSSKPETFSYVTLPKKEEEQVPERGLVSVPKYHFWEQKEDFTFVSLLTRPEVITALSKVRAECNKVTAMSLFHSSLSKYSHLEEFEQIQSQTFSQVQMFLKDSWISSLKVAMRSSLRDMSKGWYNLYETNWEVYLMSKLRKLMELVKYMLQDTLRFLVQDSLASFSQFISDTCCSVLNCTDDMVWGDDLINSPYRPRKNPLFIMDLVLDSSGVHYSTPLEQFEASLLNLFDKGILATHAVPQLEKLVMEDIFISGDPLLESVGLHEPLVEELRATIASAVSKAMIPLQAYAKEYRKYLELNNNDIASFLKTYQTQGLLAQEVREVVLTHLREKEILDSSLPSSIIIGPFYINTDNVKQSLSKKRKALATSVLDILAKNLHKEVDSICEEFRSISRKIYEKPNSIEELAELREWMKGIPERLVGLEERIVKVMDDYQVMDEFLYNLSSDDFNDKWIASNWPSKILGQIELVQQQHVEDEEKFRKIQIMDQNNFQEKLEGLQLVVAGFSIHVEISRAHEIANEVRRVKKQLKDCQQLAMLYNNRERIFSLPITNYDKLSRMVKEFQPYLDLWTTASDWLRWSESWMNDPLSAIDAEQLEKNVVEAFKTMHKCVKQFKDMPACQEVALDIRARIEEFKPYIPLIQGLRNPGMRIRHWETLSNQININVRPKANLTFARCLEMNLQDHIESISKVAEVAGKEYAIEQALDKMEKEWSTILFNVLPYKATDTYILKSPDEASQLLDDHIVMTQNMSFSPYKKPFEQRINSWENKLKLTQEVLEEWLNCQRSWLYLEPIFSSEDINQQLPVESKRYQTMERIWKKIMKNAYENREVINVCSDLRMLDSLRDCNKILDLVQKGLSEYLETKRSAFPRFYFLSDDELLEILSQTKDPTAVQPHLRKCFENIARLLFQEDLEITHMYSAEGEEVQLCFSIYPSSNVEDWLREVERSMKASVHDIIEKAIRAYPTMPRTQWVLNWPGQVTIAGCQTYWTMEVAEALEAGNLRSQLFPQLCQQLSDLVALVRGKLSRMQRAVLSALIVIEVHAKDVVSKLIQENVVSVNDFQWISQLRYYWTNNDLYIRAVNAEFIYGYEYLGNSGRLVITPLTDRCYLTLTGALHLKFGGAPAGPAGTGKTETTKDLGKALAIQTVVFNCSDQLDFMAMGKFFKGLASAGAWACFDEFNRIDIEVLSVVAQQITTIQKAQQQRVERFMFEGVEIPLVPSCAVFITMNPGYAGRTELPDNLKALFRPVAMMVPDYAMITEISLYSFGFNEASVLAKKITTTFKLSSEQLSSQDHYDFGMRAVKTVISAAGNLKRENPSMNEELICLRAIRDVNVPKFLQEDLKLFSGIVSDLFPTIKEEDTDYGILDEAIREACRNSNLKDVEGFLTKCIQLYETTVVRHGLMLVGPTGSGKSTCYRVLAAAMTSLKGQPSISGGMYEAVNYYVLNPKSITMGQLYGEFDLLTHEWTDGIFSSFIRAGAITSDTNKKWYMFDGPVDAIWIENMNTVLDDNKKLCLSSGEIIKLTEAMTMMFEVQDLAVASPATVSRCGMVYLEPSILGLMPFIECWLRKLPPLLKPYEEHFKALFVSFLEESISFVRSSVKEVIASTNCNLTMSLLKLLDCFFKPFLPREGLKKIPSEKLSRIVELIEPWFIFSLIWSVGATGDSSGRTSFSHWLRLKMENEQLTLLFPEEGLVFDYRLEDAGISGTNDSEDEEEEYKQVAWVKWMDSSAPFTMVPDTNYCNIIVPTMDTVQMSHLLDMLLTNKKPVLCIGPTGTGKTLTISDKLLKNLALDYISHFLTFSARTSANQTQDFIDSKLDKRRKGVFGPPLGRNFIFFIDDLNMPALETYGAQPPIELLRQWMDHGGWYDRKIIGAFKNLVDINFVCAMGPPGGGRNTVTPRLMRHFNYLSFAEMDEVSKKRIFSTILGNWLDGLLGEKSYRERVPGAPHIAHFTEPLVEATIMVYATITSQLLPTPAKSHYTFNLRDLSKVFQGMLMADPAKVEDQVQLLRLWYHENCRVFRDRLVNEEDRSWFDQLLKRCMEQWEVTFNKVCPFQPILYGDFMSPGSDVKSYELITSESKMMQVIEEYIEDYNQINTAKLKLVLFMDAMSHICRISRTLRQALGNALLLGVGGSGRSSLTRLASHMAEYECFQIELSKNYGMSEWRDDVKKVLLKAGLQNLPITFLFSDTQIKNESFLEDINNVLNSGDIPNLYTADEQDQIVSTMRPYIQEQGLQPTKANLMAAYTGRVRSNIHMVLCMSPIGEVFRARLRQFPSLVNCCTIDWFNEWPAEALKSVATVFLNEIPELESSQEEIQGLIQVCVYIHQSVSKKCIEYLAELTRHNYVTPKSYLELLHIFSILIGQKKLELKTAKNRMKSGLDKLLRTSEDVAKMQEDLESMHPLLEEAAKDTMLTMEQIKVDTAIAEETRNSVQTEEIKANEKAKKAQAIADDAQKDLDEALPALDAALASLRNLNKNDVTEVRAMQRPPPGVKLVIEAVCIMKGIKPKKVPGEKPGTKVDDYWEPGKGLLQDPGHFLESLFKFDKDNIGDVVIKAIQPYIDNEEFQPATIAKVSKACTSICQWVRAMHKYHFVAKAVEPKRQALLEAQDDLGVTQRILDEAKQRLREVEDGIATMQAKYRECITKKEELELKCEQCEQRLGRAGKVRTLLLQGLQAGPAQTGARKDQGAGGSWGGCPHPLPGNPRCHSG

SEQ ID NO: 18015 - protein, 4196 aa, Homo sapiens
MEQPNSKGYSLGRTPQGPECSSAPAVQVGTHRGLEYNPGKILPGSDYGLGNPPALDPKLPHLPLPPAPPTLSDLGQPRKSPLTGTDKKYPLMKQRGFYSDILSPGTLDQLGEVCRGPRMSQNLLRQADLDKFTPRVGSFEVPEDFQERMEQQCIGSTTRLLAQTDFPLQAYEPKMQVPFQVLPGQHPRKIEIERRKQQYLSLDIEQLLFSQGIDSNKLMPRHLDHQHPQTIEQGHDPIFPIYLPLKVFDNEDFDCRTPREWINMGLEPGSLDRKPVPGKALLPTDDFLGHEDPKSQKLKYKWCEVGVLDYDEEKKLYLVHKTDEKGLVRDEMGRPILNAGVTTEGRPPLQVCQYWVPRIQLLFCAEDPCMFAQRVVQANALRKNTEALLLYNLYVDCMPSDGQHVISEQSLSKIKQWALSTPRMRKGPSVLEHLSSLAREVSLDYERSMNKINFDHVVSSKPETFSYVTLPKKEEEQVPERGLVSVPKYHFWEQKEDFTFVSLLTRPEVITALSKVRAECNKVTAMSLFHSSLSKYSHLEEFEQIQSQTFSQVQMFLKDSWISSLKVAMRSSLRDMSKGWYNLYETNWEVYLMSKLRKLMELVKYMLQDTLRFLVQDSLASFSQFISDTCCSVLNCTDDMVWGDDLINSPYRPRKNPLFIMDLVLDSSGVHYSTPLEQFEASLLNLFDKGILATHAVPQLEKLVMEDIFISGDPLLESVGLHEPLVEELRATIASAVSKAMIPLQAYAKEYRKYLELNNNDIASFLKTYQTQGLLAQEVREVVLTHLREKEILDSSLPSSIIIGPFYINTDNVKQSLSKKRKALATSVLDILAKNLHKEVDSICEEFRSISRKIYEKPNSIEELAELREWMKGIPERLVGLEERIVKVMDDYQVMDEFLYNLSSDDFNDKWIASNWPSKILGQIELVQQQHVEDEEKFRKIQIMDQNNFQEKLEGLQLVVAGFSIHVEISRAHEIANEVRRVKKQLKDCQQLAMLYNNRERIFSLPITNYDKLSRMVKEFQPYLDLWTTASDWLRWSESWMNDPLSAIDAEQLEKNVVEAFKTMHKCVKQFKDMPACQEVALDIRARIEEFKPYIPLIQGLRNPGMRIRHWETLSNQININVRPKANLTFARCLEMNLQDHIESISKVAEVAGKEYAIEQALDKMEKEWSTILFNVLPYKATDTYILKSPDEASQLLDDHIVMTQNMSFSPYKKPFEQRINSWENKLKLTQEVLEEWLNCQRSWLYLEPIFSSEDINQQLPVESKRYQTMERIWKKIMKNAYENREVINVCSDLRMLDSLRDCNKILDLVQKGLSEYLETKRSAFPRFYFLSDDELLEILSQTKDPTAVQPHLRKCFENIARLLFQEDLEITHMYSAEGEEVQLCFSIYPSSNVEDWLREVERSMKASVHDIIEKAIRAYPTMPRTQWVLNWPGQVTIAGCQTYWTMEVAEALEAGNLRSQLFPQLCQQLSDLVALVRGKLSRMQRAVLSALIVIEVHAKDVVSKLIQENVVSVNDFQWISQLRYYWTNNDLYIRAVNAEFIYGYEYLGNSGRLVITPLTDRCYLTLTGALHLKFGGAPAGPAGTGKTETTKDLGKALAIQTVVFNCSDQLDFMAMGKFFKGLASAGAWACFDEFNRIDIEVLSVVAQQITTIQKAQQQRVERFMFEGVEIPLVPSCAVFITMNPGYAGRTELPDNLKALFRPVAMMVPDYAMITEISLYSFGFNEASVLAKKITTTFKLSSEQLSSQDHYDFGMRAVKTVISAAGNLKRENPSMNEELICLRAIRDVNVPKFLQEDLKLFSGIVSDLFPTIKEEDTDYGILDEAIREACRNSNLKDVEGFLTKCIQLYETTVVRHGLMLVGPTGSGKSTCYRVLAAAMTSLKGQPSISGGMYEAVNYYVLNPKSITMGQLYGEFDLLTHEWTDGIFSSFIRAGAITSDTNKKWYMFDGPVDAIWIENMNTVLDDNKKLCLSSGEIIKLTEAMTMMFEVQDLAVASPATVSRCGMVYLEPSILGLMPFIECWLRKLPPLLKPYEEHFKALFVSFLEESISFVRSSVKEVIASTNCNLTMSLLKLLDCFFKPFLPREGLKKIPSEKLSRIVELIEPWFIFSLIWSVGATGDSSGRTSFSHWLRLKMENEQLTLLFPEEGLVFDYRLEDAGISGTNDSEDEEEEYKQVAWVKWMDSSAPFTMVPDTNYCNIIVPTMDTVQMSHLLDMLLTNKKPVLCIGPTGTGKTLTISDKLLKNLALDYISHFLTFSARTSANQTQDFIDSKLDKRRKGVFGPPLGRNFIFFIDDLNMPALETYGAQPPIELLRQWMDHGGWYDRKIIGAFKNLVDINFVCAMGPPGGGRNTVTPRLMRHFNYLSFAEMDEVSKKRIFSTILGNWLDGLLGEKSYRERVPGAPHIAHFTEPLVEATIMVYATITSQLLPTPAKSHYTFNLRDLSKVFQGMLMADPAKVEDQVQLLRLWYHENCRVFRDRLVNEEDRSWFDQLLKRCMEQWEVTFNKVCPFQPILYGDFMSPGSDVKSYELITSESKMMQVIEEYIEDYNQINTAKLKLVLFMDAMSHICRISRTLRQALGNALLLGVGGSGRSSLTRLASHMAEYECFQIELSKNYGMSEWRDDVKKVLLKAGLQNLPITFLFSDTQIKNESFLEDINNVLNSGDIPNLYTADEQDQIVSTMRPYIQEQGLQPTKANLMAAYTGRVRSNIHMVLCMSPIGEVFRARLRQFPSLVNCCTIDWFNEWPAEALKSVATVFLNEIPELESSQEEIQGLIQVCVYIHQSVSKKCIEYLAELTRHNYVTPKSYLELLHIFSILIGQKKLELKTAKNRMKSGLDKLLRTSEDVAKMQEDLESMHPLLEEAAKDTMLTMEQIKVDTAIAEETRNSVQTEEIKANEKAKKAQAIADDAQKDLDEALPALDAALASLRNLNKNDVTEVRAMQRPPPGVKLVIEAVCIMKGIKPKKVPGEKPGTKVDDYWEPGKGLLQDPGHFLESLFKFDKDNIGDVVIKAIQPYIDNEEFQPATIAKVSKACTSICQWVRAMHKYHFVAKAVEPKRQALLEAQDDLGVTQRILDEAKQRLREVEDGIATMQAKYRECITKKEELELKCEQCEQRLGRAGKLINGLSDEKVRWQETVENLQYMLNNISGDVLVAAGFVAYLGPFTGQYRTVLYDSWVKQLRSHNVPHTSEPTLIGTLGNPVKIRSWQIAGLPNDTLSVENGVINQFSQRWTHFIDPQSQANKWIKNMEKDNGLDVFKLSDRDFLRSMENAIRFGKPCLLENVGEELDPALEPVLLKQTYKQQGNTVLKLGDTVIPYHEDFRMYITTKLPNPHYTPEISTKLTLINFTLSPSGLEDQLLGQVVAEERPDLEEAKNQLIISNAKMRQELKDIEDQILYRLSSSEGNPVDDMELIKVLEASKMKAAEIQAKVRIAEQTEKDIDLTRMEYIPVAIRTQILFFCVSDLANVDPMYQYSLEWFLNIFLSGIANSERADNLKKRISNINRYLTYSLYSNVCRSLFEKHKLMFAFLLCVRIMMNEGKINQSEWRYLLSGGSISIMTENPAPDWLSDRAWRDILALSNLPTFSSFSSDFVKHLSEFRVIFDSLEPHREPLPGIWDQYLDQFQKLLVLRCLRGDKVTNAMQDFVATNLEPRFIEPQTANLSVVFKDSNSTTPLIFVLSPGTDPAADLYKFAEEMKFSKKLSAISLGQGQGPRAEAMMRSSIERGKWVFFQNCHLAPSWMPALERLIEHINPDKVHRDFRLWLTSLPSNKFPVSILQNGSKMTIEPPRGVRANLLKSYSSLGEDFLNSCHKVMEFKSLLLSLCLFHGNALERRKFGPLGFNIPYEFTDGDLRICISQLKMFLDEYDDIPYKVLKYTAGEINYGGRVTDDWDRRCIMNILEDFYNPDVLSPEHSYSASGIYHQIPPTYDLHGYLSYIKSLPLNDMPEIFGLHDNANITFAQNETFALLGTIIQLQPKSSSAGSQGREEIVEDVTQNILLKVPEPINLQWVMAKYPVLYEESMNTVLVQEVIRYNRLLQVITQTLQDLLKALKGLVVMSSQLELMAASLYNNTVPELWSAKAYPSLKPLSSWVMDLLQRLDFLQAWIQDGIPAVFWISGFFFPQAFLTGTLQNFARKFVISIDTISFDFKVPAGIQRPSSWLSLSPRSCTQRWPLSGSCQHPTARPRTRTFTCAPSTRH

SEQ ID NO: 18016 - protein, 492 aa, Homo sapiens
MIITQTSHCYMTSLGILFLINILPGTTGQGESRRQEPGDFVKQDIGGLSPKHAPDIPDDSTDNITIFTRILDRLLDGYDNRLRPGLGDAVTEVKTDIYVTSFGPVSDTDMEYTIDVFFRQTWHDERLKFDGPMKILPLNNLLASKIWTPDTFFHNGKKSVAHNMTTPNKLLRLVDNGTLLYTMRLTIHAECPMHLEDFPMDVHACPLKFGSYAYTTAEVVYSWTLGKNKSVEVAQDGSRLNQYDLLGHVVGTEIIRSSTGEYVVMTTHFHLKRKIGYFVIQTYLPCIMTVILSQVSFWLNRESVPARTVFGVTTVLTMTTLSISARNSLPKVAYATAMDWFIAVCYAFVFSALIEFATVNYFTKRSWAWEGKKVPEALEMKKKTPAAPAKKTSTTFNIVGTTYPINLAKDTEFSTISKGAAPSASSTPTIIASPKATYVQDSPTETKTYNSVSKVDKISRIIFPVLFAIFNLVYWATYVNRESAIKGMIRKQ

SEQ ID NO: 18017 - protein, 554 aa, Homo sapiens [sequence omitted]

SEQ ID NO: 18018 - protein, 4024 aa, Homo sapiens
MSSEQDKSASKEKSKKPVRFLPQLSMEKLASKEKFKAPARALPQLSMVSTKPHWQQAAPSFHLSVKQDDESPEPFSVKNEQSHAEYMERFGKKGKLPHQVDDSYVGPSTSKSKGKSPHKERENFRSTLVNVIMQQDADLDSAVPDGSTIPKPTASAIEKDILRYYYYIHHGIDTDHVAPMEDSWLEHVLDLVPQHLKVFTDSIVTLSDEMREDYLLSVRKSIVDFVLKDPREKGDDKKTDELPAHRAEMEILPKPWRKSFLAASSYIRDHLNAMNPTMLAVLDLWHTNFKKLRLVDIKEFHNCQDALELSSFQNIIMRHMDSAKETLLKMWFPEVQNIYYQGNKKKQLPTGDSSAKLESFFNCAAALMTLQLQDLTLVSMQDFTDLIAQPPDSVRAFEHPGFIMRLILDNDTIKFEPELSDYIDIFLNVYDVMIKAVSFVPRVETKLYSKWESKSKPTTLKPIILNEIVDAHKEKIKEVIMKESVAPTEHLRLYDKYDFLITRKAERDVDNFLAENHSYEKIIDEICKYQKLIEEIQYTSIKTIRLGMFEMHCEELIRALVKRADIICGKLLAKMFRDHQEVNTRLCDEFERIAEKALSTPPNTAELMEMKAYIQKVEVTDMIELEQRLVDSKNCLAFLIEYVNFSPADMRLNNSVFQWYGRMGEIFEEHRKIIKEKIEQYQEGLKLRCERFVEELESYAKQSEEFYSFGDLQDVQRYLKKAQILNGKLDLAADKIEQFNAEEEAFGWLPSVYPQRKKIQDGLNPYLRLYETAVEFSSNYRAWTEGPYHKVNPDQVEADIGNYWRGLYKLEKTFHDSPYALAMTKKVRSKVEDFKQHIPLIQVICNPGLRPRHWEAMSAIVGYPLQPSDDSTVSSFLDMNLEPYIDRFEGISEAASKEYSLEKAMEKMITEWDAVEFVIHSYRETGTFILASVDEIQMLLDDHIIKTQTMRGSPFIKPYEKQMREWEGKLLLLQEILDEWLKVQATWLYLEPIFSSPDIMSQMPEEGRRFTAVDKTWRDIMRSVMQDKHVLTVVTIDRMLERLKKSNELLELILKGLNEYLEKKRLFFPRFFFLSNDELLEILSETKDPTRVQPHLKKCFEGIAKVEFTETLDITHMKSSEGEVVELIEIISTAKARGQVEKWLVELERVMINSIHKVTGDATFAYTKYERINWVRDWPGQTVLCVSQIFWTKEVQTAIPMGIKALEQYLKTCNRQIDDIVTLVRGKLSMQNRVTLGALVVLDVHARDVLSSLVKKNISDDSDFEWLSQLRYYWQENHLETKMINAGLRYGYEYLGNSPRLVITPLTDRCYRTLFGALHLHLGGAPEGPAGTGKTETTKDLAKAVAKQCVVFNCSDGLDYLALGKFFKGLLSCGAWACFDEFNRIDLEVLSVVAQQILTIQRGINAGADILMFEGTELKLDPTCAVFITMNPGYAGRSELPDNLKALFRTVAMMVPDYAMIAEIVLYSCGFVTARPLSVKIVATYRLCSEQLSSQHHYDYGMRAVKSVLTAAGNLKLKYPNENEEILLLRSIIDVNLPKFLSHDLPLFEGITSDLFPGVKLPKPDYNDLLAAIKDNCASMNLQMTAFFSEKILQVYEMMIVRHGFMIVGEPFGGKTSAYRVLAGALNDICEKGLMEENKVQITVLNPKSVTMGQLYGQFDSVSHEWSDGVLAVSFRAFASSVTPDRKWLIFDGPVDAVWIENMNTVLDDNKKLCLMSGEIIQMSPQMNLIFEPMDLEVASPATVSRCGMIYMEPHMLGWRPLMLSWVNLLPASVSVIQKEFIMGLFDRMVPVSVEFIRKHTKELSPTSDTNLVRSLMNLIDCFMDDFADEVKLKERNDRETYSLLEGIFLFSLIWSVGASCTDDDRLKFNKILRELMESPISDRTRNTFKLQSGTEQTSSKALTVPFPEKGTIYDYQFVTEGIGKWEPWIKKLKEAPPIPKDVMFNEIIVPTLDTIRYSALMELLTTHQKPSIFVGPTGTGKSVYITNFLLNQLNKEIYKPLLINFSAQTTAAQTQNIVMSKLDKRRKGVFGPPLGKRMVVFVDDVNMPAREVYGAQPPIELLRQWLDHWNWYDLKDCSMIKLVDIQIMCAMGPPGGGRNPVTPRYMRHFNIITINEFSDKSMYTIFSRILTWHLEICYKFPDEFLDLTTQIVNGTMTLYKEAMKNLLPTPAKSHYLFNLRDFSRVIQGVCLSRPETTETTEVIKRLWVHEVLRVYYDRLLDNTDRSWLINYIQEILRNYMYEDFHELFQRLDFDNDGMVEADDLRSLMFCDFHDPKREDTNYREIADVDNLRMIVEIHLEEYNNISKKPMNLVLFRFAIEHISRISRILKQPRSHALLVGVGGSGRQSVTRLAAHMADYSVFQVEISKGYDTTEWHEDLKVILRKCAEGEMQGVFLFTDTQIKEESFLEDVSNLLNAGEIPNLFALDEKQEICDKMRQLDRQRDKTKQTDGSPIALFNMFIDHCRSQLHVVLAMSPIGDAFRNRLRKFPALVNCCTIDWFQSWPEDALQAVASRFLEEIEMSEEIRDGCIDMCKSFHTSTIDLSKSFFVELQRYNYVTPTSYLELISTFKLLLEKKRSEVMKMKKRYEVGLEKLDSASSQVATMQMELEALHPQLKVASKEVDEMMIMIEKESVEVAKTEKIVKADETIANEQAMASKAIKDECDADLAGALPILESALAALDTLTAQDITVVKSMKSPPAGVKLVMEAICILKGIKADKIPDPTGSGKKIEDFWGPAKRLLGDMRFLQSLHEYDKDNIPPAYMNIIRKNYIPNPDFVPEKIRNASTAAEGLCKWVIAMDSYDKVAKIVAPKKIKLAAAEGELKIAMDGLRKKQAALKEVQDKLARLQDTLELNKQKKADLENQVDLCSKKLERAEQLIGGLGGEKTRWSHTALELGQLYINLTGDILISSGVVAYLGAFTSTYRQNQTKEWTTLCKGRDIPCSDDCSLMGTLGEAVTIRTWNIAGLPSDSFSIDNGIIIMNARRWPLMIDPQSQANKWIKNMEKANSLYVIKLSEPDYVRTLENCIQFGTPVLLENVGEELDPILEPLLLKQTFKQGGSTCIRLGDSTIEYAPDFRFYITTKLRNPHYLPETSVKVTLLNFMITPEGMQDQLLGIVVAQERPDLEEEKQALILQGAENKRQLKEIEDKILEVLSSSEGNILEDETAIKILSSSKALANEISQKQEVAEETEKKIDTTRMGYRPIAIHSSILFFSLADLANIEPMYQYSLTWFINLFILSIENSEKSEILAKRLQILKDHFTYSLYVNVCRSLFEKDKLLFSFCLTINLLLHERAINKAEWRFLLTGGIGLDNPYANLCTWLPQKSWDEICRLDDLPAFKTIRREFMRLKDGWKKVYDSLEPHHEVFPEEWEDKANEFQRMLIIRCLRPDKVIPMLQEFIINRLGRAFIEPPPFDLAKAFGDSNCCAPLIFVLSPGADPMAALLKFADDQGYGGSKLSSLSLGQGQGPIAMKMLEKAVKEGTWVVLQNCHLATSWMPTLEKVCEELSPESTHPDFRMWLTSYPSPNFPVSVLQNGVKMTNEAPKGLRANIIRSYLMDPISDPEFFGSCKKPEEFKKLLYGLCFFHALVQERRKFGPLGWNIPYEFNETDLRISVQQLHMFLNQYEELPYEALRYMTGECNYGGRVTDDWDRRTLRSILNKFFNPELVENSDYKFDSSGIYFVPPSGDHKSYIEYTKTLPLTPAPEIFGMNANADITKDQSETQLLFDNILLTQSRSAGAGAKSSDEVVNEVASDILGKLPNNFDIEAAMRRYPTTYTQSMNTVLVQEMGRFNKLLKTIRDSCVNIQKAIKGLAVMSTDLEEVVSSILNVKIPEMWMGKSYPSLKPLGSYVNDFLARLKFLQQWYEVGPPPVFWLSGFFFTQAFLTGAQQNYARKYTIPIDLLGFDYEVMEDKEYKHPPEDGVFIHGLFLDGASWNRKIKKLAESHPKILYDTVPVMWLKPCKRADIPKRPSYVAPLYKTSERRGVLSTTGHSTNFVIAMTLPSDQPKEHWIGRGVALLCQLNS

SEQ ID NO: 18019 - protein, 507 aa, Homo sapiens
MWLTSYPSPNFPVSVLQNGVKMTNEAPKGLRANIIRSYLMDPISDPEFFGSCKKPEEFKKLLYGLCFFHALVQERRKFGPLGWNIPYEFNETDLRISVQQLHMFLNQYEELPYEALRYMTGECNYGGRVTDDWDRRTLRSILNKFFNPELVENSDYKFDSSGIYFVPPSGDHKSYIEYTKTLPLTPAPEIFGMNANADITKDQSETQLLFDNILLTQSRSAGAGAKSSDEVVNEVASDILGKLPNNFDIEAAMRRYPTTYTQSMNTVLVQEMGRFNKLLKTIRDSCVNIQKAIKGLAVMSTDLEEVVSSILNVKIPEMWMGKSYPSLKPLGSYVNDFLARLKFLQQWYEVGPPPVFWLSGFFFTQAFLTGAQQNYARKYTIPIDLLGFDYEVMEDKEYKHPPEDGVFIHGLFLDGASWNRKIKKLAESHPKILYDTVPVMWLKPCKRADIPKRPSYVAPLYKTSERRGVLSTTGHSTNFVIAMTLPSDQPKEHWIGRGVALLCQLNS

SEQ ID NO: 18020 - protein, 187 aa, Homo sapiens
MMVPDYAMIAEIVLYSCGFVTARPLSVKIVATYRLCSEQLSSQHHYDYGMRAVKSVLTAAGNLKLKYPNENEEILLLRSIIDVNLPKFLSHDLPLFEGITSDLFPGVKLPKPDYNDLLAAIKDNCASMNLQMTAFFSEKILQVYEMMIVRHGFMIVGEPFGGKTSAYRVLAGALNDICEKASILLMH

SEQ ID NO: 18021 - protein, 501 aa, Homo sapiens
MSSEQDKSASKEKSKKPVRFLPQLSMEKLASKEKFKAPARALPQLSMVSTKPHWQQAAPSFHLSVKQDDESPEPFSVKNEQSHAEYMERFGKKGKLPHQVDDSYVGPSTSKSKGKSPHKERENFRSTLVNVIMQQDADLDSAVPDGSTIPKPTASAIEKDILRYYYYIHHGIDTDHVAPMEDSWLEHVLDLVPQHLKVFTDSIVTLSDEMREDYLLSVRKSIVDFVLKDPREKGDDKKTDELPAHRAEMEILPKPWRKSFLAASSYIRDHLNAMNPTMLAVLDLWHTNFKKLRLVDIKEFHNCQDALELSSFQNIIMRHMDSAKETLLKMWFPEVQNIYYQGNKKKQLPTGDSSAKLESFFNCAAALMTLQLQDLTLVSMQDFTDLIAQPPDSVRAFEHPGFIMRLILDNDTIKFEPELSDYIDIFLNVYDVMIKAVSFVPRVETKLYSKWRNKAKPGHFYFSHIQRSVTFQHSEVSSPQNSHFKIVSPFSVLGFTWRCQL

SEQ ID NO: 18022 - protein, 4490 aa, Homo sapiens
MMKLYIDNAAPDKLKGLCIFFVRCRNDVAINVKTIQEEALFTVLDASKGLLNGIRDMLANIFLPAVLATNNWGALNQSKQGESEKHIFTETINRYLSFLDGARISIEGTVKLKTIDNVNFSKLHTFEEVTAAASNSETVHQLEEVLMVWYKQIEQVLIESEQMRKEAGDSGPLTELEHWKRMSAKFNYIIEQIKGPSCKAVINVLNVAHSKLLKNWRDLDARITDTANESKDNVRYLYTLEKVCQPLYNHDLVSMAHGIQNLINAIRMIHGVSRYYNTSERMTSLFIKVTNQMVTACKAYITDGGLNHVWDQETPVVLKKIQDCIFLFKEYQASFHKTRKLISESSGEKSFEVSEMYIFGKFEAFCKRLEKITEMITVVQTYSTLSNSTIEGIDIMAIKFRNIYQGVKKKQYDILDPRRTEFDTDFLDFMTKINGLEVQIQAFMNSSFGKILSSQQALQLLQRFQKLNIPCLGLEINHTIERILQYYVAELDATKKLYHSQKDDPPLARNMPPIAGKILWVRQLYRRISEPINYFFKNSDILSSPDGKAVIRQYNKISYVLVEFEVVYHTAWIREISQLHYALQATLFVRHPETGKLLVNFDPKILEVVRETKCMIKMKLDVPEQAKRLLKLESKLKADKLYLQGLLQYYDELCQEVPSVFVNLMTPKMKKVESVLRQGLTVLTWSSLTLESFFQEVELVLDMFNQLLKKISDLCEMHIDTVLKEIAKTVLISLPESGATKVEDMLTLNETYTKEWADILNHKSKHVEEAVRELISIFEQIYEVKYTGKVGKQSEQRKHVVFGSETGEGENNDYEANIVNEFDTHDKEDEFKKECKEVFAFFSHQLLDSLQKATRLSLDTMKRRIFVASLYGRKQSEDIISFIKSEVHLAIPNVVMIPSLDDIQQAINRMIQLTLEVSRGVAHWGQQQIRPIKSVIPSPTTTDVTHQNTGKLLKKEERSFEEAIPARKLKNFYPGVAEHKDISKLVLLLSSSVNSLRKAAHEALQDFQKYKTLWTEDRDVKVKEFLANNPSLTEIRSEILHYATFEQEIDELKPIIVVGALELHTEPMKLALSIEAKAWKMLLCRYLNEEYKKKMSYMIAFINEYLKKLSRPIRDLDDVRFAMEALSCIRDNEIQMDMTLGPIEEAYAILNRFEVEVTKEESEAVDTLRYSFNKLQSKAVSVQEDLVQVQPKFKSNLLESVEVFREDVINFAEAYELEGPMVPNIPPQEASNRLQIFQASFDDLWRKFVTYSSGEQLFGLPVTDYEVLHKTRKELNLLQKLYGLYDTVMSSISGYYEILWGDVDIEKINAELLEFQNRCRKLPKGLKDWQAFLDLKKRIDDFSESCPLLEMMTNKAMKQRHWDRISELTGTPFDVESDSFCLRNIMEAPLLKHKDDIEDICISAIKEKDIEAKLTQVIENWTNQNLSFAAFKGKGELLLKGTESGEIITLMEDSLMVLGSLLSNRYNAPFKKNIQNWVYKLSTSSDIIEEWLVVQNLWVYLEAVFVGGDIAKQLPQEAKRFQNIDKSWIKIMQRAHENPNVINCCVGDETMGQLLPHLHEQLEVCQKSLTGYLEKKRLLFPRFFFVSDPVLLEILGQASDSHTIQPHLPAVSDNINEVTFHAKDYDRIMAVISREGEKIVLDNSVMAKGPVEIWLLDLLKMQMSSLHNIIRSAFYQISDSGFQLLPFLSHFPAQVGLLGIQMLWTHDSEEALRNAKDDRKIMQVTNQKFLDILNTLISQTTHDLSKFDRVKFETLITIHVHQRDIFDDLVKMHIKSPTDFEWLKQSRFYFKEDLDQTVVSITDVDFIYQNEFLGCTDRLVITPLTDRCYITLAQALGMNMGGAPAGPAGTGKTETTKDMGRCLGKYVVVFNCSDQMDFRGLGRIFKGLAQSGSWGCFDEFNRIELPVLSVAAQQIYIVLTARKERKKQFIFSDGDCVDLNPEFGIFLTMNPGYAGRQELPENLKIQFRTVAMMVPDRQIIMRVKLASCGFLENVILAQKFYVLYKLCEEQLTKQVHYDFGLRNILSVLRTLGSQKRARPEDSELSIVMRGLRDMNLSKLVDEDEPLFLSLINDLFPGLQLDSNTYAELQNAVAHQVQIEGLINHPPWNLKLVQLYETSLVRHGLMTLGPSGSGKTTVITILMKAQTECGRPHREMRMNPKAITAPQMFGRLDTATNDWTDGIFSTLWRKTLKAKKGENIFLILDGPVDAIWIENLNSVLDDNKTLTLANGDRIPMAPSCKLLFEVHNIENASPATVSRMGMVYISSSALSWRPILQAWLKKRTAQEAAVFLTLYEKVFEDTYTYMKLNLNPKMQLLECNYIVQSLNLLEGLIPSKEEGGVSCVEHLHKLFVFGLMWSLGALLELESREKLEAFLRQHESKLDLPEIPKGSNQTMYEFYVTDYGDWEHWNKKLQPYYYPTDSIPEYSSILVPNVDNIRTNFLIDTIAKQHKAVLLTGEQGTAKTVMVKAYLKKYDPEVQLSKSLNFSSATEPMMFQRTIESYVDKRIGSTYGPPGGRKMTVFIDDINMPVINEWGDQITNEIVRQMMEMEGMYSLDKPGDFTTIVDVQLIAAMIHPGGGRNDIPQRLKRQFTVFNCTLPSNASIDKIFGIIGCGYFDPCRSFKPQICEMIVNLVSVGRVLWQWTKVKMLPTPSKFHYIFNLRDLSRIWQGMLTIKAEECASIPTLLSLFKHECSRVIADRFITPEDEQWFNAHLTRAVEENIGSDAASCILPEPYFVDFLREMPEPTGDEPEDSVFEVPKIYELMPSFDFLAEKLQFYQRQFNEIIRGTSLDLVFFKDAMTHLIKISRIIRTSCGNALLVGVGGSGKQSLSRLASFIAGYQIFQITLTRSYNVTNLTDDLKALYKVAGADGKGITFIFTDSEIKDEAFLEYLNNLLSSGEISNLFARDEMDEITQGLISVMKRELPRHPPTFDNLYEYFISRSRKNLHVVLCFSPVGEKFRARSLKFPGLISGCTMDWFSRWPREALIAVASYFLSDYNIVCSSEIKRQVVETMGLFHDMVSESCESYFQRYRRRAHVTPKSYLSFINGYKNIYAEKVKFINEQAERMNIGLDKLMEASESVAKLSQDLAVKEKELAVASIKADEVLAEVTVSAQASAKIKNEVQEVKDKAQKIVDEIDSEKVKAESKLEAAKPALEEAEAALNTIKPNDIATVRKLAKPPHLIMRIMDCVLLLFQKKIDPVTMDPEKSCCKPSWGESLKLMSATGFLWSLQQFPKDTINEETVELLQPYFNMDDYTFESAKKVCGNVAGLLSWTLAMAIFYGINREVLPLKANLAKQEGRLAVANAELGKAQALLDEKQAELDKVQAKFDAAMNEKMDLLNDADTCRKKMQAASTLIDGLSGEKIRWTQQSKEFKAQINRLVGDILLCTGFLSYLGPFNQIFRNYLLKDQWEMELRARKIPFTENLNLISMLVDPPTIGEWGLQGLPGDDLSIQNGIIVTKATRYPLLIDPQTQGKTWIKSKEKENDLQVTSLNHKYFRTHLEDSLSLGRPLLIEDIHEELDPALDNVLEKNFIKSGTTFKVKVGDKECDIMDTFKLYITTKLPNPAFTPEINAKTSVIDFTVTMKGLENQLLRRVILTEKQELEAERVKLLEDVTFNKRKMKELEDNLLYKLSATKGSLVDDESLIGVLRTTKQTAAEVSEKLHVAAETEIKINAAQEEFRPAATRGSILYFLITEMSMVNIMYQTSLAQFLKLFDQSMARSEKSPLPQKRITNIIEYLTYEVFTYSVRGLYENHKFLFVLLMTLKIDLQRGTVKHREFQALIKGGAALDLKACPPKPYRWILDMTWLNLVELSKLPQFAEIMNQISRNEKGWKSWFDKDAPEEEIIPDGYNDSLDTCHKLLLIRSWCPDRTVFQARKYIADSLEEKYTEPVILNLEKTWEESDTRTPLICFLSMGSDPTNQIDALAKKLKLECRTISMGQGQEVHARKLIQMSMQQGGWVLLQNCHLGLEFMEELLETLITTEASDDSFRVWITTEPHDRFPITLLQTSLKFTNEPPQGVRAGLKRTFAGINQDLLDISNLPMWKPMLYTVAFLHSTVQERRKFGPLGWNIPYEFNSADFSASVQFIQNHLDECDIKKGVSWNTVRYMIGEVQYGGRVTDDFDKRLLNCFARVWFSEKMFEPSFCFYTGYKIPLCKTLDQYFEYIQSLPSLDNPEVFGLHPNADITYQSNTASAVLETITNIQPKESGGGVGETREAIVYRLSEDMLSKLPPDYIPHEVKSRLIKMGHLNSMNIFLRQEIDRMQRVISILRSSLSDLKLAIEGTIIMSENLRDALDNMYDARIPQLWKRVSWDSSTLGFWFTELLERNAQFSTWIFEGRPNVFWMTGFFNPQGFLTAMRQEVTRAHKGWALDTVTIHNEVLRQTKEEITSPPGEGVYIYGLYMDGAAWDRRNGKLMESTPKVLFTQLPVLHIFAINSTAPKDPKLYVCPIYKKPRRTDLTFITVVYLRTVLSPDHWILRGVALLCDIK

SEQ ID NO: 18023 - protein, 4454 aa, Homo sapiens
MMKLYIDNAAPDKLKGLCIFFVRCRNDVAINVKTIQEEALFTVLDASKGLLNGIRDMLANIFLPAVLATNNWGALNQSKQGESEKHIFTETINRYLSFLDGARISIEGTVKLKTIDNVNFSKLHTFEEVTAAASNSETVHQLEEVLMVWYKQIEQVLIESEQMRKEAGDSGPLTELEHWKRMSAKFNYIIEQIKGPSCKAVINVLNVAHSKLLKNWRDLDARITDTANESKDNVRYLYTLEKVCQPLYNHDLVSMAHGIQNLINAIRMIHGVSRYYNTSERMTSLFIKVTNQMVTACKAYITDGGLNHVWDQETPVVLKKIQDCIFLFKEYQASFHKTRKLISESSGEKSFEVSEMYIFGKFEAFCKRLEKITEMITVVQTYSTLSNSTIEGIDIMAIKFRNIYQGVKKKQYDILDPRRTEFDTDFLDFMTKINGLEVQIQAFMNSSFGKILSSQQALQLLQRFQKLNIPCLGLEINHTIERILQYYVAELDATKKLYHSQKDDPPLARNMPPIAGKILWVRQLYRRISEPINYFFKNSDILSSPDGKAVIRQYNKISYVLVEFEVVYHTAWIREISQLHYALQATLFVRHPETGKLLVNFDPKILEVVRETKCMIKMKLDVPEQAKRLLKLESKLKADKLYLQGLLQYYDELCQEVPSVFVNLMTPKMKKVESVLRQGLTVLTWSSLTLESFFQEVELVLDMFNQLLKKISDLCEMHIDTVLKEIAKTVLISLPESGATKVEDMLTLNETYTKEWADILNHKSKHVEEAVRELISIFEQIYEVKYTGKVGKQSEQRKHVVFGSETGEGENNDYEANIVNEFDTHDKEDEFKKECKEVFAFFSHQLLDSLQKATRLSLDTMKRRIFVASLYGRKQSEDIISFIKSEVHLAIPNVVMIPSLDDIQQAINRMIQLTLEVSRGVAHWGQQQIRPIKSVIPSPTTTDVTHQNTGKLLKKEERSFEEAIPARKLKNFYPGVAEHKDISKLVLLLSSSVNSLRKAAHEALQDFQKYKTLWTEDRDVKVKEFLANNPSLTEIRSEILHYATFEQEIDELKPIIVVGALELHTEPMKLALSIEAKAWKMLLCRYLNEEYKKKMSYMIAFINEYLKKLSRPIRDLDDVRFAMEALSCIRDNEIQMDMTLGPIEEAYAILNRFEVEVTKEESEAVDTLRYSFNKLQSKAVSVQEDLVQVQPKFKSNLLESVEVFREDVINFAEAYELEGPMVPNIPPQEASNRLQIFQASFDDLWRKFVTYSSGEQLFGLPVTDYEVLHKTRKELNLLQKLYGLYDTVMSSISGYYEILWGDVDIEKINAELLEFQNRCRKLPKGLKDWQAFLDLKKRIDDFSESCPLLEMMTNKAMKQRHWDRISELTGTPFDVESDSFCLRNIMEAPLLKHKDDIEDICISAIKEKDIEAKLTQVIENWTNQNLSFAAFKGKGELLLKGTESGEIITLMEDSLMVLGSLLSNRYNAPFKKNIQNWVYKLSTSSDIIEEWLVVQNLWVYLEAVFVGGDIAKQLPQEAKRFQNIDKSWIKIMQRAHENPNVINCCVGDETMGQLLPHLHEQLEVCQKSLTGYLEKKRLLFPRFFFVSDPVLLEILGQASDSHTIQPHLPAVSDNINEVTFHAKDYDRIMAVISREGEKIVLDNSVMAKGPVEIWLLDLLKMQMSSLHNIIRSAFYQISDSGFQLLPFLSHFPAQVGLLGIQMLWTHDSEEALRNAKDDRKIMQVTNQKFLDILNTLISQTTHDLSKFDRVKFETLITIHVHQRDIFDDLVKMHIKSPTDFEWLKQSRFYFKEDLDQTVVSITDVDFIYQNEFLGCTDRLVITPLTDRCYITLAQALGMNMGGAPAGPAGTGKTETTKDMGRCLGKYVVVFNCSDQMDFRGLGRIFKGLAQSGSWGCFDEFNRIELPVLSVAAQQIYIVLTARKERKKQFIFSDGDCVDLNPEFGIFLTMNPGYAGRQELPENLKIQFRTVAMMVPDRQVHYDFGLRNILSVLRTLGSQKRARPEDSELSIVMRGLRDMNLSKLVDEDEPLFLSLINDLFPGLQLDSNTYAELQNAVAHQVQIEGLINHPPWNLKLVQLYETSLVRHGLMTLGPSGSGKTTVITILMKAQTECGRPHREMRMNPKAITAPQMFGRLDTATNDWTDGIFSTLWRKTLKAKKGENIFLILDGPVDAIWIENLNSVLDDNKTLTLANGDRIPMAPSCKLLFEVHNIENASPATVSRMGMVYISSSALSWRPILQAWLKKRTAQEAAVFLTLYEKVFEDTYTYMKLNLNPKMQLLECNYIVQSLNLLEGLIPSKEEGGVSCVEHLHKLFVFGLMWSLGALLELESREKLEAFLRQHESKLDLPEIPKGSNQTMYEFYVTDYGDWEHWNKKLQPYYYPTDSIPEYSSILVPNVDNIRTNFLIDTIAKQHKAVLLTGEQGTAKTVMVKAYLKKYDPEVQLSKSLNFSSATEPMMFQRTIESYVDKRIGSTYGPPGGRKMTVFIDDINMPVINEWGDQITNEIVRQMMEMEGMYSLDKPGDFTTIVDVQLIAAMIHPGGGRNDIPQRLKRQFTVFNCTLPSNASIDKIFGIIGCGYFDPCRSFKPQICEMIVNLVSVGRVLWQWTKVKMLPTPSKFHYIFNLRDLSRIWQGMLTIKAEECASIPTLLSLFKHECSRVIADRFITPEDEQWFNAHLTRAVEENIGSDAASCILPEPYFVDFLREMPEPTGDEPEDSVFEVPKIYELMPSFDFLAEKLQFYQRQFNEIIRGTSLDLVFFKDAMTHLIKISRIIRTSCGNALLVGVGGSGKQSLSRLASFIAGYQIFQITLTRSYNVTNLTDDLKALYKVAGADGKGITFIFTDSEIKDEAFLEYLNNLLSSGEISNLFARDEMDEITQGLISVMKRELPRHPPTFDNLYEYFISRSRKNLHVVLCFSPVGEKFRARSLKFPGLISGCTMDWFSRWPREALIAVASYFLSDYNIVCSSEIKRQVVETMGLFHDMVSESCESYFQRYRRRAHVTPKSYLSFINGYKNIYAEKVKFINEQAERMNIGLDKLMEASESVAKLSQDLAVKEKELAVASIKADEVLAEVTVSAQASAKIKNEVQEVKDKAQKIVDEIDSEKVKAESKLEAAKPALEEAEAALNTIKPNDIATVRKLAKPPHLIMRIMDCVLLLFQKKIDPVTMDPEKSCCKPSWGESLKLMSATGFLWSLQQFPKDTINEETVELLQPYFNMDDYTFESAKKVCGNVAGLLSWTLAMAIFYGINREVLPLKANLAKQEGRLAVANAELGKAQALLDEKQAELDKVQAKFDAAMNEKMDLLNDADTCRKKMQAASTLIDGLSGEKIRWTQQSKEFKAQINRLVGDILLCTGFLSYLGPFNQIFRNYLLKDQWEMELRARKIPFTENLNLISMLVDPPTIGEWGLQGLPGDDLSIQNGIIVTKATRYPLLIDPQTQGKTWIKSKEKENDLQVTSLNHKYFRTHLEDSLSLGRPLLIEDIHEELDPALDNVLEKNFIKSGTTFKVKVGDKECDIMDTFKLYITTKLPNPAFTPEINAKTSVIDFTVTMKGLENQLLRRVILTEKQELEAERVKLLEDVTFNKRKMKELEDNLLYKLSATKGSLVDDESLIGVLRTTKQTAAEVSEKLHVAAETEIKINAAQEEFRPAATRGSILYFLITEMSMVNIMYQTSLAQFLKLFDQSMARSEKSPLPQKRITNIIEYLTYEVFTYSVRGLYENHKFLFVLLMTLKIDLQRGTVKHREFQALIKGGAALDLKACPPKPYRWILDMTWLNLVELSKLPQFAEIMNQISRNEKGWKSWFDKDAPEEEIIPDGYNDSLDTCHKLLLIRSWCPDRTVFQARKYIADSLEEKYTEPVILNLEKTWEESDTRTPLICFLSMGSDPTNQIDALAKKLKLECRTISMGQGQEVHARKLIQMSMQQGGWVLLQNCHLGLEFMEELLETLITTEASDDSFRVWITTEPHDRFPITLLQTSLKFTNEPPQGVRAGLKRTFAGINQDLLDISNLPMWKPMLYTVAFLHSTVQERRKFGPLGWNIPYEFNSADFSASVQFIQNHLDECDIKKGVSWNTVRYMIGEVQYGGRVTDDFDKRLLNCFARVWFSEKMFEPSFCFYTGYKIPLCKTLDQYFEYIQSLPSLDNPEVFGLHPNADITYQSNTASAVLETITNIQPKESGGGVGETREAIVYRLSEDMLSKLPPDYIPHEVKSRLIKMGHLNSMNIFLRQEIDRMQRVISILRSSLSDLKLAIEGTIIMSENLRDALDNMYDARIPQLWKRVSWDSSTLGFWFTELLERNAQFSTWIFEGRPNVFWMTGFFNPQGFLTAMRQEVTRAHKGWALDTVTIHNEVLRQTKEEITSPPGEGVYIYGLYMDGAAWDRRNGKLMESTPKVLFTQLPVLHIFAINSTAPKDPKLYVCPIYKKPRRTDLTFITVVYLRTVLSPDHWILRGVALLCDIK

SEQ ID NO: 18024 - protein, 449 aa, Homo sapiens
MALDILAMAPLYQAPAINRIGPKTDPSKRPADPLKPLVLSRTKLTTIEAKRIMSILDEAIYKVELVTLLSYVASNREDMEGMLGEDVMRAVREHEDLCQVLLENVRCLKEKERQLQEQKEAEEEGWLRDRLLSIELQKSSLSPLMQQIKDSTKNVLRLLLSNPQAARLLQMQTQGRSAEAQNFIDSLIELRGFLFEKLLTSPMEARDKAQFLQDISRQNSNNQQIIDTLEKELAERMKNRNAEVEKENFVIQELKNHLHQVLKFSENSLVRTKQEAEKQQKADFRASQARVAKIQQEILQLQSQFYNLVMENREAEQALRKKKYKVETEIENWIQKYDTEMGEKQEELEDLDAVHREEKISLEELRRRHKVLVGEFAQIREEREINSKKRMEAEQEMVRMVRAATLIQALWKGYLVRSLLRSKKKRGKGKAKDKEKGKQKGKEKGKGKK

SEQ ID NO: 18025 - protein, 347 aa, Homo sapiens
MALDILAMAPLYQAPAINRIGPKTDPSKRPADPLKPLVLSRTKLTTIEAKRIMSILDEAIYKVELVTLLSYVASNREDMEGMLGEDVMRAVREHEDLCQVLLENVRCLKEKERQLQEQKEAEEEGWLRDRLLSIELQKSSLSPLMQQIKDSTKNVLRLLLSNPQAARLLQMQTQGRSAEAQNFIDSLIELRGFLFEKLLTSPMEARDKAQFLQDISRQNSNNQQIIDTLEKELAERMKNRNAEEELEDLDAVHREEKISLEELRRRHKVLVGEFAQIREEREINSKKRMEAEQEMVRMVRAATLIQALWKGYLVRSLLRSKKKRGKGKAKDKEKGKQKGKEKGKGKK

SEQ ID NO: 18026 - protein, 327 aa, Homo sapiens
MALDILAMAPLYQAPAINRIGPKTDPSKRPADPLKPLVLSRTKLTTIEAKRIMSILDEAIYKVELVTLLSYVASNREDMEGMLGEDVMRAVREHEDLCQVLLENVRCLKEKERQLQEQKEAEEEGWLRDRLLSIELQKSSLSPLMQQIKDSTKNVLRLLLSNPQAARLLQMQTQGRSAEAQNFIDSLIELRGFLFEKLLTSPMEARDKAQFLQDISRQNSNNQQIIDTLEKELAERMKNRNAEVLFHSIAEITEEATQIFCWLGFSSMIDFFFKMESRSVVQTRVQWCNLDSLQPLPPRFKRFSHHSLPSSWDYRRMPPRPANFLYF

SEQ ID NO: 18027 - protein, 730 aa, Homo sapiens
MLFNSVLRQPQLGVLRNGWSSQYPLQSLLTGYQCSGNDEHTSYGETGVPVPPFGCTFSSAPNMEHVLAVANEEGFVRLYNTESQSFRKKCFKEWMAHWNAVFDLAWVPGELKLVTAAGDQTAKFWDVKAGELIGTCKGHQCSLKSVAFSKFEKAVFCTGGRDGNIMVWDTRCNKKDGFYRQVNQISGAHNTSDKQTPSKPKKKQNSKGLAPSVDFQQSVTVVLFQDENTLVSAGAVDGIIKVWDLRKNYTAYRQEPIASKSFLYPGSSTRKLGYSSLILDSTGSTLFANCTDDNIYMFNMTGLKTSPVAIFNGHQNSTFYVKSSLSPDDQFLVSGSSDEAAYIWKVSTPWQPPTVLLGHSQEVTSVCWCPSDFTKIATCSDDNTLKIWRLNRGLEEKPGGDKLSTVGWASQKKKESRPGLVTVTSSQSTPAKAPRAKCNPSNSSPSSAACAPSCAGDLPLPSNTPTFSIKTSPAKARSPINRRGSVSSVSPKPPSSFKMSIRNWVTRTPSSSPPITPPASETKIMSPRKALIPVSQKSSQAEACSESRNRVKRRLDSSCLESVKQKCVKSCNCVTELDGQVENLHLDLCCLAGNQEDLSKDSLGPTKSSKIEGAGTSISEPPSPISPYASESCGTLPLPLRPCGEGSEMVGKENSSPENKNWLLAMAAKRKAENPSPRSPSSQTPNSRRQSGKKLPSPVTITPSSMRKICTYFHRKSQEDFCGPEHSTEL

SEQ ID NO: 18028 - protein, 211 aa, Homo sapiens
MLFNSVLRQPQLGVLRNAPNMEHVLAVANEEGFVRLYNTESQSFRKKCFKEWMAHWNAVFDLAWVPGELKLVTAAGDQTAKFWDVKAGELIGTCKGHQCSLKSVAFSKFEKAVFCTGGRDGNIMVWDTRCNKKDGFYRQVNQISGAHNTSDKQTPSKPKKKQNSKGLAPSVDFQQSVTVVLFQDENTLVSAGAVDGIFKSDFGFHWLYFIC

SEQ ID NO: 18029 - protein, 453 aa, Homo sapiens
MASSLPWLCIILWLENALGKLEVEGNFYSENVSRILDNLLEGYDNRLRPGFGGAVTEVKTDIYVTSFGPVSDVEMEYTMDVFFRQTWTDERLKFGGPTEILSLNNLMVSKIWTPDTFFRNGKKSIAHNMTTPNKLFRIMQNGTILYTMRLTINADCPMRLVNFPMDGHACPLKFGSYAYPKSEIIYTWKKGPLYSVEVPEESSSLLQYDLIGQTVSSETIKSNTGEYVIMTVYFHLQRKMGYFMIQIYTPCIMTVILSQVSFWINKESVPARTVFGITTVLTMTTLSISARHSLPKVSYATAMDWFIAVCFAFVFSALIEFAAVNYFTNLQTQKAKRKAQFAAPPTVTISKATEPLEAEIVLHPDSKYHLKKRITSLSLPIVSSSEANKVLTRAPILQSTPVTPPPLSPAFGGTSKIDQYSRILFPVAFAGFNLVYWVVYLSKDTMEVSSSVE

SEQ ID NO: 18030 - protein, 627 aa, Homo sapiens
MIEESGNKRKTMAEKRQLFIEMRAQNFDVIRLSTYRTACKLRFVQKRCNLHLVDIWNMIEAFRDNGLNTLDHTTEISVSRLETVISSIYYQLNKRLPSTHQISVEQSISLLLNFMIAAYDSEGRGKLTVFSVKAMLATMCGGKMLDKLRYVFSQMSDSNGLMIFSKFDQFLKEVLKLPTAVFEGPSFGYTEHSVRTCFPQQRKIMLNMFLDTMMADPPPQCLVWLPLMHRLAHVENVFHPVECSYCRCESMMGFRYRCQQCHNYQLCQNCFWRGHAGGPHSNQHQMKEHSSWKSPAKKLSHAISKSLGCVPTREPPHPVFPEQPEKPLDLAHIVPPRPLTNMNDTMVSHMSSGVPTPTKRLQYSQDIPSHLADEHALIASYVARLQHCARVLDSPSRLDEEHRLIARYAARLAAEAGNVTRPPTDLSFNFDANKQQRQLIAELENKNREILQEIQRLRLEHEQASQPTPEKAQQNPTLLAELRLLRQRKDELEQRMSALQESRRELMVQLEELMKLLKEEEQKQAAQATGSPHTSPTHGGGRPMPMPVRSTSAGSTPTHCPQDSLSGVGGDVQEAFAQGTRRNLRNDLLVAADSITNTMSSLVKELHSAEEGAEEEEEKMQNGKDRG

SEQ ID NO: 18031 - protein, 567 aa, Homo sapiens
MIEESGNKRKTMAEKRQLFIEMRAQNFDVIRLSTYRTACKLRFVQKRCNLHLVDIWNMIEAFRDNGLNTLDHTTEISVSRLETVISSIYYQLNKRLPSTHQISVEQSISLLLNFMIAAYDSEGRGKLTVFSVKAMLATMCGGKMLDKLRYVFSQMSDSNGLMIFSKFDQFLKEVLKLPTAVFEGPSFGYTEHSVRTCFPQQRKIMLNMFLDTMMADPPPQCLVWLPLMHRLAHVENVFHPVECSYCRCESMMGFRYRCQQCHNYQLCQNCFWRGHAGGPHSNQHQMKEHSSWKSPAKKLSHAISKSLGCVPTREPPHPVFPEQPEKPLDLAHIVPPRPLTNMNDTMVSHMSSGVPTPTKSVLDSPSRLDEEHRLIARYAARLAAEAGNVTRPPTDLSFNFDANKQQRQLIAELENKNREILQEIQRLRLEHEQASQPTPEKAQQNPTLLAELRLLRQRKDELEQRMSALQESRRELMVQLEELMKLLKEEEQKQAAQATGSPHTSPTHGGGRPMPMPVRSTSAGSTPTHCPQDSLSGVGGDVQEAFAQAEEGAEEEEEKMQNGKDRG

SEQ ID NO: 18032 - protein, 558 aa, Homo sapiens
MIEESGNKRKTMAEKRQLFIEMRAQNFDVIRLSTYRTACKLRFVQKRCNLHLVDIWNMIEAFRDNGLNTLDHTTEISVSRLETVISSIYYQLNKRLPSTHQISVEQSISLLLNFMIAAYDSEGRGKLTVFSVKAMLATMCGGKMLDKLRYVFSQMSDSNGLMIFSKFDQFLKEVLKLPTAVFEGPSFGYTEHSVRTCFPQQRKIMLNMFLDTMMADPPPQCLVWLPLMHRLAHVENVFHPVECSYCRCESMMGFRYRCQQCHNYQLCQNCFWRGHAGGPHSNQHQMKEHSSWKSPAKKLSHAISKSLGCVPTREPPHPVFPEQPEKPLDLAHIVPPRPLTNMNDTMVSHMSSGVPTPTKRLQYSQDIPSHLADEHALIASYVARLQHCARVLDSPSRLDEEHRLIARYAARLAAEAGNVTRPPTDLSFNFDANKQQRQLIAELENKNREILQEIQRLRLEHEQASQPTPEKAQQNPTLLAELRLLRQRKDELEQRMSALQESRRELMVQLEELMKLLKEEEQKQAVSELRNFPPDSRSFARSSFPHINVSPLLPAHHL

SEQ ID NO: 18033 - protein, 597 aa, Homo sapiens
MIEESGNKRKTMAEKRQLFIEMRAQNFDVIRLSTYRTACKLRFVQKRCNLHLVDIWNMIEAFRDNGLNTLDHTTEISVSRLETVISSIYYQLNKRLPSTHQISVEQSISLLLNFMIAAYDSEGRGKLTVFSVKAMLATMCGGKMLDKLRYVFSQMSDSNGLMIFSKFDQFLKEVLKLPTAVFEGPSFGYTEHSVRTCFPQQRKIMLNMFLDTMMADPPPQCLVWLPLMHRLAHVENVFHPVECSYCRCESMMGFRYRCQQCHNYQLCQNCFWRGHAGGPHSNQHQMKEHSSWKSPAKKLSHAISKSLGCVPTREPPHPVFPEQPEKPLDLAHIVPPRPLTNMNDTMVSHMSSGVPTPTKRLQYSQDIPSHLADEHALIASYVARLQHCARVLDSPSRLDEEHRLIARYAARLAAEAGNVTRPPTDLSFNFDANKQQRQLIAELENKNREILQEIQRLRLEHEQASQPTPEKAQQNPTLLAELRLLRQRKDELEQRMSALQESRRELMVQLEELMKLLKEEEQKQAAQATGSPHTSPTHGGGRPMPMPVRSTSAGSTPTHCPQDSLSGVGGDVQEAFAQAEEGAEEEEEKMQNGKDRG

SEQ ID NO: 18034 - protein, 560 aa, Homo sapiens
MIEESGNKRKTMAEKRQLFIEMRAQNFDVIRLSTYRTACKLRFVQKRCNLHLVDIWNMIEAFRDNGLNTLDHTTEISVSRLETVISSIYYQLNKRLPSTHQISVEQSISLLLNFMIAAYDSEGRGKLTVFSVKAMLATMCGGKMLDKLRYVFSQMSDSNGLMIFSKFDQFLKEVLKLPTAVFEGPSFGYTEHSVRTCFPQQRKIMLNMFLDTMMADPPPQCLVWLPLMHRLAHVENVFHPVECSYCRCESMMGFRYRCQQCHNYQLCQNCFWRGHAGGPHSNQHQMKEHSSWKSPAKKLSHAISKSLGCVPTREPPHPVFPEQPEKPLDLAHIVPPRPLTNMNDTMVSHMSSGVPTPTKSVLDSPSRLDEEHRLIARYAARLAAEAGNVTRPPTDLSFNFDANKQQRQLIAELENKNREILQEIQRLRLEHEQASQPTPEKAQQNPTLLAELRLLRQRKDELEQRMSALQESRRELMVQLEELMKLLKAQATGSPHTSPTHGGGRPMPMPVRSTSAGSTPTHCPQDSLSGVGGDVQEAFAQAEEGAEEEEEKMQNGKDRG

SEQ ID NO: 18035 - protein, 545 aa, Homo sapiens
MIEAFRDNGLNTLDHTTEISVSRLETVISSIYYQLNKRLPSTHQISVEQSISLLLNFMIAAYDSEGRGKLTVFSVKAMLATMCGGKMLDKLRYVFSQMSDSNGLMIFSKFDQFLKEVLKLPTAVFEGPSFGYTEHSVRTCFPQQRKIMLNMFLDTMMADPPPQCLVWLPLMHRLAHVENVFHPVECSYCRCESMMGFRYRCQQCHNYQLCQNCFWRGHAGGPHSNQHQMKEHSSWKSPAKKLSHAISKSLGCVPTREPPHPVFPEQPEKPLDLAHIVPPRPLTNMNDTMVSHMSSGVPTPTKRLQYSQDIPSHLADEHALIASYVARLQHCARVLDSPSRLDEEHRLIARYAARLAAEAGNVTRPPTDLSFNFDANKQQRQLIAELENKNREILQEIQRLRLEHEQASQPTPEKAQQNPTLLAELRLLRQRKDELEQRMSALQESRRELMVQLEELMKLLKAQATGSPHTSPTHGGGRPMPMPVRSTSAGSTPTHCPQDSLSGVGGDVQEAFAQGTRRNLRNDLLVAADSITNTMSSLVKELHSG

SEQ ID NO: 18036 - protein, 609 aa, Homo sapiens
MIEESGNKRKTMAEKRQLFIEMRAQNFDVIRLSTYRTACKLRFVQKRCNLHLVDIWNMIEAFRDNGLNTLDHTTEISVSRLETVISSIYYQLNKRLPSTHQISVEQSISLLLNFMIAAYDSEGRGKLTVFSVKAMLATMCGGKMLDKLRYVFSQMSDSNGLMIFSKFDQFLKEVLKLPTAVFEGPSFGYTEHSVRTCFPQQRKIMLNMFLDTMMADPPPQCLVWLPLMHRLAHVENVFHPVECSYCRCESMMGFRYRCQQCHNYQLCQNCFWRGHAGGPHSNQHQMKEHSSWKSPAKKLSHAISKSLGCVPTREPPHPVFPEQPEKPLDLAHIVPPRPLTNMNDTMVSHMSSGVPTPTKRLQYSQDIPSHLADEHALIASYVARLQHCARVLDSPSRLDEEHRLIARYAARLAAEAGNVTRPPTDLSFNFDANKQQRQLIAELENKNREILQEIQRLRLEHEQASQPTPEKAQQNPTLLAELRLLRQRKDELEQRMSALQESRRELMVQLEELMKLLKEEEQKQAAQATGSPHTSPTHGGGRPMPMPVRSTSAGSTPTHCPQDSLSGVGGDVQEAFAQGTRRNLRNDLLVAADSITNTMSSLVKELHSG

SEQ ID NO: 18037 - protein, 4307 aa, Homo sapiens
MANGTADVRKLFIFTTTQNYFGLMSELWDQPLLCNCLEINNFLDDGNQMLLRVQRSDAGISFSNTIEFGDTKDKVLVFFKLRPEVITDENLHDNILVSSMLESPISSLYQAVRQVFAPMLLKDQEWSRNFDPKLQNLLSELEAGLGIVLRRSDTNLTKLKFKEDDTRGILTPSDEFQFWIEQAHRGNKQISKERANYFKELFETIAREFYNLDSLSLLEVVDLVETTQDVVDDVWRQTEHDHYPESRMLHLLDIIGGSFGRFVQKKLGTLNLWEDPYYLVKESLKAGISICEQWVIVCNHLTGQVWQRYVPHPWKNEKYFPETLDKLGKRLEEVLAIRTIHEKFLYFLPASEEKIICLTRVFEPFTGLNPVQYNPYTEPLWKAAVSQYEKIIAPAEQKIAGKLKNYISEIQDSPQQLLQAFLKYKELVKRPTISKELMLERETLLARLVDSIKDFRLDFENRCRGIPGDASGPLSGKNLSEVVNSIVWVRQLELKVDDTIKIAEALLSDLPGFRCFHQSAKDLLDQLKLYEQEQFDDWSRDIQSGLSDSRSGLCIEASSRIMELDSNDGLLKVHYSDRLVILLREVRQLSALGFVIPAKIQQVANIAQKFCKQAIILKQVAHFYNSIDQQMIQSQRPMMLQSALAFEQIIKNSKAGSGGKSQITWDNPKELEGYIQKLQNAAERLATENRKLRKWHTTFCEKVVVLMNIDLLRQQQRWKDGLQELRTGLATVEAQGFQASDMHAWKQHWNHQLYKALEHQYQMGLEALNENLPEINIDLTYKQGRLQFRPPFEEIRAKYYREMKRFIGIPNQFKGVGEAGDESIFSIMIDRNASGFLTIFSKAEDLFRRLSAVLHQHKEWIVIGQVDMEALVEKHLFTVHDWEKNFKALKIKGKEVERLPSAVKVDCLNINCNPVKTVIDDLIQKLFDLLVLSLKKSIQAHLHEIDTFVTEAMEVLTIMPQSVEEIGDANLQYSKLQERKPEILPLFQEAEDKNRLLRTVAGGGLETISNLKAKWDKFELMMESHQLMIKDQIEVMKGNVKSRLQIYYQELEKFKARWDQLKPGDDVIETGQHNTLDKSAKLIKEKKIEFDDLEVTRKKLVDDCHHFRLEEPNFSLASSISKDIESCAQIWAFYEEFQQGFQEMANEDWITFRTKTYLFEEFLMNWHDRLRKVEEHSVMTVKLQSEVDKYKIVIPILKYVRGEHLSPDHWLDLFRLLGLPRGTSLEKLLFGDLLRVADTIVAKAADLKDLNSRAQGEVTIREALRELDLWGVGAVFTLIDYEDSQSRTMKLIKDWKDIVNQVGDNRCLLQSLKDSPYYKGFEDKVSIWERKLAELDEYLQNLNHIQRKWVYLEPIFGRGALPKEQTRFNRVDEDFRSIMTDIKKDNRVTTLTTHAGIRNSLLTILDQLQRCQKSLNEFLEEKRSAFPRFYFIGDDDLLEILGQSTNPSVIQSHLKKLFAGINSVCFDEKSKHITAMKSLEGEVVPFKNKVPLSNNVETWLNDLALEMKKTLEQLLKECVTTGRSSQGAVDPSLFPSQILCLAEQIKFTEDVENAIKDHSLHQIETQLVNKLEQYTNIDTSSEDPGNTESGILELKLKALILDIIHNIDVVKQLNQIQVHTTEDWAWKKQLRFYMKSDHTCCVQMVDSEFQYTYEYQGNASKLVYTPLTDKCYLTLTQAMKMGLGGNPYGPAGTGKTESVKALGGLLGRQVLVFNCDEGIDVKSMGRIFVGLVKCGAWGCFDEFNRLEESVLSAVSMQIQTIQDALKNHRTVCELLGKEVEVNSNSGIFITMNPAGKGYGGRQKLPDNLKQLFRPVAMSHPDNELIAEVILYSEGFKDAKVLSRKLVAIFNLSRELLTPQQHYDWGLRALKTVLRGSGNLLRQLNKSGTTQNANESHIVVQALRLNTMSKFTFTDCTRFDALIKDVFPGIELKEVEYDELSAALKQVFEEANYEIIPNQIKKALELYEQLCQRMGVVIVGPSGAGKSTLWRMLRAALCKTGKVVKQYTMNPKAMPRYQLLGHIDMDTREWSDGVLTNSARQVVREPQDVSSWIICDGDIDPEWIESLNSVLDDNRLLTMPSGERIQFGPNVNFVFETHDLSCASPATISRMGMIFLSDEETDLNSLIKSWLRNQPAEYRNNLENWIGDYFEKALQWVLKQNDYVVETSLVGTVMNGLSHLHGCRDHDEFIINLIRGLGGNLNMKSRLEFTKEVFHWARESPPDFHKPMDTYYDSTRGRLATYVLKKPEDLTADDFSNGLTLPVIQTPDMQRGLDYFKPWLSSDTKQPFILVGPEGCGKGMLLRYAFSQLRSTQIATVHCSAQTTSRHLLQKLSQTCMVISTNTGRVYRPKDCERLVLYLKDINLPKLDKWGTSTLVAFLQQVLTYQGFYDENLEWVGLENIQIVASMSAGGRLGRHKLTTRFTSIVRLCSIDYPEREQLQTIYGAYLEPVLHKNLKNHSIWGSSSKIYLLAGSMVQVYEQVRAKFTVDDYSHYFFTPCILTQWVLGLFRYDLEGGSSNHPLDYVLEIVAYEARRLFRDKIVGAKELHLFDIILTSVFQGDWGSDILDNMSDSFYVTWGARHNSGARAAPGQPLPPHGKPLGKLNSTDLKDVIKKGLIHYGRDNQNLDILLFHEVLEYMSRIDRVLSFPGGSLLLAGRSGVGRRTITSLVSHMHGAVLFSPKISRGYELKQFKNDLKHVLQLAGIEAQQVVLLLEDYQFVHPTFLEMINSLLSSGEVPGLYTLEELEPLLLPLKDQASQDGFFGPVFNYFTYRIQQNLHIVLIMDSANSNFMINCESNPALHKKCQVLWMEGWSNSSMKKIPEMLFSETGGGEKYNDKKRKEEKKKNSVDPDFLKSFLLIHESCKAYGATPSRYMTFLHVYSAISSSKKKELLKRQSHLQAGVSKLNEAKALVDELNRKAGEQSVLLKTKQDEADAALQMITVSMQDASEQKTELERLKHRIAEEVVKIEERKNKIDDELKEVQPLVNEAKLAVGNIKPESLSEIRSLRMPPDVIRDILEGVLRLMGIFDTSWVSMKSFLAKRGVREDIATFDARNISKEIRESVEELLFKNKGSFDPKNAKRASTAAAPLAAWVKANIQYSHVLERIHPLETEQAGLESNLKKTEDRKRKLEELLNSVGQKVSELKEKFQSRTSEAAKLEAEVSKAQETIKAAEVLINQLDREHKRWNAQVVEITEELATLPKRAQLAAAFITYLSAAPESLRKTCLEEWTKSAGLEKFDLRRFLCTESEQLIWKSEGLPSDDLSIENALVILQSRVCPFLIDPSSQATEWLKTHLKDSRLEVINQQDSNFITALELAVRFGKTLIIQEMDGVEPVLYPLLRRDLVAQGPRYVVQIGDKIIDYNEEFRLFLSTRNPNPFIPPDAASIVTEVNFTTTRSGLRGQLLALTIQHEKPDLEEQKTKLLQQEEDKKIQLAKLEESLLETLATSQGNILENKDLIESLNQTKASSALIQESLKESYKLQISLDQERDAYLPLAESASKMYFIISDLSKINNMYRFSLAAFLRLFQRALQNKQDSENTEQRIQSLISSLQHMVYEYICRCLFKADQLMFALHFVRGMHPELFQENEWDTFTGVVVGDMLRKADSQQKIRDQLPSWIDQERSWAVATLKIALPSLYQTLCFEDAALWRTYYNNSMCEQEFPSILAKKVSLFQQILVVQALRPDRLQSAMALFACKTLGLKEVSPLPLNLKRLYKETLEIEPILIIISPGADPSQELQELANAERSGECYHQVAMGQGQADLAIQMLKECARNGDWLCLKNLHLVVSWLPVLEKELNTLQPKDTFRLWLTAEVHPNFTPILLQSSLKITYESPPGLKKNLMRTYESWTPEQISKKDNTHRAHALFSLAWFHAACQERRNYIPQGWTKFYEFSLSDLRAGYNIIDRLFDGAKDVQWEFVHGLLENAIYGGRIDNYFDLRVLQSYLKQFFNSSVIDVFNQRNKKSIFPYSVSLPQSCSILDYRAVIEKIPEDDKPSFFGLPANIARSSQRMISSQVISQLRILGRSITAGSKFDREIWSNELSPVLNLWKKLNQNSNLIHQKVPPPNDRQGSPILSFIILEQFNAIRLVQSVHQSLAALSKVIRGTTLLSSEVQKLASALLNQKCPLAWQSKWEGPEDPLQYLRGLVARALAIQNWVDKAEKQALLSETLDLSELFHPDTFLNALRQETARAVGRSVDSLKFVASWKGRLQEAKLQIKISGLLLEGCSFDGNQLSENQLDSPSVSSVLPCFMGWIPQDACGPYSPDECISLPVYTSAERDRVVTNIDVPCGGNQDQWIQCGAALFLKNQ

SEQ ID NO: 18038 - protein, 4314 aa, Homo sapiens
MANGTADVRKLFIFTTTQNYFGLMSELWDQPLLCNCLEINNFLDDGNQMLLRVQRSDAGISFSNTIEFGDTKDKVLVFFKLRPEVITDENLHDNILVSSMLESPISSLYQAVRQVFAPMLLKDQEWSRNFDPKLQNLLSELEAGLGIVLRRSDTNLTKLKFKEDDTRGILTPSDEFQFWIEQAHRGNKQISKERANYFKELFETIAREFYNLDSLSLLEVVDLVETTQDVVDDVWRQTEHDHYPESRMLHLLDIIGGSFGRFVQKKLGTLNLWEDPYYLVKESLKAGISICEQWVIVCNHLTGQVWQRYVPHPWKNEKYFPETLDKLGKRLEEVLAIRTIHEKFLYFLPASEEKIICLTRVFEPFTGLNPVQYNPYTEPLWKAAVSQYEKIIAPAEQKIAGKLKNYISEIQDSPQQLLQAFLKYKELVKRPTISKELMLERETLLARLVDSIKDFRLDFENRCRGIPGDASGPLSGKNLSEVVNSIVWVRQLELKVDDTIKIAEALLSDLPGFRCFHQSAKDLLDQLKLYEQEQFDDWSRDIQSGLSDSRSGLCIEASSRIMELDSNDGLLKVHYSDRLVILLREVRQLSALGFVIPAKIQQVANIAQKFCKQAIILKQVAHFYNSIDQQMIQSQRPMMLQSALAFEQIIKNSKAGSGGKSQITWDNPKELEGYIQKLQNAAERLATENRKLRKWHTTFCEKVVVLMNIDLLRQQQRWKDGLQELRTGLATVEAQGFQASDMHAWKQHWNHQLYKALEHQYQMGLEALNENLPEINIDLTYKQGRLQFRPPFEEIRAKYYREMKRFIGIPNQFKGVGEAGDESIFSIMIDRNASGFLTIFSKAEDLFRRLSAVLHQHKEWIVIGQVDMEALVEKHLFTVHDWEKNFKALKIKGKEVERLPSAVKVDCLNINCNPVKTVIDDLIQKLFDLLVLSLKKSIQAHLHEIDTFVTEAMEVLTIMPQSVEEIGDANLQYSKLQERKPEILPLFQEAEDKNRLLRTVAGGGLETISNLKAKWDKFELMMESHQLMIKDQIEVMKGNVKSRLQIYYQELEKFKARWDQLKPGDDVIETGQHNTLDKSAKLIKEKKIEFDDLEVTRKKLVDDCHHFRLEEPNFSLASSISKDIESCAQIWAFYEEFQQGFQEMANEDWITFRTKTYLFEEFLMNWHDRLRKVEEHSVMTVKLQSEVDKYKIVIPILKYVRGEHLSPDHWLDLFRLLGLPRGTSLEKLLFGDLLRVADTIVAKAADLKDLNSRAQGEVTIREALRELDLWGVGAVFTLIDYEDSQSRTMKLIKDWKDIVNQVGDNRCLLQSLKDSPYYKGFEDKVSIWERKLAELDEYLQNLNHIQRKWVYLEPIFGRGALPKEQTRFNRVDEDFRSIMTDIKKDNRVTTLTTHAGIRNSLLTILDQLQRCQKSLNEFLEEKRSAFPRFYFIGDDDLLEILGQSTNPSVIQSHLKKLFAGINSVCFDEKSKHITAMKSLEGEVVPFKNKVPLSNNVETWLNDLALEMKKTLEQLLKECVTTGRSSQGAVDPSLFPSQILCLAEQIKFTEDVENAIKDHSLHQIETQLVNKLEQYTNIDTSSEDPGNTESGILELKLKALILDIIHNIDVVKQLNQIQVHTTEDWAWKKQLRFYMKSDHTCCVQMVDSEFQYTYEYQGNASKLVYTPLTDKCYLTLTQAMKMGLGGNPYGPAGTGKTESVKALGGLLGRQVLVFNCDEGIDVKSMGRIFVGLVKCGAWGCFDEFNRLEESVLSAVSMQIQTIQDALKNHRTVCELLGKEVEVNSNSGIFITMNPAGKGYGGRQKLPDNLKQLFRPVAMSHPDNELIAEVILYSEGFKDAKVLSRKLVAIFNLSRELLTPQQHYDWGLRALKTVLRGSGNLLRQLNKSGTTQNANESHIVVQALRLNTMSKFTFTDCTRFDALIKDVFPGIELKEVEYDELSAALKQVFEEANYEIIPNQIKKALELYEQLCQRMGVVIVGPSGAGKSTLWRMLRAALCKTGKVVKQYTMNPKAMPRYQLLGHIDMDTREWSDGVLTNSARQVVREPQDVSSWIICDGDIDPEWIESLNSVLDDNRLLTMPSGERIQFGPNVNFVFETHDLSCASPATISRMGMIFLSDEETDLNSLIKSWLRNQPAEYRNNLENWIGDYFEKALQWVLKQNDYVVETSLVGTVMNGLSHLHGCRDHDEFIINLIRGLGGNLNMKSRLEFTKEVFHWARESPPDFHKPMDTYYDSTRGRLATYVLKKPEDLTADDFSNGLTLPVIQTPDMQRGLDYFKPWLSSDTKQPFILVGPEGCGKGMLLRYAFSQLRSTQIATVHCSAQTTSRHLLQKLSQTCMVISTNTGRVYRPKDCERLVLYLKDINLPKLDKWGTSTLVAFLQQVLTYQGFYDENLEWVGLENIQIVASMSAGGRLGRHKLTTRFTSIVRLCSIDYPEREQLQTIYGAYLEPVLHKNLKNHSIWGSSSKIYLLAGSMVQVYEQVRAKFTVDDYSHYFFTPCILTQWVLGLFRYDLEGGSSNHPLDYVLEIVAYEARRLFRDKIVGAKELHLFDIILTSVFQGDWGSDILDNMSDSFYVTWGARHNSGARAAPGQPLPPHGKPLGKLNSTDLKDVIKKGLIHYGRDNQNLDILLFHEVLEYMSRIDRVLSFPGGSLLLAGRSGVGRRTITSLVSHMHGAVLFSPKISRGYELKQFKNDLKHVLQLAGIEAQQVVLLLEDYQFVHPTFLEMINSLLSSGEVPGLYTLEELEPLLLPLKDQASQDGFFGPVFNYFTYRIQQNLHIVLIMDSANSNFMINCESNPALHKKCQVLWMEGWSNSSMKKIPEMLFSETGGGEKYNDKKRKEEKKKNSVDPDFLKSFLLIHESCKAYGATPSRYMTFLHVYSAISSSKKKELLKRQSHLQAGVSKLNEAKALVDELNRKAGEQSVLLKTKQDEADAALQMITVSMQDASEQKTELERLKHRIAEEVVKIEERKNKIDDELKEVQPLVNEAKLAVGNIKPESLSEIRSLRMPPDVIRDILEGVLRLMGIFDTSWVSMKSFLAKRGVREDIATFDARNISKEIRESVEELLFKNKGSFDPKNAKRASTAAAPLAAWVKANIQYSHVLERIHPLETEQAGLESNLKKTEDRKRKLEELLNSVGQKVSELKEKFQSRTSEAAKLEAEVSKAQETIKAAEVLINQLDREHKRWNAQVVEITEELATLPKRAQLAAAFITYLSAAPESLRKTCLEEWTKSAGLEKFDLRRFLCTESEQLIWKSEGLPSDDLSIENALVILQIIGLKSWSRVCPFLIDPSSQATEWLKTHLKDSRLEVINQQDSNFITALELAVRFGKTLIIQEMDGVEPVLYPLLRRDLVAQGPRYVVQIGDKIIDYNEEFRLFLSTRNPNPFIPPDAASIVTEVNFTTTRSGLRGQLLALTIQHEKPDLEEQKTKLLQQEEDKKIQLAKLEESLLETLATSQGNILENKDLIESLNQTKASSALIQESLKESYKLQISLDQERDAYLPLAESASKMYFIISDLSKINNMYRFSLAAFLRLFQRALQNKQDSENTEQRIQSLISSLQHMVYEYICRCLFKADQLMFALHFVRGMHPELFQENEWDTFTGVVVGDMLRKADSQQKIRDQLPSWIDQERSWAVATLKIALPSLYQTLCFEDAALWRTYYNNSMCEQEFPSILAKKVSLFQQILVVQALRPDRLQSAMALFACKTLGLKEVSPLPLNLKRLYKETLEIEPILIIISPGADPSQELQELANAERSGECYHQVAMGQGQADLAIQMLKECARNGDWLCLKNLHLVVSWLPVLEKELNTLQPKDTFRLWLTAEVHPNFTPILLQSSLKITYESPPGLKKNLMRTYESWTPEQISKKDNTHRAHALFSLAWFHAACQERRNYIPQGWTKFYEFSLSDLRAGYNIIDRLFDGAKDVQWEFVHGLLENAIYGGRIDNYFDLRVLQSYLKQFFNSSVIDVFNQRNKKSIFPYSVSLPQSCSILDYRAVIEKIPEDDKPSFFGLPANIARSSQRMISSQVISQLRILGRSITAGSKFDREIWSNELSPVLNLWKKLNQNSNLIHQKVPPPNDRQGSPILSFIILEQFNAIRLVQSVHQSLAALSKVIRGTTLLSSEVQKLASALLNQKCPLAWQSKWEGPEDPLQYLRGLVARALAIQNWVDKAEKQALLSETLDLSELFHPDTFLNALRQETARAVGRSVDSLKFVASWKGRLQEAKLQIKISGLLLEGCSFDGNQLSENQLDSPSVSSVLPCFMGWIPQDACGPYSPDECISLPVYTSAERDRVVTNIDVPCGGNQDQWIQCGAALFLKNQ

SEQ ID NO: 18039 - protein, 920 aa, Homo sapiens
MANGTADVRKLFIFTTTQNYFGLMSELWDQPLLCNCLEINNFLDDGNQMLLRVQRSDAGISFSNTIEFGDTKDKVLVFFKLRPEVITDENLHDNILVSSMLESPISSLYQAVRQVFAPMLLKDQEWSRNFDPKLQNLLSELEAGLGIVLRRSDTNLTKLKFKEDDTRGILTPSDEFQFWIEQAHRGNKQISKERANYFKELFETIAREFYNLDSLSLLEVVDLVETTQDVVDDVWRQTEHDHYPESRMLHLLDIIGGSFGRFVQKKLGTLNLWEDPYYLVKESLKAGISICEQWVIVCNHLTGQVWQRYVPHPWKNEKYFPETLDKLGKRLEEVLAIRTIHEKFLYFLPASEEKIICLTRVFEPFTGLNPVQYNPYTEPLWKAAVSQYEKIIAPAEQKIAGKLKNYISEIQDSPQQLLQAFLKYKELVKRPTISKELMLERETLLARLVDSIKDFRLDFENRCRGIPGDASGPLSGKNLSEVVNSIVWVRQLELKVDDTIKIAEALLSDLPGFRCFHQSAKDLLDQLKLYEQEQFDDWSRDIQSGLSDSRSGLCIEASSRIMELDSNDGLLKVHYSDRLVILLREVRQLSALGFVIPAKIQQVANIAQKFCKQAIILKQVAHFYNSIDQQMIQSQRPMMLQSALAFEQIIKNSKAGSGGKSQITWDNPKELEGYIQKLQNAAERLATENRKLRKWHTTFCEKVVVLMNIDLLRQQQRWKDGLQELRTGLATVEAQCPLAWQSKWEGPEDPLQYLRGLVARALAIQNWVDKAEKQALLSETLDLSELFHPDTFLNALRQETARAVGRSVDSLKFVASWKGRLQEAKLQIKISGLLLEGCSFDGNQLSENQLDSPSVSSVLPCFMGWIPQDACGPYSPDECISLPVYTSAERDRVVTNIDVPCGGNQDQWIQCGAALFLKNQ

SEQ ID NO: 18040 - protein, 492 aa, Homo sapiens [sequence omitted]

SEQ ID NO: 18041 - protein, 620 aa, Homo sapiens
MSRPGHGGLMPVNGLGFPPQNVARVVVWEWLNEHSRWRPYTATVCHHIENVLKEDARGSVVLGQVDAQLVPYIIDLQSMHQFRQDTGTMRPVRRNFYDPSSAPGKGIVWEWENDGGAWTAYDMDICITIQNAYEKQHPWLDLSSLGFCYLIYFNSMSQMNRQTRRRRRLRRRLDLAYPLTVGSIPKSQSWPVGASSGQPCSCQQCLLVNSTRAASNAILASQRRKAPPAPPLPPPPPPGGPPGALAVRPSATFTGAALWAAPAAGPAEPAPPPGAPPRSPGAPGGARTPGQNNLNRPGPQRTTSVSARASIPPGVPALPVKNLNGTGPVHPALAGMTGILLCAAGLPVCLTRAPKPILHPPPVSKSDVKPVPGVPGVCRKTKKKHLKKSKNPEDVVRRYMQKVKNPPDEDCTICMERLVTASGYEGVLRHKGVRPELVGRLGRCGHMYHLLCLVAMYSNGNKDGSLQCPTCKAIYGEKTGTQPPGKMEFHLIPHSLPGFPDTQTIRIVYDIPTGIQGPEHPNPGKKFTARGFPRHCYLPNNEKGRKVLRLLITAWERRLIFTIGTSNTTGESDTVVWNEIHHKTEFGSNLTGHGYPDASYLDNVLAELTAQGVSEAAAKA

SEQ ID NO: 18042 - protein, 331 aa, Homo sapiens
MASNFNDIVKQGYVKIRSRKLGIFRRCWLVFKKASSKGPRRLEKFPDEKAAYFRNFHKVTELHNIKNITRLPRETKKHAVAIIFHDETSKTFACESELEAEEWCKHLCMECLGTRLNDISLGEPDLLAAGVQREQNERFNVYLMPTPNLDIYGECTMQITHENIYLWDIHNAKVKLVMWPLSSLRRYGRDSTWFTFESGRMCDTGEGLFTFQTREGEMIYQKVHSATLAIAEQHERLMLEMEQKARLQTSLTEPMTLSKSISLPRSAYWHHITRQNSVGEIYSLQGHGFGSSKMSRAQTFPSYAPEQSEEAQQPLSRSSSYGFSYSSSLIQ

SEQ ID NO: 18043 - protein, 385 aa, Homo sapiens
MEWNGLKMIISTMEPQVSNGPTSNTSNGPSSNNRNCPSPMQTGATTDDSKTNLIVNYLPQNMTQEEFRSLFGSIGEIESCKLVRDKITGQSLGYGFVNYIDPKDAEKAINTLNGLRLQTKTIKVSYARPSSASIRDANLYVSGLPKTMTQKELEQLFSQYGRIITSRILVDQVTGVSRGVGFIRFDKRIEAEEAIKGLNGQKPSGATEPITVKFANNPSQKSSQALLSQLYQSPNRRYPGPLHHQAQRFRLDNLLNMAYGVKRLMSGPVPPSACPPRFSPITIDGMTSLVGMNIPGHTGTGWCIFVYNLSPDSDESVLWQLFGPFGAVNNVKVIRDFNTNKCKGFGFVTMTNYDEAAMAIASLNGYRLGDRVLQVSFKTNKAHKS

SEQ ID NO: 18044 - protein, 380 aa, Homo sapiens
MVMIISTMEPQVSNGPTSNTSNGPSSNNRNCPSPMQTGATTDDSKTNLIVNYLPQNMTQEEFRSLFGSIGEIESCKLVRDKITGQSLGYGFVNYIDPKDAEKAINTLNGLRLQTKTIKVSYARPSSASIRDANLYVSGLPKTMTQKELEQLFSQYGRIITSRILVDQVTGVSRGVGFIRFDKRIEAEEAIKGLNGQKPSGATEPITVKFANNPSQKSSQALLSQLYQSPNRRYPGPLHHQAQRFRLDNLLNMAYGVKRLMSGPVPPSACPPRFSPITIDGMTSLVGMNIPGHTGTGWCIFVYNLSPDSDESVLWQLFGPFGAVNNVKVIRDFNTNKCKGFGFVTMTNYDEAAMAIASLNGYRLGDRVLQVSFKTNKAHKS

SEQ ID NO: 18045 - protein, 366 aa, Homo sapiens
MVMIISTMEPQVSNGPTSNTSNGPSSNNRNCPSPMQTGATTDDSKTNLIVNYLPQNMTQEEFRSLFGSIGEIESCKLVRDKITGQSLGYGFVNYIDPKDAEKAINTLNGLRLQTKTIKVSYARPSSASIRDANLYVSGLPKTMTQKELEQLFSQYGRIITSRILVDQVTGVSRGVGFIRFDKRIEAEEAIKGLNGQKPSGATEPITVKFANNPSQKSSQALLSQLYQSPNRRYPGPLHHQAQRFRLDNLLNMAYGVKRFSPITIDGMTSLVGMNIPGHTGTGWCIFVYNLSPDSDESVLWQLFGPFGAVNNVKVIRDFNTNKCKGFGFVTMTNYDEAAMAIASLNGYRLGDRVLQVSFKTNKAHKS

SEQ ID NO: 18046 - protein, 383 aa, Homo sapiens
MRLLLLREIVINESRNCSFMIISTMEPQVSNGPTSNTSNGPSSNNRNCPSPMQTGATTDDSKTNLIVNYLPQNMTQEEFRSLFGSIGEIESCKLVRDKITGQSLGYGFVNYIDPKDAEKAINTLNGLRLQTKTIKVSYARPSSASIRDANLYVSGLPKTMTQKELEQLFSQYGRIITSRILVDQVTGVSRGVGFIRFDKRIEAEEAIKGLNGQKPSGATEPITVKFANNPSQKSSQALLSQLYQSPNRRYPGPLHHQAQRFRLDNLLNMAYGVKRFSPITIDGMTSLVGMNIPGHTGTGWCIFVYNLSPDSDESVLWQLFGPFGAVNNVKVIRDFNTNKCKGFGFVTMTNYDEAAMAIASLNGYRLGDRVLQVSFKTNKAHKS

SEQ ID NO: 18047 - protein, 366 aa, Homo sapiens
MEQIISTMEPQVSNGPTSNTSNGPSSNNRNCPSPMQTGATTDDSKTNLIVNYLPQNMTQEEFRSLFGSIGEIESCKLVRDKITGQSLGYGFVNYIDPKDAEKAINTLNGLRLQTKTIKVSYARPSSASIRDANLYVSGLPKTMTQKELEQLFSQYGRIITSRILVDQVTGVSRGVGFIRFDKRIEAEEAIKGLNGQKPSGATEPITVKFANNPSQKSSQALLSQLYQSPNRRYPGPLHHQAQRFRLDNLLNMAYGVKRFSPITIDGMTSLVGMNIPGHTGTGWCIFVYNLSPDSDESVLWQLFGPFGAVNNVKVIRDFNTNKCKGFGFVTMTNYDEAAMAIASLNGYRLGDRVLQVSFKTNKAHKS

SEQ ID NO: 18048 - protein, 369 aa, Homo sapiens
MRLKNQIISTMEPQVSNGPTSNTSNGPSSNNRNCPSPMQTGATTDDSKTNLIVNYLPQNMTQEEFRSLFGSIGEIESCKLVRDKITGQSLGYGFVNYIDPKDAEKAINTLNGLRLQTKTIKVSYARPSSASIRDANLYVSGLPKTMTQKELEQLFSQYGRIITSRILVDQVTGVSRGVGFIRFDKRIEAEEAIKGLNGQKPSGATEPITVKFANNPSQKSSQALLSQLYQSPNRRYPGPLHHQAQRFRLDNLLNMAYGVKRFSPITIDGMTSLVGMNIPGHTGTGWCIFVYNLSPDSDESVLWQLFGPFGAVNNVKVIRDFNTNKCKGFGFVTMTNYDEAAMAIASLNGYRLGDRVLQVSFKTNKAHKS

SEQ ID NO: 18049 - protein, 54 aa, Homo sapiens
MRFQQFLFAFFIFIMSLLLISGQRPVNLTMRRKLRKHNCLQRRCMPLHSRVPFP

SEQ ID NO: 18050 - protein, 295 aa, Homo sapiens
MRHSVARPTRLPRRLSPFWDPATCKNLEGGAGEVVRGRDPRRLRTSRSTEILGEDLAGPSAGAAARPAAPPPQPREPGAPGLRRAPPRTRMDSSGLGPCSEAPLHTSAGLSGRNLRAAGGVLPVDLERERAALCARQSGHGPPAVRWLLGSRGAESGGLARRRVAAEHAQPSANLVCRSALETSAFPPSKPKSPRGRVRARSSDGRLRHPAWRAGSGGRGGRGPSAELASRYWGRRRALPGAADLRPKGARADDRRPLRAGRKLHLPEAARLPGNVGKSGEPHKAGEVGNHPRDS

SEQ ID NO: 18051 - protein, 1142 aa, Homo sapiens
MLVLRCRLGTSFPKLDNLVPKGKMKILLVFLGLLGNSVAMPMHMPRMPGFSSKSEEMMRYNQFNFMNGPHMAHLGPFFGNGLPQQFPQYQMPMWPQPPPNTWHPRKSSAPKRHNKTDQTQETQKPNQTQSKKPPQKRPLKQPSHNQPQPEEEAQPPQAFPPFGNGLFPYQQPPWQIPQRLPPPGYGRPPISNEEGGNPYFGYFGYHGFGGRPPYYSEEMFEQDFEKPKEEDPPKAESPGTEPTANSTVTETNSTQPNPKGSQGGNDTSPTGNSTPGLNTGNNPPAQNGIGPLPAVNASGQGGPGSQIPWRPSQPNIRENHPYPNIRNFPSGRQWYFTGTVMGHRQNRPFYRNQQVQRGPRWNFFAWERKQVARPGNPVYHKAYPPTSRGNYPNYAGNPANLRRKPQGPNKHPVGTTVAPLGPKPGPVVRNEKIQNPKEKPLGPKEQIIVPTKNPTSPWRNSQQYEVNKSNYKLPHSEGYMPVPNFNSVDQHENSYYPRGDSRKVPNSDGQTQSQNLPKGIVLGSRRMPYESETNQSELKHSSYQPAVYPEEIPSPAKEHFPAGRNTWDHQEISPPFKEDPGRQEEHLPHPSHGSRGSVFYPEYNPYDPRENSPYLRGNTWDERDDSPNTMGQKESPLYPINTPDQKEIVPYNEEDPVDPTGDEVFPGQNRWGEELSFKGGPTVRHYEGEQYTSNQPKEYLPYSLDNPSKPREDFYYSEFYPWSPDENFPSYNTASTMPPPIESRGYYVNNAAGPEESTLFPSRNSWDHRIQAQGQRERRPYFNRNIWDQATHLQKAPARPPDQKGNQPYYSNTPAGLQKNPIWHEGENLNYGMQITRMNSPEREHSSFPNFIPPSYPSGQKEAHLFHLSQRGSCCAGSSTGPKDNPLALQDYTPSYGLAPGENQDTSPLYTDGSHTKQTRDIISPTSILPGQRNSSEKRESQNPFRDDVSTLRRNTPCSIKNQLGQKEIMPFPEASSLQSKNTPCLKNDLGGDGNNILEQVFEDNQLNERTVDLTPEQLVIGTPDEGSNPEGIQSQVQENESERQQQRPSNILHLPCFGSKLAKHHSSTTGTPSSDGRQSPFDGDSITPTENPNTLVELATEEQFKSINVDPLDADEHSPFEFLQRGTNVQDQVQDCLLLQA

SEQ ID NO: 18052 - protein, 828 aa, Homo sapiens
MAGRGWGALWVCVAAATLLHAGGLARADCWLIEGDKGFVWLAICSQNQPPYEAIPQQINSTIVDLRLNENRIRSVQYASLSRFGNLTYLNLTKNEIGYIEDGAFSGQFNLQVLQLGYNRLRNLTEGMLRGLGKLEYLYLQANLIEVVMASSFWECPNIVNIDLSMNRIQQLNSGTFAGLAKLSVCELYSNPFYCSCELLGFLRWLAAFTNATQTYDRMQCESPPVYSGYYLLGQGRRGHRSILSKLQSVCTEDSYAAEVVGPPRPASGRSQPGRSPPPPPPPEPSDMPCADDECFSGDGTTPLVALPTLATQAEARPLIKVKQLTQNSATITVQLPSPFHRMYTLEHFNNSKASTVSRLTKAQEEIRLTNLFTLTNYTYCVVSTSAGLRHNHTCLTICLPRLPSPPGPVPSPSTATHYIMTILGCLFGMVLVLGAVYYCLRRRRRQEEKHKKAASAAAAGSLKKTIIELKYGPELEAPGLAPLSQGPLLGPEAVTRIPYLPAAGEVEQYKLVESADTPKASKGSYMEVRTGDPPERRDCELGRPGPDSQSSVAEISTIAKEVDKVNQIINNCIDALKSESTSFQGVKSGPVSVAEPPLVLLSEPLAAKHGFLAPGYKDAFGHSLQRHHSVEAAGPPRASTSSSGSVRSPRAFRAEAVGVHKAAAAEAKYIEKGSPAADAILTVTPAAAVLRAEAEKGRQYGEHRHSYPGSHPAEPPAPPGPPPPPPHEGLGRKASILEPLTRPRPRDLAYSQLSPQYHSLSYSSSPEYTCRASQSIWERFRLSRRRHKEEEEFMAAGHALRKKVQFAKDEDLHDILDYWKGVSAQHKS

SEQ ID NO: 18053 - protein, 699 aa, Homo sapiens
MNPSEMQRKAPPRRRRHRNRAPLTHKMNKMVTSEEQMKLPSTKKAEPPTWAQLKKLTQLATKYLENTKVTQTPESMLLAALMIVSMVVSLPMPAGAAAANYTYWAYVPFPPLIRAVTWMDNPIEIYVNDSVWVPGPTDDCCPAKPEEEGMMINISIGYRYPPICLGRAPGCLMPAVQNWLVEVPTVSPISRFTYHMVSGMSLRPRVNYLQDFSYQRSLKFRPKGKPCPKEIPKESKNTEVLVWEECVANSAVILQNNEFGTLIDWAPRGQFYHNCSGQTQSCPSAQVSPAVDSDLTESLDKHKHKKLQSFYPWEWGEKGISTARPKIISPVSGPEHPELWRLTVASHHIRIWSGNQTLETRDRKPFYTIDLNSSLTVPLQSCVKPPYMLVVGNIVIKPDSQTITCENCRLLTCIDSTFNWQHRILLVRAREGVWIPVSMDRPWEASPSVHILTEVLKGVLNRSKRFIFTLIAVIMGLIAVTATAAVAGVALHSSVQSVNFVNDWQNNSTRLWNSQSSIDQKLANQINDLRQTVIWMGDRLMSLEHRFQLQCDWNTSDFCITPQIYNESEHHWDMVRCHLQGREDNLTLDISKLKEQIFEASKAHLNLVPGTEAIAGVADGLANLNTVTWVKTIGSTTIINLILILVCLFCLLLVYRCTQQLRRDSDHRERAMMTMVVLSKRKGGNVGKSKRDQIVTVSV

SEQ ID NO: 18054 - protein, 407 aa, Homo sapiens
MESAITLWQFLLQLLLDQKHEHLICWTSNDGEFKLLKAEEVAKLWGLRKNKTNMNYDKLSRALRYYYDKNIIKKVIGQKFVYKFVSFPEILKMDPHAVEISRESLLLQDSDCKASPEGREAHKHGLAALRSTSRNEYIHSGLYSSFTINSLQNPPDAFKAIKTEKLEEPPEDSPPVEEVRTVIRFVTNKTDKHVTRPVVSLPSTSEAAAASAFLASSVSAKISSLMLPNAASISSASPFSSRSPSLSPNSPLPSEHRSLFLEAACHDSDSLEPLNLSSGSKTKSPSLPPKAKKPKGLEISAPPLVLSGTDIGSIALNSPALPSGSLTPAFFTAQTPNGLLLTPSPLLSSIHFWSSLSPVAPLSPARLQGPSTLFQFPTLLNGHMPVPIPSLDRAASPVLLSSNSQKS

SEQ ID NO: 18055 - protein, 434 aa, Homo sapiens
MSILKIHAREIFDSRGNPTVEVDLFTSKGLFRAAVPSGASTGIYEALELRDNDKTRYMGKGVSKAVEHINKTIAPALVSKKLNVTEQEKIDKLMIEMDGTENKSKFGANAILGVSLAVCKAGAVEKGVPLYRHIADLAGNSEVILPVPAFNVINGGSHAGNKLAMQEFMILPVGAANFREAMRIGAEVYHNLKNVIKEKYGKDATNVGDEGGFAPNILENKEGLELLKTAIGKAGYTDKVVIGMDVAASEFFRSGKYDLDFKSPDDPSRYISPDQLADLYKSFIKDYPVVSIEDPFDQDDWGAWQKFTASAGIQVVGDDLTVTNPKRIAKAVNEKSCNCLLLKVNQIGSVTESLQACKLAQANGWGVMVSHRSGETEDTFIADLVVGLCTGQIKTGAPCRSERLAKYNQLLRIEEELGSKAKFAGRNFRNPLAK

SEQ ID NO: 18056 - protein, 341 aa, Homo sapiens
MIEMDGTENKSKFGANAILGVSLAVCKAGAVEKGVPLYRHIADLAGNSEVILPVPAFNVINGGSHAGNKLAMQEFMILPVGAANFREAMRIGAEVYHNLKNVIKEKYGKDATNVGDEGGFAPNILENKEGLELLKTAIGKAGYTDKVVIGMDVAASEFFRSGKYDLDFKSPDDPSRYISPDQLADLYKSFIKDYPVVSIEDPFDQDDWGAWQKFTASAGIQVVGDDLTVTNPKRIAKAVNEKSCNCLLLKVNQIGSVTESLQACKLAQANGWGVMVSHRSGETEDTFIADLVVGLCTGQIKTGAPCRSERLAKYNQLLRIEEELGSKAKFAGRNFRNPLAK

SEQ ID NO: 18057 - protein, 163 aa, Homo sapiens
MSLLLLVVSALHILILILLFVATLDKSWWTLPGKESLNLWYDCTWNNDTKTWACSNVSENGWLKAVQVLMVLSLILCCLSFILFMFQLYTMRRGGLFYATGLCQLCTSVAVFTGALIYAIHAEEILEKHPRGGSFGYCFALAWVAFPLALVSGIIYIHLRKRE

SEQ ID NO: 18058 - protein, 548 aa, Homo sapiens
MAKFMTPVIQDNPSGWGPCAVPEQFRDMPYQPFSKGDRLGKVADWTGATYQDKRYTNKYSSQFGGGSQYAYFHEEDESSFQLVDTARTQKTAYQRNRMRFAQRNLRRDKDRRNMLQFNLQILPKSAKQKERERIRLQKKFQKQFGVRQKWDQKSQKPRDSSVEVRSDWEVKEEMDFPQLMKMRYLEVSEPQDIECCGALEYYDKAFDRITTRSEKPLRSIKRIFHTVTTTDDPVIRKLAKTQGNVFATDAILATLMSCTRSVYSWDIVVQRVGSKLFFDKRDNSDFDLLTVSETANEPPQDEGNSFNSPRNLAMEATYINHNFSQQCLRMGKERYNFPNPNPFVEDDMDKNEIASVAYRYRRWKLGDDIDLIVRCEHDGVMTGANGEVSFINIKTLNEWDSRHCNGVDWRQKLDSQRGAVIATELKNNSYKLARWTCCALLAGSEYLKLGYVSRYHVKDSSRHVILGTQQFKPNEFASQINLSVENAWGILRCVIDICMKLEEGKYLILKDPNKQVIRVYSLPDGTFSSDEDEEEEEEEEEEEEEEET

SEQ ID NO: 18059 - protein, 499 aa, Homo sapiens
MAKFMTPVIQDNPSGWGPCAVPEQFRDMPYQPFSKGDRLGKVADWTGATYQDKRNLRRDKDRRNMLQFNLQILPKSAKQKERERIRLQKKFQKQFGVRQKWDQKSQKPRDSSVEVRSDWEVKEEMDFPQLMKMRYLEVSEPQDIECCGALEYYDKAFDRITTRSEKPLRSIKRIFHTVTTTDDPVIRKLAKTQGNVFATDAILATLMSCTRSVYSWDIVVQRVGSKLFFDKRDNSDFDLLTVSETANEPPQDEGNSFNSPRNLAMEATYINHNFSQQCLRMGKERYNFPNPNPFVEDDMDKNEIASVAYRYRRWKLGDDIDLIVRCEHDGVMTGANGEVSFINIKTLNEWDSRHCNGVDWRQKLDSQRGAVIATELKNNSYKLARWTCCALLAGSEYLKLGYVSRYHVKDSSRHVILGTQQFKPNEFASQINLSVENAWGILRCVIDICMKLEEGKYLILKDPNKQVIRVYSLPDGTFSSDEDEEEEEEEEEEEEEEET

SEQ ID NO: 18060 - protein, 533 aa, Homo sapiens
MAKFMTPVIQDNPSGWGPCAVPEQFRDMPYQPFSKGDRLGKVADWTGATYQDKRYTNKYSSQFGGGSQYAYFHEEDESSFQLVDTARTQKTAYQRNRMRFAQRNLRRDKDRRNMLQFNLQILPKSAKQKERERIRLQKSQKPRDSSVEVRSDWEVKEEMDFPQLMKMRYLEVSEPQDIECCGALEYYDKAFDRITTRSEKPLRSIKRIFHTVTTTDDPVIRKLAKTQGNVFATDAILATLMSCTRSVYSWDIVVQRVGSKLFFDKRDNSDFDLLTVSETANEPPQDEGNSFNSPRNLAMEATYINHNFSQQCLRMGKERYNFPNPNPFVEDDMDKNEIASVAYRYRRWKLGDDIDLIVRCEHDGVMTGANGEVSFINIKTLNEWDSRHCNGVDWRQKLDSQRGAVIATELKNNSYKLARWTCCALLAGSEYLKLGYVSRYHVKDSSRHVILGTQQFKPNEFASQINLSVENAWGILRCVIDICMKLEEGKYLILKDPNKQVIRVYSLPDGTFSSDEDEEEEEEEEEEEEEEET

SEQ ID NO: 18061 - protein, 387 aa, Homo sapiens
MEDDAPVIYGLEFQARALTPQTAETDAIRFLVGTQSLKYDNQIHIIDFDDENNIINKNVLLHQAGEIWHISASPADRGVLTTCYNRTSDSKVLTCAAVWRMPKELESGSHESPDDSSSTAQTLELLCHLDNTAHGNMACVVWEPMGDGKKIISLADNHILLWDLQESSSQAVLASSASLEGKGQLKFTSGRWSPHHNCTQVATANDTTLRGWDTRSMSQIYCIENAHGQLVRDLDFNPNKQYYLASCGDDCKVKFWDTRNVTEPVKTLEEHSHWVWNVRYNHSHDQLVLTGSSDSRVILSNMVSISSEPFGHLVDDDDISDQEDHRSEEKSKEPLQDNVIATYEEHEDSVYAVDWSSADPWLFASLSYDGRLVINRVPRALKYHILL

SEQ ID NO: 18062 - protein, 649 aa, Homo sapiens
MSSFGAGKTKEVIFSVEDGSVKMFLRGRPVPMMIPDELAPTYSLDTRSELPSCRLKLEWVYGYRGRDCRANLYLLPTGEIVYFVASVAVLYSVEEQRQRHYLGHNDDIKCLAIHPDMVTIATGQVAGTTKEGKPLPPHVRIWDSVSLSTLHVLGLGVFDRAVCCVGFSKSNGGNLLCAVDESNDHMLSVWDWAKETKVVDVKCSNEAVLVATFHPTDPTVLITCGKSHIYFWTLEGGSLSKRQGLFEKHEKPKYVLCVTFLEGGDVVTGDSGGNLYVWGKGGNRITQAVLGAHDGGVFGLCALRDGTLVSGGGRDRRVVLWGSDYSKLQEVEVPEDFGPVRTVAEGHGDTLYVGTTRNSILQGSVHTGFSLLVQGHVEELWGLATHPSRAQFVTCGQDKLVHLWSSDSHQPLWSRIIEDPARSAGFHPSGSVLAVGTVTGRWLLLDTETHDLVAIHTDGNEQISVVSFSPDGAYLAVGSHDNLVYVYTVDQGGRKVSRLGKCSGHSSFITHLDWAQDSSCFVTNSGDYEILYWDPATCKQITSADAVRNMEWATATCVLGFGVFGIWSEGADGTDINAVARSHDGKLLASADDFGKVHLFSYPCCQPRALSHKYGGHSSHVTNVAFLWDDSMALTTGGKDTSVLQWRVV

SEQ ID NO: 18063 - protein, 796 aa, Homo sapiens
MSLDDNLSGTSGMEVDDRVSALEQRLQLQEDELAVLKAALADALRRLRACEEQGAALRARGTPKGRAPPRLGTTASVCQLLKGLPTRTPLNGSGPPRRVGGYATSPSSPKKEATSGRSSVRRYLSPERLASVRREDPRSRTTSSSSNCSAKKEGKTKEVIFSVEDGSVKMFLRGRPVPMMIPDELAPTYSLDTRSELPSCRLKLEWVYGYRGRDCRANLYLLPTGEIVYFVASVAVLYSVEEQRQRHYLGHNDDIKCLAIHPDMVTIATGQVAGTTKEGKPLPPHVRIWDSVSLSTLHVLGLGVFDRAVCCVGFSKSNGGNLLCAVDESNDHMLSVWDWAKETKVVDVKCSNEAVLVATFHPTDPTVLITCGKSHIYFWTLEGGSLSKRQGLFEKHEKPKYVLCVTFLEGGDVVTGDSGGNLYVWGKGGNRITQAVLGAHDGGVFGLCALRDGTLVSGGGRDRRVVLWGSDYSKLQEVEVPEDFGPVRTVAEGHGDTLYVGTTRNSILQGSVHTGFSLLVQGHVEELWGLATHPSRAQFVTCGQDKLVHLWSSDSHQPLWSRIIEDPARSAGFHPSGSVLAVGTVTGRWLLLDTETHDLVAIHTDGNEQISVVSFSPDGAYLAVGSHDNLVYVYTVDQGGRKVSRLGKCSGHSSFITHLDWAQDSSCFVTNSGDYEILYWDPATCKQITSADAVRNMEWATATCVLGFGVFGIWSEGADGTDINAVARSHDGKLLASADDFGKVHLFSYPCCQPRALSHKYGGHSSHVTNVAFLWDDSMALTTGGKDTSVLQWRVV

SEQ ID NO: 18064 - protein, 850 aa, Homo sapiens
MLERRALLWQREAGPGWGDRARAGTGGAGGGCGGAMAERGPAFCGLYDTSSLLRYCNDDNLSGTSGMEVDDRVSALEQRLQLQEDELAVLKAALADALRRLRACEEQGAALRARGTPKGRAPPRLGTTASVCQLLKGLPTRTPLNGSGPPRRVGGYATSPSSPKKEATSGRSSVRRYLSPERLASVRREDPRSRTTSSSSNCSAKKEGKTKEVIFSVEDGSVKMFLRGRPVPMMIPDELAPTYSLDTRSELPSCRLKLEWVYGYRGRDCRANLYLLPTGEIVYFVASVAVLYSVEEQRQRHYLGHNDDIKCLAIHPDMVTIATGQVAGTTKEGKPLPPHVRIWDSVSLSTLHVLGLGVFDRAVCCVGFSKSNGGNLLCAVDESNDHMLSVWDWAKETKVVDVKCSNEAVLVATFHPTDPTVLITCGKSHIYFWTLEGGSLSKRQGLFEKHEKPKYVLCVTFLEGGDVVTGDSGGNLYVWGKGGNRITQAVLGAHDGGVFGLCALRDGTLVSGGGRDRRVVLWGSDYSKLQEVEVPEDFGPVRTVAEGHGDTLYVGTTRNSILQGSVHTGFSLLVQGHVEELWGLATHPSRAQFVTCGQDKLVHLWSSDSHQPLWSRIIEDPARSAGFHPSGSVLAVGTVTGRWLLLDTETHDLVAIHTDGNEQISVVSFSPDGAYLAVGSHDNLVYVYTVDQGGRKVSRLGKCSGHSSFITHLDWAQDSSCFVTNSGDYEILYWDPATCKQITSADAVRNMEWATATCVLGFGVFGIWSEGADGTDINAVARSHDGKLLASADDFGKVHLFSYPCCQPRALSHKYGGHSSHVTNVAFLWDDSMALTTGGKDTSVLQWRVV

SEQ ID NO: 18065 - protein, 981 aa, Homo sapiens
MDGFAGSLDDSISAASTSDVQDRLSALESRVQQQEDEITVLKAALADVLRRLAISEDHVASVKKSVSSKGQPSPRAVIPMSCITNGSGANRKPSHTSAVSIAGKETLSSAAKSGTEKKKEKPQGQREKKEESHSNDQSPQIRASPSPQPSSQPLQIHRQTPESKNATPTKSIKRPSPAEKSHNSWENSDDSRNKLSKIPSTPKLIPKVTKTADKHKDVIINQEGEYIKMFMRGRPITMFIPSDVDNYDDIRTELPPEKLKLEWAYGYRGKDCRANVYLLPTGKIVYFIASVVVLFNYEERTQRHYLGHTDCVKCLAIHPDKIRIATGQIAGVDKDGRPLQPHVRVWDSVTLSTLQIIGLGTFERGVGCLDFSKADSGVHLCIIDDSNEHMLTVWDWQKKAKGAEIKTTNEVVLAVEFHPTDANTIITCGKSHIFFWTWSGNSLTRKQGIFGKYEKPKFVQCLAFLGNGDVLTGDSGGVMLIWSKTTVEPTPGKGPKGVYQISKQIKAHDGSVFTLCQMRNGMLLTGGGKDRKIILWDHDLNPEREIEVPDQYGTIRAVAEGKADQFLVGTSRNFILRGTFNDGFQIEVQGHTDELWGLATHPFKDLLLTCAQDRQVCLWNSMEHRLEWTRLVDEPGHCADFHPSGTVVAIGTHSGRWFVLDAETRDLVSIHTDGNEQLSVMRYSIDGTFLAVGSHDNFIYLYVVSENGRKYSRYGRCTGHSSYITHLDWSPDNKYIMSNSGDYEILYWDIPNGCKLIRNRSDCKDIDWTTYTCVLGFQVFGVWPEGSDGTDINALVRSHNRKVIAVADDFCKVHLFQYPCSKAKAPSHKYSAHSSHVTNVSFTHNDSHLISTGGKDMSIIQWKLVEKLSLPQNETVADTTLTKAPVSSTESVIQSNTPTPPPSQPLNETAEEESRISSSPTLLENSLEQTVEPSEDHSEEESEEGSGDLGEPLYEEPCNEISKEQAKATLLEDQQDPSPSS

SEQ ID NO: 18066 - protein, 923 aa, Homo sapiens
MDGFAGSLDDSISAASTSDVQDRLSALESRVQQQEDEITVLKAALADVLRRLAISEDHVASVKKSVSSKGQPSPRAVIPMSCITNGSGANRKPSHTSAVSIAGKETLSSAAKSIKRPSPAEKSHNSWENSDDSRNKLSKIPSTPKLIPKVTKTADKHKDVIINQEGEYIKMFMRGRPITMFIPSDVDNYDDIRTELPPEKLKLEWAYGYRGKDCRANVYLLPTGKIVYFIASVVVLFNYEERTQRHYLGHTDCVKCLAIHPDKIRIATGQIAGVDKDGRPLQPHVRVWDSVTLSTLQIIGLGTFERGVGCLDFSKADSGVHLCIIDDSNEHMLTVWDWQKKAKGAEIKTTNEVVLAVEFHPTDANTIITCGKSHIFFWTWSGNSLTRKQGIFGKYEKPKFVQCLAFLGNGDVLTGDSGGVMLIWSKTTVEPTPGKGPKGVYQISKQIKAHDGSVFTLCQMRNGMLLTGGGKDRKIILWDHDLNPEREIEVPDQYGTIRAVAEGKADQFLVGTSRNFILRGTFNDGFQIEVQGHTDELWGLATHPFKDLLLTCAQDRQVCLWNSMEHRLEWTRLVDEPGHCADFHPSGTVVAIGTHSGRWFVLDAETRDLVSIHTDGNEQLSVMRYSIDGTFLAVGSHDNFIYLYVVSENGRKYSRYGRCTGHSSYITHLDWSPDNKYIMSNSGDYEILYWDIPNGCKLIRNRSDCKDIDWTTYTCVLGFQVFGVWPEGSDGTDINALVRSHNRKVIAVADDFCKVHLFQYPCSKAKAPSHKYSAHSSHVTNVSFTHNDSHLISTGGKDMSIIQWKLVEKLSLPQNETVADTTLTKAPVSSTESVIQSNTPTPPPSQPLNETAEEESRISSSPTLLENSLEQTVEPSEDHSEEESEEGSGDLGEPLYEEPCNEISKEQAKATLLEDQQDPSPSS

SEQ ID NO: 18067 - protein, 678 aa, Homo sapiens
MEVLIGDPITTCLSPSVYDIICNLGFQLRENCDINSIVTQNGEVCWKTITDCVSYTESEQGLDYWGSVRLLGPVCEAVHSHFLSLTKGQFEIRYAPWFQWTSFPELFPEIFDALESLQSPAISLSLMKLTSCLERALGDVFLLIGKECPFLLRDLLSSEELAQVFSQSVMNVLKVFVGSPCGLNLRNVLWHGFASPEEIPPKYCSMMILLTAGLGQLLKSYLQNTKLTLAHRSFISLTNLEDLIVFPDVTYEVLSVLEEVMMKSAFILKIMLPYWEVALVKFKSHRFADCAILLLTQLETGLRNVFATLNRCPKRLLTAESTALYTTFDQILAKHLNDGKINQLPLFLGEPAMEFLWDFLNHQEGPRIRDHLSHGEINLHEFSKETTNQLLAFSLVLLLRFVDDCLLSVFKEKSAVELLISLAEGYSSRCHPVFQLKKQVLSCEESIRVWALLPFPEELTRQAVRLEDNSETNACHSLITKMTDELYHHMPENRCVLKDLDRLPTETWPQLLRELCSTPVPTLFCPRIVLEVLVVLRSISEQCRRVSSQVTVASELRHRQWVERTLRSRQRQNYLRMWSSIRLLSPVLSLILLLIALELVNIHAVCGKNAHEYQQYLKFVKSILQYTENLVAYTSYEKNKWNETINLTHTALLKMWTFSEKKQMLIHLAKKSTSKVLL

SEQ ID NO: 18068 - protein, 605 aa, Homo sapiens
MEVLIGDPITTCLSPSVYDIICNLGFQLRENCDINSIVTQNGEVCWKTITDCVSYTESEQGLDYWGSVRLLGPVCEAVHSHFLSLTKGQFEIRYAPWFQWTSFPELFPEIFDALESLQSPAISLSLMKLTSCLERALGDVFLLIGKECPFLLRDLLSSEELAQVFSQSVMNVLKVFVGSPCGLNLRNVLWHGFASPEEIPPKYCSMMILLTAGLGQLLKSYLQNTKLTLAHRSFISLTNLEDLIVFPDVTYEVLSVLEEVMMKSAFILKIMLPYWEVALVKFKSHRFADCAILLLTQLETGLRNVFATLNRCPKRLLTAESTALYTTFDQILAKHLNDGKINQLPLFLGEPAMEFLWDFLNHQEGPRIRDHLSHGEINLHEFSKETTNQLLAFSLVLLLRFVDDCLLSVFKEKSAVELLISLAEGYSSRCHPVFQLKKQVLSCEESIRVWALLPFPEELTRQAVRLEDNSETNACHSLITKMTDELYHHMPENRCVLKDLDRLPTETIRLLSPVLSLILLLIALELVNIHAVCGKNAHEYQQYLKFVKSILQYTENLVAYTSYEKNKWNETINLTHTALLKMWTFSEKKQMLIHLAKKSTSKVLL

SEQ ID NO: 18069 - protein, 631 aa, Homo sapiens
MEVLIGDPITTCLSPSVYDIICNLGFQLRENCDINSIVTQNGEVCWKTITDCVSYTESEQGLDYWGSVRLLGPVCEAVHSHFLSLTKGQFEIRYAPWFQWTSFPELFPEIFDALESLQSPAISLSLMKLTSCLERALGDVFLLIGKECPFLLRDLLSSEELAQVFSQSVMNVLKVFVGSPCGLNLRNVLWHGFASPEEIPPKYCSMMILLTAGLGQLLKSYLQNTKLTLAHRSFISLTNLEDLIVFPDVTYEVLSVLEEVMMKSAFILKIMLPYWEVALVKFKSHRFADCAILLLTQLETGLRNVFATLNRCPKRLLTAESTALYTTFDQILAKHLNDGKINQLPLFLGEPAMEFLWDFLNHQEGPRIRDHLSHGEINLHEFSKETTNQLLAFSLVLLLRFVDDCLLSVFKEKSAVELLISLAEGYSSRCHPVFQLKKQVLSCEESIRVWALLPFPEELTRQAVRLEDNSETNACHSLITKMTDELYHHMPENRCVLKDLDRLPTETPTSDTPLALAPRKPQPCRCRRRVRPSIRLLSPVLSLILLLIALELVNIHAVCGKNAHEYQQYLKFVKSILQYTENLVAYTSYEKNKWNETINLTHTALLKMWTFSEKKQMLIHLAKKSTSKVLL

SEQ ID NO: 18070 - protein, 552 aa, Homo sapiens
MKLTSCLERALGDVFLLIGKECPFLLRDLLSSEELAQVFSQSVMNVLKVFVGSPCGLNLRNVLWHGFASPEEIPPKYCSMMILLTAGLGQLLKSYLQNTKLTLAHRSFISLTNLEDLIVFPDVTYEVLSVLEEVMMKSAFILKIMLPYWEVALVKFKSHRFADCAILLLTQLETGLRNVFATLNRCPKRLLTAESTALYTTFDQILAKHLNDGKINQLPLFLGEPAMEFLWDFLNHQEGPRIRDHLSHGEINLHEFSKETTNQLLAFSLVLLLRFVDDCLLSVFKEKSAVELLISLAEGYSSRCHPVFQLKKQVLSCEESIRVWALLPFPEELTRQAVRLEDNSETNACHSLITKMTDELYHHMPENRCVLKDLDRLPTETWPQLLRELCSTPVPTLFCPRIVLEVLVVLRSISEQCRRVSSQVTVASELRHRQWVERTLRSRQRQNYLRMWSSIRLLSPVLSLILLLIALELVNIHAVCGKNAHEYQQYLKFVKSILQYTENLVAYTSYEKNKWNETINLTHTALLKMWTFSEKKQMLIHLAKKSTSKVLL

SEQ ID NO: 18071 - protein, 239 aa, Homo sapiens
MASEELACKLERRLRREEAEESGPQLAPLGAPAPEPKPEPEPPARAPTASADAELSAQLSRRLDINEGAARPRRCRVFNPYTEFPEFSRRLIKDLESMFKLYDAGRDGFIDLMELKLMMEKLGAPQTHLGLKSMIKEVDEDFDGKLSFREFLLIFHKAAAGELQEDSGLMALAKLSEIDVALEGVKGAKNFFEAKVQALSSASKFEAELKAEQDERKREEEERRLRQAAFQKLKANFNT

SEQ ID NO: 18072 - protein, 143 aa, Homo sapiens
MGELQYDAGRDGFIDLMELKLMMEKLGAPQTHLGLKSMIKEVDEDFDGKLSFREFLLIFHKAAAGELQEDSGLMALAKLSEIDVALEGVKGAKNFFEAKVQALSSASKFEAELKAEQDERKREEEERRLRQAAFQKLKANFNT

SEQ ID NO: 18073 - protein, 183 aa, Homo sapiens
MTAQGGLVANRGRRFKWAIELSGPGGGSRGRSDRGSGQGDSLYPVGYLDKQVPDTSVQETDRILVEKRCWDIALGPLKQIPMNLFIMYMAGNTISIFPTMMVCMMAWRPIQALMAISATFKMLESSSQKFLQGLVYLIGNLMGLALAVYKCQSMGLLPTHASDWLAFIEPPERMEFSGGGLLL

SEQ ID NO: 18074 - protein, 149 aa, Homo sapiens
MTAQGGLVANRGRRFKWAIELSGPGGGSRGRSDRGSGQGDSLYPVGYLDKQVPDTSVQETDRILVEKRCWDIALGPLKQIPMNLFIMYMAGNTISIFPTMMVCMMAWRPIQALMAISAKNGVQWWRTAFVNMRKQRLVPMYLGLIYILL

SEQ ID NO: 18075 - protein, 136 aa, Homo sapiens
MTAQGGLVANRGRRFKWAIELSGPGGGSRGRSDRGSGQGDSLYPVGYLDKQVPDTSVQETDRILVEKVQRYRCYRSPWASPELHTHPLLLGGVNVDSSYPEDLETKLLEAGISVFYISATKVLNNLKNRRCLEHKV

SEQ ID NO: 18076 - protein, 297 aa, Homo sapiens
MAKVSELYDVTWEEMRDKMRKWREENSRNSEQIVEVGEELINEYASKLGDDIWIIYEQVMIAALDYGRDDLALFCLQELRRQFPGSHRVKRLTGMRFEAMERYDDAIQLYDRILQEDPTNTAARKRKIAIRKAQGKNVEAIRELNEYLEQFVGDQEAWHELAELYINEHDYAKAAFCLEELMMTNPHNHLYCQQYAEVKYTQGGLENLELSRKYFAQALKLNNRNMRALFGLYMSASHIASNPKASAKTKKDNMKYASWAASQINRAYQFAGRSKKETKYSLKAVEDMLETLQITQS

SEQ ID NO: 18077 - protein, 555 aa, Homo sapiens
MILAGRAPSNTSTLMKFYSLLLYSLLFSFPFLYHPLPLPSYLHHTINLTHSLPAASNPSLANNCWLCISLSSSAYIAVPTLQTDRATSPVSLHLRTSFNSPHLYPPEELIYFLDRSSKTSPDISHQPAAALLHIYLKNLSPYINSTPPIFGPLTTQTTIPVAAPLCISRQRPTGIPLGNISPSRCSFTLHLQSPTTHVTETIGVFQLHIIDKPSINTDKLKNVSSNYCLGRHLPYISLHPWLPSPCSSDSPPRPSSCLLTPSPQNNSERLLVDTQRFLIHHENRTSSSMQLAHQSPLQPLTAAALAGSLGVWVQDTPFSTPSHPFSLHLQFCLTQGLFFLCGSSTYMCLPANWTGTCTLVFLTPKIQFANGTKELPVPLMTLTPQKRVIPLIPLMVGLGLSASTIALSTGIAGISTSVTTFRSPSNDFSASITDISQTLSVLQAQVDSLAAVVLQNRRGLGLSILLNEECCFYLNQSGLVYENIKKLKDRAQKLANQASNYAESPWALSNWMSWVLPILSPLIPIFLLLLFGPCIFHLVSQFIQNRIQAITNHSI

SEQ ID NO: 18078 - protein, 226 aa, Homo sapiens
MADPGPDPESESESVFPREVGLFADSYSEKSQFCFCGHVLTITQNFGSRLGVAARVWDAALSLCNYFESQNVDFRGKKVIELGAGTGIVGILAALQGGDVTITDLPLALEQIQGNVQANVPAGGQAQVRALSWGIDHHVFPANYDLVLGADIVYLEPTFPLLLGTLQHLCRPHGTIYLASKMRKEHGTESFFQHLLPQHFQLELAQRDEDENVNIYRARHREPRPA

SEQ ID NO: 18079 - protein, 149 aa, Homo sapiens
MADPGPDPESESESVFPREVGLFADSYSEKSQFCFCGHVLTITQNFGSRLGVAARVWDAALSLCNYFESQNVDFRGKKVIELGAGTGIVGILAALQGAYGLVRETEDDVIEQELWRGMRGACGHALSMSTMTPWESIKGSSVRGGCYHH

SEQ ID NO: 18080 - protein, 155 aa, Homo sapiens
MRGACGHALSMSTMTPWESIKGSSVRGDVTITDLPLALEQIQGNVQANVPAGGQAQVRALSWGIDHHVFPANYDLVLGADIVYLEPTFPLLLGTLQHLCRPHGTIYLASKMRKEHGTESFFQHLLPQHFQLELAQRDEDENVNIYRARHREPRPA

SEQ ID NO: 18081 - protein, 191 aa, Homo sapiens
MPGAIDDHCPAQPGEEGTAFNVTMGYKYPPLCLGHATRCIHLETQVWAAYLLERLATGKWGHLVSGLSLCPLRQMKRGVIGDTPYFQYKPVGKLCPKNFEGPSKTLIWGDCVNSHAVVLKNDSYALVIDWAPKGYLKNTCSSGGGEFLEATYFISYWEDEDHHPTLHRWFGSFFTLKWEDKDITLHPQGLV

SEQ ID NO: 18082 - protein, 261 aa, Homo sapiens
MAGPELLLDSNIRLWVVLPIVIITFFVGMIRHYVSILLQSDKKLTQEQVSDSQVLIRSRVLRENGKYIPKQSFLTRKYYFNNPEDGFFKKTKRKVVPPSPMTDPTMLTDMMKGNVTNVLPMILIGGWINMTFSGFVTTKVPFPLTLRFKPMLQQGIELLTLDASWVSSASWYFLNVFGLRSIYSLILGQDNAADQSRMMQEQMTGAAMAMPADTNKAFKTEWEALELTDHQWALDDVEEELMAKDLHFEGMFKKELQTSIF

SEQ ID NO: 18083 - protein, 219 aa, Homo sapiens
MAGPELLLDSNIRLWVVLPIVIITFFVGMIRHYVSILLQSDKKLTQEQVSDSQVLIRSRVLRENGKYIPKQSFLTRKYYFNNPEDGFFKKTKRKVVPPSPMTDPTMLTDMMKGNVTNVLPMILIGGWINMTFSGFVTTKVPFPLTLRFKPMLQQGIELLTLDASWVSSASWYFLNVFGLRSIYSLILGQDNAADQSRMMQEQMTGAAMAMPADTNKAFK

SEQ ID NO: 18084 - protein, 508 aa, Homo sapiens
MATDWLGSIVSINCGDSLGVYQGRVSAVDQVSQTISLTRPFHNGVKCLVPEVTFRAGDITELKILEIPGPGDNQHFGDLHQTELGPSGAGCQVGINQNGTGKFVKKPASSSSAPQNIPKRTDVKSQDVAVSPQQQQCSKSYVDRHMESLSQSKSFRRRHNSWSSSSRHPNQATPKKSGLKNGQMKNKDDECFGDDIEEIPDTDFDFEGNLALFDKAAVFEEIDTYERRSGTRSRGIPNERPTRYRHDENILESEPIVYRRIIVPHNVSKEFCTDSGLVVPSISYELHKKLLSVAEKHGLTLERRLEMTGVCASQMALTLLGGPNRLNPKNVHQRPTVALLCGPHVKGAQGISCGRHLANHDVQVILFLPNFVKMLESITNELSLFSKTQGQQVSSLKDLPTSPVDLVINCLDCPENVFLRDQPWYKAAVAWANQNRAPVLSIDPPVHEVEQGIDAKWSLALGLPLPLGEHAGRIYLCDIGIPQQVFQEVGINYHSPFGCKFVIPLHSA

SEQ ID NO: 18085 - protein, 391 aa, Homo sapiens
MGYPEVERRELLPAAAPRERGSQGCGCGGAPARAGEGNSCLLFLGFFGLSLALHLLTLCCYLELRSELRRERGAESRLGGSGTPGTSGTLSSLGGLDPDSPITSHLGQPSPKQQPLEPGEAALHSDSQDGHQMALLNFFFPDEKPYSEEESRRVRRNKRSKSNEGADGPVKNKKKGKKAGPPGPNGPPGPPGPPGPQGPPGIPGIPGIPGTTVMGPPGPPGPPGPQGPPGLQGPSGAADKAGTRENQPAVVHLQGQGSAIQVKNDLSGGVLNDWSRITMNPKVFKLHPRSGELEVLVDGTYFIYSQVEVYYINFTDFASYEVVVDEKPFLQCTRSIETGKTNYNTCYTAGVCLLKARQKIAVKMVHADISINMSKHTTFFGAIRLGEAPAS

SEQ ID NO: 18086 - protein, 135 aa, Homo sapiens
MGYPEVERRELLPAAAPRERGSQGCGCGGAPARAGEGNSCLLFLGFFGLSLALHLLTLCCYLELRSELRRERGAESRLGGSGTPGTSGTLSSLGGLDPDSPITSHLGQPSPKQQPLEPGEAALHSDSQDGHQGHQ

SEQ ID NO: 18087 - protein, 389 aa, Homo sapiens
MGYPEVERRELLPAAAPRERGSQGCGCGGAPARAGEGNSCLLFLGFFGLSLALHLLTLCCYLELRSELRRERGAESRLGGSGTPGTSGTLSSLGGLDPDSPITSHLGQPSPKQQPLEPGEAALHSDSQDGHQMALLNFFFPDEKPYSEEESRRVRRNKRSKSNEGADGPVKNKKKGKKAGPPGPNGPPGPPGPPGPQGPPGIPGIPGIPGTTVMGPPGPPGPPGPQGPPGLQGPSGAADKAGTRENQPAVVHLQGQGSAIQVKNDLSGGVLNDWSRITMNPKVFKLHPRSGELEVLVDGTYFIYSQVYYINFTDFASYEVVVDEKPFLQCTRSIETGKTNYNTCYTAGVCLLKARQKIAVKMVHADISINMSKHTTFFGAIRLGEAPAS

SEQ ID NO: 18088 - protein, 147 aa, Homo sapiens
MGYPEVERRELLPAAAPRERGSQGCGCGGAPARAGEGNSCLLFLGFFGLSLALHLLTLCCYLELRSELRRERGAESRLGGSGTPGTSGTLSSLGGLDPDSPITSHLGQPSPKQQPLEPGEAALHSDSQDGHQVSHLVGAAAAPSPRG

SEQ ID NO: 18089 - protein, 142 aa, Homo sapiens
MGYPEVERRELLPAAAPRERGSQGCGCGGAPARAGEGNSCLLFLGFFGLSLALHLLTLCCYLELRSELRRERGAESRLGGSGTPGTSGTLSSLGGLDPDSPITSHLGQPSPKQQPLEPGEAALHSDSQDGHQACFPQVLLSL

SEQ ID NO: 18090 - protein, 148 aa, Homo sapiens
MGYPEVERRELLPAAAPRERGSQGCGCGGAPARAGEGNSCLLFLGFFGLSLALHLLTLCCYLELRSELRRERGAESRLGGSGTPGTSGTLSSLGGLDPDSPITSHLGQPSPKQQPLEPGEAALHSDSQDGHQDFDYIISFSYGLQGFC

SEQ ID NO: 18091 - protein, 147 aa, Homo sapiens
MGYPEVERRELLPAAAPRERGSQGCGCGGAPARAGEGNSCLLFLGFFGLSLALHLLTLCCYLELRSELRRERGAESRLGGSGTPGTSGTLSSLGGLDPDSPITSHLGQPSPKQQPLEPGEAALHSDSQDGHQLHVSFSLRKKKAGHQ

SEQ ID NO: 18092 - protein, 386 aa, Homo sapiens
MGYPEVERRELLPAAAPRERGSQGCGCGGAPARAGEGNSCLLFLGFFGLSLALHLLTLCCYLELRSELRRERGAESRLGGSGTPGTSGTLSSLGGLDPDSPITSHLGQPSPKQQPLEPGEAALHSDSQDGHQMALLNFFFPDEKPYSEEESRRVRRNKRSKSNEGADGPVKNKKKGKKAGPPGPNGPPGPPGPPGPQGPPGIPGIPGIPGTTVMGPPGPPGPPGPQGPPGLQGPSGAADKAGTRENQPAVVHLQGQGSAIQVKNGGVLNDWSRITMNPKVFKLHPRSGELEVLVDGTYFIYSQVYYINFTDFASYEVVVDEKPFLQCTRSIETGKTNYNTCYTAGVCLLKARQKIAVKMVHADISINMSKHTTFFGAIRLGEAPAS

SEQ ID NO: 18093 - protein, 127 aa, Homo sapiens
METSSRELQAAEYLEKHQIKEVVSYLTSALLFFRPEKPKEYLISLLERLRIAKVTGVAFPFFMDNSNIVAMFEMMDSSGRGTISFVQYKEALKTLGLCTEDEDLQDDGHKITLDKFKEEVNKRMKEI

SEQ ID NO: 18094 - protein, 973 aa, Homo sapiens
METKVHLFCQAEENIDLLDDGSNSFATDLSSGTINHKKYIKFSKTIEKEISPEIRSLSPEYKKIFETSIIFCGEEKSSDFSGEKKVGRKSLQVQQHSKRTEIIPPFLKLSKEKVTRKENSLCKLPNQYSVHKTSSPLCTSSAITREKEMLSNLYMTLYDEVTHGYLHSKELSALHKACKIFSKIRSGKIYVNDLPVILCILRISISDLEMRQALKTVDIDAFQDALKIFCRIKGGRVSTDDVFAVLDSMGIPINREILEEVTKHTYIDSNHMVDIGDIIFTLNELQEQYEDVSITEGSPLNEITSDRKLSSVAGCYLKYKKKNSLSSKLPEPSISKKLNKKSNQYYSKIMENDDLESKRPKNTWQIRKFLGGVGSSNVGVQEPYSKNGINFKKHSEKGEIHDSKSKPQSLKSSTSLSKSLDKSDISSIPKLQKPAVRKHSSLQKQVSSTEKTAISTLENFCEAISKLQENYIAAEELQSILPSTGINLLDEEFQKIVTDTSRNENGMVELDDFVNALAKERSFPECNALPGVIKAIDKIKDKNVDYEDLNTCLQNFGIYLSKPEFKKITELTEAGETKKVNFKEFIDTMMSNTECFSEKLVLPDAIETLDDLRKETMSVSDLWNTLSSLNSNLKKDEFLAALELVTVDEGDKVQFEEFAKVVRNMRDAARLEELQEVVLAADLLEGDMIAGKNLEDFLRNVGIKSPKEEVEKILQSDFVSEDNMVNIKDCMRALRDTQKFSNYIDFRKEASNLKLPKVNEIKEAANILSHVDNGKIGIPDLEHALKCLNVNLTEEDFNEALNCCNVSDNMEVDLKDFLMKMKESPHFQKSKATQILLATTQILQNDLVDVSDLKTLLMDKDLHTANAILTVMLRHVPEHESGKVSIQEFMTKLSDILTIPKAAGKFYLICTYCPDLERQAVVYMLKTIQDSIVKAQVSKKQYNMNIKQHKISLHNFCLNSKANIAKLNPNSKF

SEQ ID NO: 18095 - protein, 784 aa, Homo sapiens
METKVHLFCQAEENIDLLDDGSNSFATDLSSGTINHKKYIKFSKTIEKEISPEIRSLSPEYKKIFETSIIFCGEEKSSDFSGEKKVGRKSLQVQQHSKRTEIIPPFLKLSKEKVTRKENSLCKLPNQYSVHKTSSPLCTSSAITREKEMLSNLYMTLYDEVTHGYLHSKELSGNHMVDIGDIIFTLNELQEQYEDVSITEGSPLNEITSDRKLSSVAGCYLKYKKKNSLSSKLPEPSISKKLNKKSNQYYSKIMENDDLESKRPKNTWQIRKFLGGVGSSNVGVQEPYSKNGINFKKHSEKGEIHDSKSKPQSLKSSTSLSKSLDKSDISSIPKLQKPAVRKHSSLQKQVSSTEKTAISTLENFCEAISKLQENYIAAEELQSILPSTGINLLDEEFQKIVTDTSRNENGMVELDDFVNALAKERSFPECNALPGVIKAIDKIKDKNVDYEDLNTCLQNFGIYLSKPEFKKITELTEAGETKKVNFKEFIDTMMSNTECFSEKLVLPDAIETLDDLRKETMSVSDLWNTLSSLNSNLKKDEFLAALELVTVDEGDKVQFEEFAKVVRNMRDAARLEELQEVVLAADLLEGDMIAGKNLEDFLRNVGIKSPKEEVEKILQSDFVSEDNMVNIKDCMRALRDTQKFSNYIDFRKEASNLKLPKVNEIKEAANILSHVDNGKIGIPDLEHALKCLNVNLTEEDFNEALNCCNVSDNMEVDLKDFLMKMKESPHFQKSKATQILLATTQILQNDLVDVSDLKTLLMDKDLHTANAILTVMLRHVPEHG

SEQ ID NO: 18096 - protein, 578 aa, Homo sapiens
MPFRLLIPLGLLCALLPQHHGAPGPDGSAPDPAHYRERVKAMFYHAYDSYLENAFPFDELRPLTCDGHDTWGSFSLTLIDALDTLLILGNVSEFQRVVEVLQDSVDFDIDVNASVFETNIRVVGGLLSAHLLSKKAGVEVEAGWPCSGPLLRMAEEAARKLLPAFQTPTGMPYGTVNLLHGVNPGETPVTCTAGIGTFIVEFATLSSLTGDPVFEDVARVALMRLWESRSDIGLVGNHIDVLTGKWVAQDAGIGAGVDSYFEYLVKGAILLQDKKLMAMFLEYNKAIRNYTRFDDWYLWVQMYKGTVSMPVFQSLEAYWPGLQSLIGDIDNAMRTFLNYYTVWKQFGGLPEFYNIPQGYTVEKREGYPLRPELIESAMYLYRATGDPTLLELGRDAVESIEKISKVECGFATIKDLRDHKLDNRMESFFLAETVKYLYLLFDPTNFIHNNGSTFDAVITPYGECILGAGGYIFNTEAHPIDPAALHCCQRLKEEQWEVEDLMREFYSLKRSRSKFQKNTVSSGPWEPPARPGTLFSPENHDQARERKPAKQKVPLLSCPSQPFTSKLALLGQVFLDSS

SEQ ID NO: 18097 - protein, 541 aa, Homo sapiens
MPFRLLIPLGLLCALLPQHHGAPGPDGSAPDPAHYSFSLTLIDALDTLLILGNVSEFQRVVEVLQDSVDFDIDVNASVFETNIRVVGGLLSAHLLSKKAGVEVEAGWPCSGPLLRMAEEAARKLLPAFQTPTGMPYGTVNLLHGVNPGETPVTCTAGIGTFIVEFATLSSLTGDPVFEDVARVALMRLWESRSDIGLVGNHIDVLTGKWVAQDAGIGAGVDSYFEYLVKGAILLQDKKLMAMFLEYNKAIRNYTRFDDWYLWVQMYKGTVSMPVFQSLEAYWPGLQSLIGDIDNAMRTFLNYYTVWKQFGGLPEFYNIPQGYTVEKREGYPLRPELIESAMYLYRATGDPTLLELGRDAVESIEKISKVECGFATIKDLRDHKLDNRMESFFLAETVKYLYLLFDPTNFIHNNGSTFDAVITPYGECILGAGGYIFNTEAHPIDPAALHCCQRLKEEQWEVEDLMREFYSLKRSRSKFQKNTVSSGPWEPPARPGTLFSPENHDQARERKPAKQKVPLLSCPSQPFTSKLALLGQVFLDSS

SEQ ID NO: 18098 - protein, 657 aa, Homo sapiens
MQWRALVLGLVLLRLGLHGVLWLVFGLGPSMGFYQRFPLSFGFQRLRSPDGPASPTSGPVGRPGGVSGPSWLQPPGTGAAQSPRKAPRRPGPGMCGPANWGYVLGGRGRGPDEYEKRYSGAFPPQLRAQMRDLARGMFVFGYDNYMAHAFPQDELNPIHCRGRGPDRGDPSNLNINDVLGNYSLTLVDALDTLAIMGNSSEFQKAVKLVINTVSFDKDSTVQVFEATIRVLGSLLSAHRIITDSKQPFGDMTIKDYDNELLYMAHDLAVRLLPAFENTKTGIPYPRVNLKTGVPPDTNNETCTAGAGSLLVEFGILSRLLGDSTFEWVARRAVKALWNLRSNDTGLLGNVVNIQTGHWVGKQSGLGAGLDSFYEYLLKSYILFGEKEDLEMFNAAYQSIQNYLRRGREACNEGEGDPPLYVNVNMFSGQLMNTWIDSLQAFFPGLQVLIGDVEDAICLHAFYYAIWKRYGALPERYNWQLQAPDVLFYPLRPELVESTYLLYQATKNPFYLHVGMDILQSLEKYTKVKCGYATLHHVIDKSTEDRMESFFLSETCKYLYLLFDEDNPVHKSGTRYMFTTEGHIVSVDEHLRELPWKEFFSEEGGQDQGGKSVHRPKPHELKVINSSSNCNRVPDERRYSLPLKSIYMRQIDQMVGLI

SEQ ID NO: 18099 - protein, 376 aa, Homo sapiens
MGNSSEFQKAVKLVINTVSFDKDSTVQVFEATIRVLGSLLSAHRIITDSKQPFGDMTIKDYDNELLYMAHDLAVRLLPAFENTKTGIPYPRVNLKTGVPPDTNNETCTAGAGSLLVEFGILSRLLGDSTFEWVARRAVKALWNLRSNDTGLLGNVVNIQTGHWVGKQSGLGAGLDSFYEYLLKSYILFGEKEDLEMFNAAYQSIQNYLRRGREACNEGEGDPPLYVNVNMFSGQLMNTWIDSLQAFFPGLQVLIGDVEDAICLHAFYYAIWKRYGALPERYNWQLQAPDVLFYPLRPELVESTYLLYQATKNPFYLHVGMDILQSLEKYTKVKCGYATLHHVIDKSTEDRMESFFLSETCKYLYLVCVLQDEPRNI

SEQ ID NO: 18100 - protein, 178 aa, Homo sapiens
MVSVPTTWCSVALALLVALHEGKGQAAATLEQPASSSHAQGTHLRLRRCSCSSWLDKECVYFCHLDIIWVNTPEQTAPYGLGNPPRRRRRSLPRRCQCSSARDPACATFCLRRPWTEAGAVPSRKSPADVFQTGKTGATTGELLQRLRDISTVKSLFAKRQQEAMREPRSTHSRWRKR

SEQ ID NO: 18101 - protein, 281 aa, Homo sapiens
MATNFLAHEKIWFDKFKYDDAERRFYEQMNGPVAGASRQENGASVILRDIARARENIQKSLAGSSGPGASSGTSGDHGELVVRIASLEVENQSLRGVVQELQQAISKLEARLNVLEKSSPGHRATAPQTQHVSPMRQVEPPAKKPATPAEDDEDDDIDLFGSDNEEEDKEAAQLREERLRQYAEKKAKKPALVAKSSILLDVKPWDDETDMAQLEACVRSIQLDGLVWGASKLVPVGYGIRKLQIQCVVEDDKVGTDLLEEEITKFEEHVQSVDIAAFNKI

SEQ ID NO: 18102 - protein, 647 aa, Homo sapiens
MRSGKASCTLETVWEDKHKYEEAERRFYEHEATQAAASAQQLPAEGPAMNGPGQDDPEDADEAEAPDGGSRRDPRKSQDSRKPLQKKRKRSPKSGLGPADLALLGLSAERVWLDKSLFDQAESSYRQKLADVAAQAAWPPALAPWGLCTHGNQVACHHVTWGIWVNKSSFDQAERAFVEWSQALLLAPDGSRRQGTPNTGQQVAVPDLAHQPSPPVNGQPPLGSLQALVREVWLEKPRYDAAERGFYEALFDGHPPGKVRLQERAGLAEGARRGRRDRRGRNILGNKRAGLRRADGEAPSALPYCYFLQKDAEAPWLSKPAYDSAECRHHAAEALRVAWCLEAASLSHRPGPRSGLSVSSLRPNRKMATNFLAHEKIWFDKFKYDDAERRFYEQMNGPVAGASRQENGASVILRDIARARENIQKSLAGSSGPGASSGTSGDHGELVVRIASLEVENQSLRGVVQELQQAISKLEARLNVLEKSSPGHRATAPQTQHVSPMRQVEPPAKKPATPAEDDEDDDIDLFGSDNEEEDKEAAQLREERLRQYAEKKAKKPALVAKSSILLDVKPWDDETDMAQLEACVRSIQLDGLVWGASKLVPVGYGIRKLQIQCVVEDDKVGTDLLEEEITKFEEHVQSVDIAAFNKI

SEQ ID NO: 18103 - protein, 257 aa, Homo sapiens
MATNFLAHEKIWFDKFKYDDAERRFYEQMNGPVAGASRQSSGPGASSGTSGDHGELVVRIASLEVENQSLRGVVQELQQAISKLEARLNVLEKSSPGHRATAPQTQHVSPMRQVEPPAKKPATPAEDDEDDDIDLFGSDNEEEDKEAAQLREERLRQYAEKKAKKPALVAKSSILLDVKPWDDETDMAQLEACVRSIQLDGLVWGASKLVPVGYGIRKLQIQCVVEDDKVGTDLLEEEITKFEEHVQSVDIAAFNKI

SEQ ID NO: 18104 - protein, 262 aa, Homo sapiens
MATNFLAHEKIWFDKFKYDDAERRFYEQMNGPVAGASRQENGASVILRDIARARENIQKSLAGSSGPGASSGTSGDHVVQELQQAISKLEARLNVLEKSSPGHRATAPQTQHVSPMRQVEPPAKKPATPAEDDEDDDIDLFGSDNEEEDKEAAQLREERLRQYAEKKAKKPALVAKSSILLDVKPWDDETDMAQLEACVRSIQLDGLVWGASKLVPVGYGIRKLQIQCVVEDDKVGTDLLEEEITKFEEHVQSVDIAAFNKI

SEQ ID NO: 18105 - protein, 330 aa, Homo sapiens
MAPEENAGTELLLQSFERRFLAARTLRSFPWQSLEAKLRDSSDSELLRDILHKTVKHPVCVKHPPSVKYARCFLSELIKKHEAVHTEPLDELYEALAETLMAKESTQGHRSYLLPSGGSVTLSESTAIISYGTTGLVTWDAALYLAEWAIENPAVFTNRTVLELGSGAGLTGLAICKMCRPRAYIFSDCHSRVLEQLRGNVLLNGLSLEADITAKLDSPRVTVAQLDWDVATVHQLSAFQPDVVIAADVLYCPEAIMSLVGVLRRLAACREHQRAPEVYVAFTVRNPETCQLFTTELGRAGIRWEVEPRHEQKLFPYEEHLEMAMLNLTL

SEQ ID NO: 18106 - protein, 296 aa, Homo sapiens
MAPEENAGTELLLQSFERRFLAARTLRSFPWQSLEAKLRDSSDSELLRDILHKTVKHPVCVKHPPSVKYARCFLSELIKKPSGGSVTLSESTAIISYGTTGLVTWDAALYLAEWAIENPAVFTNRTVLELGSGAGLTGLAICKMCRPRAYIFSDCHSRVLEQLRGNVLLNGLSLEADITAKLDSPRVTVAQLDWDVATVHQLSAFQPDVVIAADVLYCPEAIMSLVGVLRRLAACREHQRAPEVYVAFTVRNPETCQLFTTELGRAGIRWEVEPRHEQKLFPYEEHLEMAMLNLTL

SEQ ID NO: 18107 - protein, 488 aa, Homo sapiens
MGRPLHLVLLSASLAGLLLLGESLFIRREQANNILARVTRANSFLEEMKKGHLERECMEETCSYEEAREVFEDSDKTNEFWNKYKDGDQCETSPCQNQGKCKDGLGEYTCTCLEGFEGKNCELFTRKLCSLDNGDCDQFCHEEQNSVVCSCARGYTLADNGKACIPTGPYPCGKQTLERRKRSVAQATSSSGEAPDSITWKPYDAADLDPTENPFDLLDFNQTQPERGDNNLTRIVGGQECKDGECPWQALLINEENEGFCGGTILSEFYILTAAHCLYQAKRFKVRVGDRNTEQEEGGEAVHEVEVVIKHNRFTKETYDFDIAVLRLKTPITFRMNVAPACLPERDWAESTLMTQKTGIVSGFGRTHEKGRQSTRLKMLEVPYVDRNSCKLSSSFIITQNMFCAGYDTKQEDACQGDSGGPHVTRFKDTYFVTGIVSWGEGCARKGKYGIYTKVTAFLKWIDRSMKTRGLPKAKSHAPEVITSSPLK

SEQ ID NO: 18108 - protein, 416 aa, Homo sapiens
MSISLSSLILLPIWINMAQIQQGGPDEKEKTTALKDLLSRIDLDELMKKDEPPLDFPDTLEGFEYAFNEKGQLRHIKTGEPFVFNYREDLHRWNQKRYEALGEIITKYVYELLEKDCNLKKVSIPVDATESEPKSFIFMSEDALTNPQKLMVLIHGSGVVRAGQWARRLIINEDLDSGTQIPFIKRAVAEGYGVIVLNPNENYIEVEKPKIHVQSSSDSSDEPAEKRERKDKVSKETKKRRDFYEKYRNPQREKEMMQLYIRENGSPEEHAIYVWDHFIAQAAAENVFFVAHSYGGLAFVELMIQREADVKNKVTAVALTDSVHNVWHQEAGKTIREWMRENCCNWVSSSEPLDTSVESMLPDCPRVSAGTDRHELTSWKSFPSIFKFFTEASEAKTSSLKPAVTRRSHRIKHEEL

SEQ ID NO: 18109 - protein, 292 aa, Homo sapiens
MSISLSSLILLPIWINMAQIQQGGPDEKEKTTALKDLLSRIDLDELMKKDEPPLDFPDTLEGFEYAFNEKGQLRHIKTGEPFVFNYREDLHRWNQKRYEALGEIITKYVYELLEKDCNLKKVSIPVDATESEPKSFIFMSEDALTNPQKLMVLIHGSGVVRAGQWARRLIINEDLDSGTQIPFIKRAVAEGYGVIVLNPNENYIEVEKPKIHVQSSSDSSDEPAEKRERKDKVSKETKKRRDFYEKYRNPQREKEMMQLYIRVSEITTFLYYFLYLVYILLYVDCFVFLQEY

SEQ ID NO: 18110 - protein, 370 aa, Homo sapiens
MKKDEPPLDFPDTLEGFEYAFNEKGQLRHIKTGEPFVFNYREDLHRWNQKRYEALGEIITKYVYELLEKDCNLKKVSIPVDATESEPKSFIFMSEDALTNPQKLMVLIHGSGVVRAGQWARRLIINEDLDSGTQIPFIKRAVAEGYGVIVLNPNENYIEVEKPKIHVQSSSDSSDEPAEKRERKDKVSKETKKRRDFYEKYRNPQREKEMMQLYIRENGSPEEHAIYVWDHFIAQAAAENVFFVAHSYGGLAFVELMIQREADVKNKVTAVALTDSVHNVWHQEAGKTIREWMRENCCNWVSSSEPLDTSVESMLPDCPRVSAGTDRHELTSWKSFPSIFKFFTEASEAKTSSLKPAVTRRSHRIKHEEL

SEQ ID NO: 18111 - protein, 306 aa, Homo sapiens
MKKDEPPLDFPDTLEGFEYAFNEKGQLRHIKTGEPFVFNYREDLHRWNQKRYEALGEIITKYVYELLEKDCNLKKVSIPEGYGVIVLNPNENYIEVEKPKIHVQSSSDSSDEPAEKRERKDKVSKETKKRRDFYEKYRNPQREKEMMQLYIRENGSPEEHAIYVWDHFIAQAAAENVFFVAHSYGGLAFVELMIQREADVKNKVTAVALTDSVHNVWHQEAGKTIREWMRENCCNWVSSSEPLDTSVESMLPDCPRVSAGTDRHELTSWKSFPSIFKFFTEASEAKTSSLKPAVTRRSHRIKHEEL

SEQ ID NO: 18112 - protein, 283 aa, Homo sapiens
MKCYFTDHRGEQSPTDGTTLSLTSPESTEESVEVFWPGTIQREGSSPRPGPAIPREEGLYFAARDRGMRDWSSSPSSESSEYQSYSQYQSCCSCMCDEDNAAPQSVCAFYTHVQTVRGVAVAWETEAGFEPVTRKPRIHEAQFIKRQRWNGSSFEMASNTDMRWDLEACKSNCSPEPEDIDLLECCLQELREPPDWLVTTNYGVRCVACCRVLPSLDALLEHAQHGIREGFSCQIFFEEMLERRRAQGQAHDQQLEEEQSPSDNSECSRPQGEVLSAQQQEKQ

SEQ ID NO: 18113 - protein, 397 aa, Homo sapiens
MGDQRPRDRPRSPGMDCKPWYCDKPPSKYIAKRKHRRLRFPPMDTQNWVFVKESMDSFHYGCPSPEDMLICRLNEFLLPKISHRGPQADPKSRQKKLLKKVALFSKLLPAQPAWKAFVEEAQLMAKHPLAMYPNLGEDMPPDLLLQMLKLLDPERKLEKAWAYCEGREKTIKEPTKPEPPKAPVSHHFLEPPKIRASCLKELLQEDTPSTTECVSDSLQHRYTSRKMHDFKWARDMGVDEESIRNLFDFTPKWRATYEDQQIKKIKEWVSELQYRIKLDEMDEVESSQEKDWDRKLQMAPNSYTAQCVKMRYGVWYLKPKLGKKLRSDQPLIDPKLLLEKPDEPDILDDLYGPIAFKDFILSKGYEMPGIIERLCARKGWTYDSVKTPVQRAMRLYK

SEQ ID NO: 18114 - protein, 149 aa, Homo sapiens
MSTNICSFKDRCVSILCCKFCKQVLSSRGMKAVLLADTEIDLFSTDIPPTNAVDFTGRCYFTKICKCKLKDIACLKCGNIVGYHVIVPCSSCLPSCNNGHFWMFHSQAVYDINRLDSTGVNILLWGNLPEIEESTDEDVLNISAEECIR

SEQ ID NO: 18115 - protein, 109 aa, Homo sapiens
MSTNICSFKDSAVDFTGRCYFTKICKCKLKDIACLKCGNIVGYHVIVPCSSCLPSCNNGHFWMFHSQAVYDINRLDSTGVNILLWGNLPEIEESTDEDVLNISAEECIR

SEQ ID NO: 18116 - protein, 149 aa, Homo sapiens
MSTNICSFKDRCVSILCCKFCKQVLSSRGMKAVLLADTEIDLFSTDIPPTNAVDFTGRCYFTKICKCKLKDIACLKCGNIVVYHVIVPCSSCLLSCNNRHFWMFHSQAVYDINRLDSTGVNVLLRGNLPEIEESTDEDVLNISAEECIR

SEQ ID NO: 18117 - protein, 149 aa, Homo sapiens
MSTNICSFKDRCVSILCCKFCKQVLSSRGMKAVLLADTEIDLFSTDIPPTNAVDFTGRCYFTKICKCKLKDIACLKCGNIVGYHVIVPCSSCLLSCNNRHFWMFHSQAVYDINRLDSTGVNVLLRGNLPEIEESTDEDVLNISAEECIR

SEQ ID NO: 18118 - protein, 213 aa, Homo sapiens
MDQEPVGGVERGEAVAASGAAAAAAFGESAGQMSNERGFENVELGVIGKKKKVPRRVIHFVSGETMEEYSTDEDEVDGLEKKDVLPTVDPTKLTWGPYLWFYMLRAATSTLSVCDFLGEKIASVLGISTPKYQYAIDEYYRMKKEEEEEEEENRMSEEAEKQYQQNKLQTDSIVQTDQPETVISSSFVNVNFEMEGDSEVIMESKQNPVSVPP

SEQ ID NO: 18119 - protein, 236 aa, Homo sapiens
MEVGLPAITLFLTSASSPVVATTMDQEPVGGVERGEAVAASGAAAAAAFGESAGQMSNERGFENVELGVIGKKKKVPRRVIHFVSGETMEEYSTDEDEVDGLEKKDVLPTVDPTKLTWGPYLWFYMLRAATSTLSVCDFLGEKIASVLGISTPKYQYAIDEYYRMKKEEEEEEEENRMSEEAEKQYQQNKLQTDSIVQTDQPETVISSSFVNVNFEMEGDSEVIMESKQNPVSVPP

SEQ ID NO: 18120 - protein, 135 aa, Homo sapiens
MAGHPKERVVTDEVHQNQILRELYLKELRTQKLHTQYHVNPLRKVHRITRKPMSWHDNLEEPADARFLNLIHHAAQGPTKKYPEAQTENQEIGWDSEALVDPERRDHRMNHFRVYSDITLYKAKMWSLGEDDRHK

SEQ ID NO: 18121 - protein, 434 aa, Homo sapiens
MSRSRHLGKIRKRLEDVKSQWVRPARADFSDNESARLATDALLDGGSEAYWRVLSQEGEVDFLSSVEAQYIQAQAREPPCPPDTLGGAEAGPKGLDSSSLQSGTYFPVASEGSEPALLHSWASAEKPYLKEKSSATVYFQTVKHNNIRDLVRRCITRTSQVLVILMDVFTDVEIFCDILEAANKRGVFVCVLLDQGGVKLFQEMCDKVQISDSHLKNISIRSVEGEIYCAKSGRKFAGQIREKFIISDWRFVLSGSYSFTWLCGHVHRNILSKFTGQAVELFDEEFRHLYASSKPVMGLKSPRLVAPVPPGAAPANGRLSSSSGSASDRTSSNPFSGRSAGSHPGTRSVSASSGPCSPAAPHPPPPPRFQPHQGPWGAPSPQAHLSPRPHDGPPAAVYSNLGAYRPTRLQLEQLGLVPRLTPTWRPFLQASPHF

SEQ ID NO: 18122 - protein, 294 aa, Homo sapiens
MSRSRHLGKIRKRLEDVKSQWVRPARADFSDNESARLATDALLDGGSEAYWRVLSQEGEVDFLSSVEAQYIQAQAREPPCPPDTLGGAEAGPKGLDSSSLQSGTYFPVASEGSEPALLHSWASAEKPYLKEKSSATVYFQTVKHNNIRDLVRRCITRTSQNISIRSVEGEIYCAKSGRKFAGQIREKFIISDWRFVLSGSYSFTWLCGHVHRNILSKFTGQAVELFDEEFRHLYASSKPVMGLKSPRLVAPVPPGAAPANGRLSSSSGSASDRTSSNPFSGRSAGSHPGTRTDG

SEQ ID NO: 18123 - protein, 367 aa, Homo sapiens
MSRSRHLGKIRKRLEDVKSQWVRPARADFSDNESARLATDALLDGGSEAYWRVLSQEGEVDFLSSVEAQYIQAQAREPPCPPDTLGGAEAGPKGLDSSSLQSGTYFPVASEGSEPALLHSWASAEKPYLKEKSSATVYFQTVKHNNIRDLVRRCITRTSQVLVILMDVFTDVEIFCDILEAANKRGVFVCVLLDQGGVKLFQEMCDKVQISDSHLKNISIRSVEGEIYCAKSGRKFAGQIREKFIISDWRFVLSGSYSFTWLCGHVHRNILSKFTGQAVELFDEEFRHLYASSKPVMGLKSPRLVAPVPPGAAPANGRLSSSSGSASDRTSSNPFSGRSAGSHPVPESKQNKTKTKKQTTLWFLMAF

SEQ ID NO: 18124 - protein, 452 aa, Homo sapiens
MQLQFLGTLASSEKRKKSQRLFFKNIKSTKNKAGKASIMSSDTNVNKSASPTATAEEQPVEPDGPLPGSDNNQEKKVRLSPAKMSTKNSTDLVEYVDKSHAFLPIIPNTQRGQLEDRLNNQARTIAFLLEQAFRIKEDISACLQGTHGFRKEESLARKLLESHIQTITSIVKKLSQNIEILEDQIRARDQAATGTNFAVHEINIKHLQGVGDLRGRVARCDSSIVKLSGDIHLFRQEHRQIEKAIQEFVPALETLSKNLDMKVMQLLGKIETASSEQTSNLKMVQGDYRHEMNLLEFKFHSLSSNLYEEVENNKKWTENQFLKYRKDHLGHINECLKVLQEKLEKSENKMEEKLLQLSSKVENFINTQKQETQLSKVKHMENKLSKKMEQMEKQIWGELETMQNEYQSGFKSIHDSLSSLQQIQKTKMDLEKYKVQKDLKKLQRKIVELQEV

SEQ ID NO: 18125 - protein, 213 aa, Homo sapiens
MDPLQKRNPASPSKSSPMTAAETSQEGPAPSQPSYSEQPMMGLSNLSPGPGPSQAVPLPEGLLRQRYREEKTLEERRWERLEFLQRKKAFLRHVRRRHRDHMAPYAVGREARISPLGDRSQNRFRCECRYCQSHRPNLSGIPGESNRAPHPSSWETLVQGLSGLTLSLGTNQPGPLPEAALQPQETEEKRQRERQQESKIMFQRLLKQWLEEN

SEQ ID NO: 18126 - protein, 450 aa, Homo sapiens
MILLVNLFVLLSVVCVLLNLAGFILGCQGAQFVSSVPRCDLVDLGEGKICFCCEEFQPAKCTDKENALKLFPVQPCSAVHLLLKKVLFALCALNALTTTVCLVAAALRYLQIFATRRSCIDESQISAEEAEDHGRIPDPDDFVPPVPPPSYFATFYSCTPRMNRRMVGPDVIPLPHIYGARIKGVEVFCPLDPPPPYEAVVSQMDQEQGSSFQMSEGSEAAVIPLDLGCTQVTQDGDIPNIPAEENASTSTPSSTLVRPIRSRRALPPLRTRSKSDPVLHPSEERAAPVLSCEAATQTERRLDLAAVTLRRGLRSRASRCRPRSLIDYKSYMDTKLLVARFLEQSSCTMTPDIHELVENIKSVLKSDEEHMEEAITSASFLEQIMAPLQPSTSRAHKLPSRRQPGLLHLQSCGDLHTFTPAGRPRAERRPRRVEAERPHSLIGVIRETVL

SEQ ID NO: 18127 - protein, 289 aa, Homo sapiens
MNRRMVGPDVIPLPHIYGARIKGVEVFCPLDPPPPYEAVVSQMDQEQGSSFQMSEGSEAAVIPLDLGCTQVTQDGDIPNIPAEENASTSTPSSTLVRPIRSRRALPPLRTRSKSDPVLHPSEERAAPVLSCEAATQTERRLDLAAVTLRRGLRSRASRCRPRSLIDYKSYMDTKLLVARFLEQSSCTMTPDIHELVENIKSVLKSDEEHMEEAITSASFLEQIMAPLQPSTSRAHKLPSRRQPGLLHLQSCGDLHTFTPAGRPRAERRPRRVEAERPHSLIGVIRETVL

SEQ ID NO: 18128 - protein, 239 aa, Homo sapiens
MTCFGPYPIGTGLQGITLCYSCFPSFCKMKSRMCMAISICQMLSMLSFVVCAFRYRHMFKRGWPMGTCCLFLPTAAPVLSCEAATQTERRLDLAAVTLRRGLRSRASRCRPRSLIDYKSYMDTKLLVARFLEQSSCTMTPDIHELVENIKSVLKSDEEHMEEAITSASFLEQIMAPLQPSTSRAHKLPSRRQPGLLHLQSCGDLHTFTPAGRPRAERRPRRVEAERPHSLIGVIRETVL

SEQ ID NO: 18129 - protein, 286 aa, Homo sapiens
MTGTLERENWISGGKSLVLRKQHPGPLRPWRKRAAQLGGGCGWRTAVAPAKFCLWYVVPSWLWEPPGYLHSSLFLSILFQVTLLETALQSRPNLSLPLVRCGWACTQAMSTRSNCGSRSFLWAQTQADAASGLPRSRLGFLGLGGCGLIVKHGMTLRNWASFFVVFQAWSLMILQVLGDMLNIYYAYIQATLTLKVDVAPRLFFPEGGALKEHFSSMDSFQLREAGGTRIPRPALIYGRAVVTRTVTKAQSLKSALAWAALGCKHPVLSTLCEESQQGAWSEFRRF

SEQ ID NO: 18130 - protein, 998 aa, Homo sapiens
MVFQTRYPSWIILCYIWLLRFAHTGEAQAAKEVLLLDSKAQQTELEWISSPPNGWEEISGLDENYTPIRTYQVCQVMEPNQNNWLRTNWISKGNAQRIFVELKFTLRDCNSLPGVLGTCKETFNLYYYETDYDTGRNIRENLYVKIDTIAADESFTQGDLGERKMKLNTEVREIGPLSKKGFYLAFQDVGACIALVSVKVYYKKCWSIIENLAIFPDTVTGSEFSSLVEVRGTCVSSAEEEAENAPRMHCSAEGEWLVPIGKCICKAGYQQKGDTCEPCGRGFYKSSSQDLQCSRCPTHSFSDKEGSSRCECEDGYYRAPSDPPYVACTRPPSAPQNLIFNINQTTVSLEWSPPADNGGRNDVTYRILCKRCSWEQGECVPCGSNIGYMPQQTGLEDNYVTVMDLLAHANYTFEVEAVNGVSDLSRSQRLFAAVSITTGQAAPSQVSGVMKERVLQRSVELSWQEPEHPNGVITEYEIKYYEKDQRERTYSTVKTKSTSASINNLKPGTVYVFQIRAFTAAGYGNYSPRLDVATLEEATGKMFEATAVSSEQNPVIIIAVVAVAGTIILVFMVFGFIIGRRHCGYSKADQEGDEELYFHFKFPGTKTYIDPETYEDPNRAVHQFAKELDASCIKIERVIGAGEFGEVCSGRLKLPGKRDVAVAIKTLKVGYTEKQRRDFLCEASIMGQFDHPNVVHLEGVVTRGKPVMIVIEFMENGALDAFLRKHDGQFTVIQLVGMLRGIAAGMRYLADMGYVHRDLAARNILVNSNLVCKVSDFGLSRVIEDDPEAVYTTTGGKIPVRWTAPEAIQYRKFTSASDVWSYGIVMWEVMSYGERPYWDMSNQDVIKAIEEGYRLPAPMDCPAGLHQLMLDCWQKERAERPKFEQIVGILDKMIRNPNSLKTPLGTCSRPISPLLDQNTPDFTTFCSVGEWLQAIKMERYKDNFTAAGYNSLESVARMTIEDVMSLGITLVGHQKKIMSSIQTMRAQMLHLHGTGIQV

SEQ ID NO: 18131 - protein, 993 aa, Homo sapiens
MVFQTRYPSWIILCYIWLLRFAHTGEAQAAKEVLLLDSKAQQTELEWISSPPNGWEEISGLDENYTPIRTYQVCQVMEPNQNNWLRTNWISKGNAQRIFVELKFTLRDCNSLPGVLGTCKETFNLYYYETDYDTGRNIRENLYVKIDTIAADESFTQGDLGERKMKLNTEVREIGPLSKKGFYLAFQDVGACIALVSVKVYYKKCWSIIENLAIFPDTVTGSEFSSLVEVRGTCVSSAEEEAENAPRMHCSAEGEWLVPIGKCICKAGYQQKGDTCEPCGRGFYKSSSQDLQCSRCPTHSFSDKEGSSRCECEDGYYRAPSDPPYVACTRPPSAPQNLIFNINQTTVSLEWSPPADNGGRNDVTYRILCKRCSWEQGECVPCGSNIGYMPQQTGLEDNYVTVMDLLAHANYTFEVEAVNGVSDLSRSQRLFAAVSITTGQAAPSQVSGVMKERVLQRSVELSWQEPEHPNGVITEYEIKYYEKDQRERTYSTVKTKSTSASINNLKPGTVYVFQIRAFTAAGYGNYSPRLDVATLEEATATAVSSEQNPVIIIAVVAVAGTIILVFMVFGFIIGRRHCGYSKADQEGDEELYFHFKFPGTKTYIDPETYEDPNRAVHQFAKELDASCIKIERVIGAGEFGEVCSGRLKLPGKRDVAVAIKTLKVGYTEKQRRDFLCEASIMGQFDHPNVVHLEGVVTRGKPVMIVIEFMENGALDAFLRKHDGQFTVIQLVGMLRGIAAGMRYLADMGYVHRDLAARNILVNSNLVCKVSDFGLSRVIEDDPEAVYTTTGGKIPVRWTAPEAIQYRKFTSASDVWSYGIVMWEVMSYGERPYWDMSNQDVIKAIEEGYRLPAPMDCPAGLHQLMLDCWQKERAERPKFEQIVGILDKMIRNPNSLKTPLGTCSRPISPLLDQNTPDFTTFCSVGEWLQAIKMERYKDNFTAAGYNSLESVARMTIEDVMSLGITLVGHQKKIMSSIQTMRAQMLHLHGTGIQV

SEQ ID NO: 18132 - protein, 279 aa, Homo sapiens
MVFQTRYPSWIILCYIWLLRFAHTGEAQAAKEVLLLDSKAQQTELEWISSPPNGWEEISGLDENYTPIRTYQVCQVMEPNQNNWLRTNWISKGNAQRIFVELKFTLRDCNSLPGVLGTCKETFNLYYYETDYDTGRNIRENLYVKIDTIAADESFTQGDLGERKMKLNTEVREIGPLSKKGFYLAFQDVGACIALVSVKVYYKKCWSIIENLAIFPDTVTGSEFSSLVEVRGTCVSSAEEEAENAPRMHCSAEGEWLVPIGKCICKAGYQQKGDTCERK

SEQ ID NO: 18133 - protein, 994 aa, Homo sapiens
MVFQTRYPSWIILCYIWLLRFAHTGEAQAAKEVLLLDSKAQQTELEWISSPPNGWEEISGLDENYTPIRTYQVCQVMEPNQNNWLRTNWISKGNAQRIFVELKFTLRDCNSLPGVLGTCKETFNLYYYETDYDTGRNIRENLYVKIDTIAADESFTQGDLGERKMKLNTEVREIGPLSKKGFYLAFQDVGACIALVSVKVYYKKCWSIIENLAIFPDTVTGSEFSSLVEVRGTCVSSAEEEAENAPRMHCSAEGEWLVPIGKCICKAGYQQKGDTCEPCGRGFYKSSSQDLQCSRCPTHSFSDKEGSSRCECEDGYYRAPSDPPYVACTRPPSAPQNLIFNINQTTVSLEWSPPADNGGRNDVTYRILCKRCSWEQGECVPCGSNIGYMPQQTGLEDNYVTVMDLLAHANYTFEVEAVNGVSDLSRSQRLFAAVSITTGQAAPSQVSGVMKERVLQRSVELSWQEPEHPNGVITEYEIKYYEKDQRERTYSTVKTKSTSASINNLKPGTVYVFQIRAFTAAGYGNYSPRLDVATLEEATGKMFEATAVSSEQNPVIIIAVVAVAGTIILVFMVFGFIIGRRHCGYSKADQEGDEELYFHCTKTYIDPETYEDPNRAVHQFAKELDASCIKIERVIGAGEFGEVCSGRLKLPGKRDVAVAIKTLKVGYTEKQRRDFLCEASIMGQFDHPNVVHLEGVVTRGKPVMIVIEFMENGALDAFLRKHDGQFTVIQLVGMLRGIAAGMRYLADMGYVHRDLAARNILVNSNLVCKVSDFGLSRVIEDDPEAVYTTTGGKIPVRWTAPEAIQYRKFTSASDVWSYGIVMWEVMSYGERPYWDMSNQDVIKAIEEGYRLPAPMDCPAGLHQLMLDCWQKERAERPKFEQIVGILDKMIRNPNSLKTPLGTCSRPISPLLDQNTPDFTTFCSVGEWLQAIKMERYKDNFTAAGYNSLESVARMTIEDVMSLGITLVGHQKKIMSSIQTMRAQMLHLHGTGIQV

SEQ ID NO: 18134 - protein, 449 aa, Homo sapiens
MVFQTRYPSWIILCYIWLLRFAHTGEAQAAKEVLLLDSKAQQTELEWISSPPNGWEEISGLDENYTPIRTYQVCQVMEPNQNNWLRTNWISKGNAQRIFVELKFTLRDCNSLPGVLGTCKETFNLYYYETDYDTGRNIRENLYVKIDTIAADESFTQGDLGERKMKLNTEVREIGPLSKKGFYLAFQDVGACIALVSVKVYYKKCWSIIENLAIFPDTVTGSEFSSLVEVRGTCVSSAEEEAENAPRMHCSAEGEWLVPIGKCICKAGYQQKGDTCEPCGRGFYKSSSQDLQCSRCPTHSFSDKEGSSRCECEDGYYRAPSDPPYVACTRPPSAPQNLIFNINQTTVSLEWSPPADNGGRNDVTYRILCKRCSWEQGECVPCGSNIGYMPQQTGLEDNYVTVMDLLAHANYTFEVEAVNGVSDLSRSQRLFAAVSITTGQAGMFCVYLH

SEQ ID NO: 18135 - protein, 1140 aa, Homo sapiens
MATPGMSWQQHYYGGSAAKFAPSPATAQLAGHSMDYSQEMHLKMSKKIAQLTKVIYALNTKNDEHESAIQALKDAHEEEIQQILAETREKILQYKSKVTEELDLRRKIQVLESSLEDHIKMKQQALTEFEAYKHRVEDMQLCAEAQHVQRIVTMSREVEEIRRKFEEKLRSFGQLQVQFEKDKRLALEDLQAAHRREIQELLKSQQDHSASVNKGQEKAEELHRMEVESLNKMLEELRLERKKLIEDYEGKLNKAQSFYERELDTLKRSQLFTAESLQASKEKEADLRKEFQGQEAILRKTIGKLKTELQMVQDEAGSLLDKCQKLQTALAIAENNVQVLQKQLDDAKEGEMALLSKHKEVESELAAARERLQQQASDLVLKASHIGMLQATQMTQEVTIKDLESEKSRVNERLSQLEEERAFLRSKTQSLDEEQKQQILELEKKVNEAKRTQQEYYERELKNLQSRLEEEVTQLNEAHSKTLEELAWKHHMAIEAVHSNAIRDKKKLQMDLEEQHNKDKLNLEEDKNQLQQELENLKEVLEDKLNTANQEIGHLQDMVRKSEQGLGSAEGLIASLQDSQERLQNELDLTKDSLKETKDALLNVEGELEQERQQHEETIAAMKEEEKLKVDKMAHDLEIKWTENLRQECSKLREELRLQHEEDKKSAMSQLLQLKDREKNAARDSWQKKVEDLLNQISLLKQNLEIQLSQSQTSLQQLQAQFTQERQRLTQELEELEEQHQQRHKSLKEAHVLAFQTMEEEKEKEQRALENHLQQKHSAELQSLKDAHRESMEGFRIEMEQELQTLRFELEDEGKAMLASLRSELNHQHAAAIDLLRHNHHQELAAAKMELERSIDISRRQSKEHICRITDLQEELRHREHHISELDKEVQHLHENISALTKELEFKGKEILRIRSESNQQIRLHEQDLNKRLEKELDVMTADHLREKNIMRADFNKTNELLKEINAALQVSLEEMEEKYLMRESKPEDIQMITELKAMLTERDQIIKKLIEDNKFYQLELVNRETNFNKVFNSSPTVGVINPLAKQKKKNDKSPTNRFVSVPNLSALESGGVGNGHPNRLDPIPNSPVHDIEFNSSKPLPQPVPPKGPKTFLSPAQSEASPVASPDPQRQEWFARYFTF

SEQ ID NO: 18136 - protein, 1056 aa, Homo sapiens
MATPGMSWQQHYYGGSAAKFAPSPATAQLAGHSMDYSQEMHLKMSKKIAQLTKVIYALNTKNDEHESAIQALKDAHEEEIQQILAETREKILQYKSKVTEELDLRRKIQVLESSLEDHIKMKQQALTEFEAYKHRVEDMQLCAEAQHVQRIVTMSREVEEIRRKFEEKLRSFGQLQVQFEKDKRLALEDLQAAHRREIQELLKSQQDHSASVNKGQEKAEELHRMEVESLNKMLEELRLERKKLIEDYEGKLNKAQSFYERELDTLKRSQLFTAESLQASKEKEADLRKEFQGQEAILRKTIGKLKTELQMVQDEAGSLLDKCQKLQTALAIAENNVQVLQKQLDDAKEGEMALLSKHKEVESELAAARERLQQQASDLVLKASHIGMLQATQMTQEVTIKDLESEKSRVNERLSQLEEERAFLRSKTQSLDEEQKQQILELEKKVNEAKRTQQEYYERELKNLQSRLEEEVTQLNEAHSKTLEELAWKHHMAIEAVHSNAIRDKKKLQMDLEEQHNKDKLNLEEDKNQLQQELENLKEVLEDKLNTANQEIGHLQDMVRKSEQGLGSAEGLIASLQDSQERLQNELDLTKDSLKETKDALLNVEGELEQERQQHEETIAAMKEEEKLKVDKMAHDLEIKWTENLRQECSKLREELRLQHEEDKKSAMSQLLQLKDREKNAARDSWQKKVEDLLNQISLLKQNLEIQLSQSQTSLQQLQAQFTQERQRLTQELEELEEQHQQRHKSLKEAHVLAFQTMEEEKEKEQRALENHLQQKHSAELQSLKDAHRESMEGFRIEMEQELQTLRFELEDEGKAMLASLRSELNHQHAAAIDLLRHNHHQELAAAKMELERSIDISRRQSKEHICRITDLQEELRHREHHISELDKEVQHLHENISALTKELEFKGKEILRIRSESNQQIRLEEMEEKYLMRESKPEDIQMITELKAMLTERDQIIKKLIQKKKNDKSPTNRFVSVPNLSALESGGVGNGHPNRLDPIPNSPVHDIEFNSSKPLPQPVPPKGPKTFLSPAQSEASPVASPDPQRQEWFARYFTF

SEQ ID NO: 18137 - protein, 1116 aa, Homo sapiens
MATPGMSWQQHYYGGSAAKFAPSPATAQLAGHSMDYSQEMHLKMSKKIAQLTKVIYALNTKNDEHESAIQALKDAHEEEIQQILAETREKILQYKSKVTEELDLRRKIQVLESSLEDHIKMKQQALTEFEAYKHRVEDMQLCAEAQHVQRIVTMSREVEEIRRKFEEKLRSFGQLQVQFEKDKRLALEDLQAAHRREIQELLKSQQDHSASVNKGQEKAEELHRMEVESLNKMLEELRLERKKLIEDYEGKLNKAQSFYERELDTLKRSQLFTAESLQASKEKEADLRKEFQGQEAILRKTIGKLKTELQMVQDEAGSLLDKCQKLQTALAIAENNVQVLQKQLDDAKEGEMALLSKHKEVESELAAARERLQQQASDLVLKASHIGMLQATQMTQEVTIKDLESEKSRVNERLSQLEEERAFLRSKTQSLDEEQKQQILELEKKVNEAKRTQQEYYERELKNLQSRLEEEVTQLNEAHSKTLEELAWKHHMAIEAVHSNAIRDKKKLQMDLEEQHNKDKLNLEEDKNQLQQELENLKEVLEDKLNTANQEIGHLQDMVRKSEQGLGSAEGLIASLQDSQERLQNELDLTKDSLKETKDALLNVEGELEQERQQHEETIAAMKEEEKLKVDKMAHDLEIKWTENLRQECSKLREELRLQHEEDKKSAMSQLLQLKDREKNAARDSWQKKVEDLLNQISLLKQNLEIQLSQSQTSLQQLQAQFTQERQRLTQELEELEEQHQQRHKSLKEAHVLAFQTMEEEKEKEQRALENHLQQKHSAELQSLKDAHRESMEGFRIEMEQELQTLRFELEDEGKAMLASLRSELNHQHAAAIDLLRHNHHQELAAAKMELERSIDISRRQSKEHICRITDLQEELRHREHHISELDKEVQHLHENISALTKELEFKGKEILRIRSESNQQIRLHEQDLNKRLEKELDVMTADHLREKNIMRADFNKTNELLKEINAALQVSLEEMEEKYLMRESKPEDIQMITELKAMLTERDQIIKKLIEDNKFYQLELVNRETNFNKVFNSSPTVGVINPLAKQKKKNDKSPTNRFVSVPNLSALESGGVGNGHPNRLDPIPNSPVHDIEFNSSKPLPQPVPPKGPKTFLRYQ

SEQ ID NO: 18138 - protein, 971 aa, Homo sapiens
MKQQALTEFEAYKHRVEDMQLCAEAQHVQRIVTMSREVEEIRRKFEEKLRSFGQLQVQFEKDKRLALEDLQAAHRREIQELLKSQQDHSASVNKGQEKAEELHRMEVESLNKMLEELRLERKKLIEDYEGKLNKAQSFYERELDTLKRSQLFTAESLQASKEKEADLRKEFQGQEAILRKTIGKLKTELQMVQDEAGSLLDKCQKLQTALAIAENNVQVLQKQLDDAKEGEMALLSKHKEVESELAAARERLQQQASDLVLKASHIGMLQATQMTQEVTIKDLESEKSRVNERLSQLEEERAFLRSKTQSLDEEQKQQILELEKKVNEAKRTQQEYYERELKNLQSRLEEEVTQLNEAHSKTLEELAWKHHMAIEAVHSNAIRDKKKLQMDLEEQHNKDKLNLEEDKNQLQQELENLKEVLEDKLNTANQEIGHLQDMVRKSEQGLGSAEGLIASLQDSQERLQNELDLTKDSLKETKDALLNVEGELEQERQQHEETIAAMKEEEKLKVDKMAHDLEIKWTENLRQECSKLREELRLQHEEDKKSAMSQLLQLKDREKNAARDSWQKKVEDLLNQISLLKQNLEIQLSQSQTSLQQLQAQFTQERQRLTQELEELEEQHQQRHKSLKEAHVLAFQTMEEEKEKEQRALENHLQQKHSAELQSLKDAHRESMEGFRIEMEQELQTLRFELEDEGKAMLASLRSELNHQHAAAIDLLRHNHHQELAAAKMELERSIDISRRQSKEHICRITDLQEELRHREHHISELDKEVQHLHENISALTKELEFKGKEILRIRSESNQQIRLEEMEEKYLMRESKPEDIQMITELKAMLTERDQIIKKLIEDNKFYQLELVNRETNFNKVFNSSPTVGVINPLAKQKKKNDKSPTNRFVSVPNLSALESGGVGNGHPNRLDPIPNSPVHDIEFNSSKPLPQPVPPKGPKTFLSPAQSEASPVASPDPQRQEWFARYFTF

SEQ ID NO: 18139 - protein, 271 aa, Homo sapiens
MLLAPPSTPSRGRTPSAVERLEADKAKYVKTHQVIARRQEPALRGSPGPLTPHPCNELGPPASPRTPRPVRRGSGRRLPRPDSLIFYRQKRDCKASVNKENAKGQGLVRRLFLGAPRDAAPSSPASTERPAASGGWAAPQDAPEAAGKRALCPTCSLPLSEKERFFNYCGLERALVEVLGAERFSPQSWGADASPQAGTSPPPGSGDASDWTSSDRGVDSPGGAGGGGGSEAAGSARDRRPPVSVVERNARVIQWLYGCQRARGPPRESEV

SEQ ID NO: 18140 - protein, 926 aa, Homo sapiens
MASAVRGSRPWPRLGLQLQFAALLLGTLSPQVHTLRPENLLLVSTLDGSLHALSKQTGDLKWTLRDDPVIEGPMYVTEMAFLSDPADGSLYILGTQKQQGLMKLPFTIPELVHASPCRSSDGVFYTGRKQDAWFVVDPESGETQMTLTTEGPSTPRLYIGRTQYTVTMHDPRAPALRWNTTYRRYSAPPMDGSPGKYMSHLASCGMGLLLTVDPGSGTVLWTQDLGVPVMGVYTWHQDGLRQLPHLTLARDTLHFLALRWGHIRLPASGPRDTATLFSTLDTQLLMTLYVGKDETGFYVSKALVHTGVALVPRGLTLAPADGPTTDEVTLQVSGEREGSPSTAVRYPSGSVALPSQWLLIGHHELPPVLHTTMLRVHPTLGSGTAETRPPENTQAPAFFLELLSLSREKLWDSELHPEEKTPDSYLGLGPQDLLAASLTAVLLGGWILFVMRQQQPQVVEKQQETPLAPADFAHISQDAQSLHSGASRRSQKRLQSPSKQAQPLDDPEAEQLTVVGKISFNPKDVLGRGAGGTFVFRGQFEGRAVAVKRLLRECFGLVRREVQLLQESDRHPNVLRYFCTERGPQFHYIALELCRASLQEYVENPDLDRGGLEPEVVLQQLMSGLAHLHSLHIVHRDLKPGNILITGPDSQGLGRVVLSDFGLCKKLPAGRCSFSLHSGIPGTEGWMAPELLQLLPPDSPTSAVDIFSAGCVFYYVLSGGSHPFGDSLYRQANILTGAPCLAHLEEEVHDKVVARDLVGAMLSPLPQPRPSAPQVLAHPFFWSRAKQLQFFQDVSDWLEKESEQEPLVRALEAGGCAVVRDNWHEHISMPLQTDLRKFRSYKGTSVRDLLRAVRNKKHHYRELPVEVRQALGQVPDGFVQYFTNRFPRLLLHTHRAMRSCASESLFLPYYPPDSEARRPCPGATGR

SEQ ID NO: 18141 - protein, 902 aa, Homo sapiens
MTRRRSRPSGGAGRRERARAAGPQKPQAPEPPPPPSLEAGAGAGPPEAPAEPDHDGPREDDEPNLVPGPQVPPASSQPVQTCCLLCHRERKGWEEGPSQNGLVLQGEKLPPDFMPKLVKNLLGEMPLWVCQSCRKSMEEDERQTGREHAVAISLSHTSCKSQSCGDDSHSSSSSSSSSSSSSSSSCPGNSGDWDPSSFLSAHKLSGLWNSPHSSGAMPGSSLGSPPTIPGEAFPVSEHHQHSDLTAPPNSPTGHHPQPASLIPSHPSSFGSPPHPHLLPTTPAAPFPAQASECPVAAATAPHTPGPCQSSHLPSTSMPLLKMPPPFSGCSHPCSGHCGGHCSGPLLPPPSSQPLPSTHRDPGCKGHKFAHSGLACQLPQPCEADEGLGEEEDSSSERSSCTSSSTHQRDGKFCDCCYCEFFGHNAPPAAPTSRNYTEIREKLRSRLTRRKEELPMKGGTLGGIPGEPAVDHRDVDELLEFINSTEPKVPNSARAAKRARHKLKKKEKEKAQLAAEALKQANRVSGSREPRPARERLLEWPDRELDRVNSFLSSRLQEIKNTVKDSIRASFSVCELSMDSNGFSKEGAAEPEPQSLPPSNLSGSSEQQPDINLDLSPLTLGSPQNHTLQAPGEPAPPWAEMRGPHPPWTEVRGPPPGIVPENGLVRRLNTVPNLSRVIWVKTPKPGYPSSEEPSSKEVPSCKQELPEPVSSGGKPQKGKRQGSQAKKSEASPAPRPPASLEVPSAKGQVAGPKQPGRVLELPKVGSCAEAGEGSRGSRPGPGWAGSPKTEKEKGSSWRNWPGEAKARPQEQESVQPSGPARPQSLPQGKGRSRRSRNKQEKPASSLDDVFLPKDMDGVEMDETDREVEYFKRFCLDSAKQTRQKVAVNWTNFSLKKTTPSTAQ

SEQ ID NO: 18142 - protein, 448 aa, Homo sapiens
MKGGTLGGIPGEPAVDHRDVDELLEFINSTEPKVPNSARAAKRARHKLKKKEKEKAQLAAEALKQANRVSGSREPRPARERLLEWPDRELDRVNSFLSSRLQEIKNTVKDSIRASFSVCELSMDSNGFSKEGAAEPEPQSLPPSNLSGSSEQQPDINLDLSPLTLGSPQNHTLQAPGEPAPPWAEMRGPHPPWTEVRGPPPGIVPENGLVRRLNTVPNLSRVIWVKTPKPGYPSSEEPSSKEVPSCKQELPEPVSSGGKPQKGKRQGSQAKKSEASPAPRPPASLEVPSAKGQVAGPKQPGRVLELPKVGSCAEAGEGSRGSRPGPGWAGSPKTEKEKGSSWRNWPGEAKARPQEQESVQPSGPARPQSLPQGKGRSRRSRNKQEKPASSLDDVFLPKDMDGVEMDETDREVEYFKRFCLDSAKQTRQKVAVNWTNFSLKKTTPSTAQ

SEQ ID NO: 18143 - protein, 822 aa, Homo sapiens
MTRRRSRPSGGAGRRERARAAGPQKPQAPEPPPPPSLEAGAGAGPPEAPAEPDHDGPREDDEPNLVPGPQVPPASSQPVQTCCLLCHRERKGWEEGPSQNGLVLQGEKLPPDFMPKLVKNLLGEMPLWVCQSCRKSMEEDERQTGREHAVAISLSHTSCKSQSCGDDSHSSSSSSSSSSSSSSSSCPGNSGDWDPSSFLSAHKLSGLWNSPHSSGAMPGSSLGSPPTIPGEAFPVSEHHQHSDLTAPPNSPTGHHPQPASLIPSHPSSFGSPPHPHLLPTTPAAPFPAQASECPVAAATAPHTPGPCQSSHLPSTSMPLLKMPPPFSGCSHPCSGHCGGHCSGPLLPPPSSQPLPSTHRDPGCKGHKFAHSGLACQLPQPCEADEGLGEEEDSSSERSSCTSSSTHQRDGKFCDCCYCEFFGHNAEKEKAQLAAEALKQANRVSGSREPRPARERLLEWPDRELDRVNSFLSSRLQEIKNTVKDSIRASFSVCELSMDSNGFSKEGAAEPEPQSLPPSNLSGSSEQQPDINLDLSPLTLGSPQNHTLQAPGEPAPPWAEMRGPHPPWTEVRGPPPGIVPENGLVRRLNTVPNLSRVIWVKTPKPGYPSSEEPSSKEVPSCKQELPEPVSSGGKPQKGKRQGSQAKKSEASPAPRPPASLEVPSAKGQVAGPKQPGRVLELPKVGSCAEAGEGSRGSRPGPGWAGSPKTEKEKGSSWRNWPGEAKARPQEQESVQPSGPARPQSLPQGKGRSRRSRNKQEKPASSLDDVFLPKDMDGVEMDETDREVEYFKRFCLDSAKQTRQKVAVNWTNFSLKKTTPSTAQ

SEQ ID NO: 18144 - protein, 387 aa, Homo sapiens
MGPLFTTIPGAHSGPMRPLPKKHVEPMAVRQLLLGNATMIRHTCPMSVPLSRQVKEVAAQKPSEDIYKNWRRQQQQQQQQQQQQQQQQLDLLFHQRIQISLWPRKQKRRKTEQHSHSFVKKAFRFSASPGCGRPSSNKMLRSMGGGQRPTGLGSEFFRLLHDLHLLAFPTKCIWIHRRGEATARPRAPEHPAPPATAVRGRDAASQNLKRRPGSGTDGLRLQGAEPSRLLRTYAGGAVIPTGTPERAQPPPPQDLLGRRRWLSRNTWGPWPGTTQPPSPQLLRNDWGSCGFMVPEAARGKVFQDSQEGAHIRRETVSKSVCAEPWRHQRARDPAPTNFPLKCQKQRGASTSSGQHGGRVNLVFFIDSPTVIAVPDLQCPTKYSGILY

SEQ ID NO: 18145 - protein, 390 aa, Homo sapiens
MISLPGPLVTNLLRFLFLGLSALAPPSRAQLQLHLPANRLQAVEGGEVVLPAWYTLHGEVSSSQPWEVPFVMWFFKQKEKEDQVLSYINGVTTSKPGVSLVYSMPSRNLSLRLEGLQEKDSGPYSCSVNVQDKQGKSRGHSIKTLELNVLVPPAPPSCRLQGVPHVGANVTLSCQSPRSKPAVQYQWDRQLPSFQTFFAPALDVIRGSLSLTNLSSSMAGVYVCKAHNEVGTAQCNVTLEVSTGPGAAVVAGAVVGTLVGLGLLAGLVLLYHRRGKALEEPANDIKEDAIAPRTLPWPKSSDTISKNGTLSSVTSARALRPPHGPPRPGALTPTPSLSSQALPSPRLPTTDGAHPQPISPIPGGVSSSGLSRMGAVPVMVPAQSQAGSLV

SEQ ID NO: 18146 - protein, 141 aa, Homo sapiens
MISLPGPLVTNLLRFLFLGLSALDVIRGSLSLTNLSSSMAGVYVCKAHNEVGTAQCNVTLEVSTGPGAAVVAGAVVGTLVGLGLLAGLVLLYHRRGKALEEPANDIKVRSPLGLSFSAPKMEWLWKWRDAHFYRDSYLSKW

SEQ ID NO: 18147 - protein, 593 aa, Homo sapiens
MSRPSSRAIYLHRKEYSQNLTSEPTLLQHRVEHLMTCKQGSQRVQGPEDALQKLFEMDAQGRVWSQDLILQVRDGWLQLLDIETKEELDSYRLDSIQAMNVALNTCSYNSILSITVQEPGLPGTSTLLFQCQEVGAERLKTSLQKALEEELEQRPRLGGLQPGQDRWRGPAMERPLPMEQARYLEPGIPPEQPHQRTLEHSLPPSPRPLPRHTSAREPSAFTLPPPRRSSSPEDPERDEEVLNHVLRDIELFMGKLEKAQAKTSRKKKFGKKNKDQGGLTQAQYIDCFQKIKHSFNLLGRLATWLKETSAPELVHILFKSLNFILARCPEAGLAAQVISPLLTPKAINLLQSCLSPPESNLWMGLGPAWTTSRADWTGDEPLPYQPTFSDDWQLPEPSSQAPLGYQDPVSLRRGSHRLGSTSHFPQEKTHNHDPQPGDPNSRPSSPKPAQPALKMQVLYEFEARNPRELTVVQGEKLEVLDHSKRWWLVKNEAGRSGYIPSNILEPLQPGTPGTQGQSPSRVPMLRLSSRPEEVTDWLQAENFSTATVRTLGSLTGSQLLRIRPGELQMLCPQEAPRILSRLEAVRRMLGISP

SEQ ID NO: 18148 - protein, 563 aa, Homo sapiens
MSRPSSRAIYLHRKEYSQNLTSEPTLLQHRVEHLMTCKQGSQRVQGPEDALQKLFEMDAQGRVWSQDLILQVRDGWLQLLDIETKEELDSYRLDSIQAMNVALNTCSYNSILSITVQEPGLPGTSTLLFQCQEVGAERLKTSLQKALEEELEQRPRLGGLQPGQDRWRGPAMERPLPMEQARYLEPGIPPEQPHQRTLEHSLPPSPRPLPRHTSAREPSAFTLPPPRRSSSPEDPERDEEVLNHVLRDIELFMGKLEKAQAKTSRKKKFGKKNKDQGGLTQAQYIDCFQKIKHSFNLLGRLATWLKETSAPELVHILFKSLNFILARCPEAGLAAQVISPLLTPKAINLLQSCLSPPESNLWMGLGPAWTTSRADWTGDEPLPYQPTFSDDWQLPEPSSQAPLGYQDPVSLRPSSPKPAQPALKMQVLYEFEARNPRELTVVQGEKLEVLDHSKRWWLVKNEAGRSGYIPSNILEPLQPGTPGTQGQSPSRVPMLRLSSRPEEVTDWLQAENFSTATVRTLGSLTGSQLLRIRPGELQMLCPQEAPRILSRLEAVRRMLGISP

SEQ ID NO: 18149 - protein, 594 aa, Homo sapiens
MSRPSSRAIYLHRKEYSQNLTSEPTLLQHRVEHLMTCKQGSQRVQGPEDALQKLFEMDAQGRVWSQDLILQVRDGWLQLLDIETKEELDSYRLDSIQAMNVALNTCSYNSILSITVQEPGLPGTSTLLFQCQEVGAERLKTSLQKALEEELEQSRPRLGGLQPGQDRWRGPAMERPLPMEQARYLEPGIPPEQPHQRTLEHSLPPSPRPLPRHTSAREPSAFTLPPPRRSSSPEDPERDEEVLNHVLRDIELFMGKLEKAQAKTSRKKKFGKKNKDQGGLTQAQYIDCFQKIKHSFNLLGRLATWLKETSAPELVHILFKSLNFILARCPEAGLAAQVISPLLTPKAINLLQSCLSPPESNLWMGLGPAWTTSRADWTGDEPLPYQPTFSDDWQLPEPSSQAPLGYQDPVSLRRGSHRLGSTSHFPQEKTHNHDPQPGDPNSRPSSPKPAQPALKMQVLYEFEARNPRELTVVQGEKLEVLDHSKRWWLVKNEAGRSGYIPSNILEPLQPGTPGTQGQSPSRVPMLRLSSRPEEVTDWLQAENFSTATVRTLGSLTGSQLLRIRPGELQMLCPQEAPRILSRLEAVRRMLGISP

SEQ ID NO: 18150 - protein, 624 aa, Homo sapiens
MAPRRLLLVGEGNFSFAAALSETLDQSTQLTATCLQRPAELARDPLAWENLQCLRERGIDVRFGVDCTQLADVFELHEREFDQIYFIFPHCGRKAGVAKNRELLAKFFQSCADVLAEEGEVHVALCRGQGGTPADKPQREWHNSWQVVAMAALGGLILSDVYPFSCKAVAGYKCTGYRSQDKSFHVEGALNHIFTRSLPFEGSQPRIFRIKLGNQWFSFPEPEALVGKLNRGFLEAPSCHPIKTINEKLIAELGKVFPLKRLKCSYPLLPQEGTSVLPFWNCDFLSAAFWISLHEDNSNSESLTGGTSQDVEDFLVSFSELSLLKNPGRDGKEEACEGTCGQAKICLRPSLLVHVQDVIEVPDFLSGSLHILSGPVFQKCHILPFTMPAFHETLFILGVNQNLKDGCLQSLLDHLKGILDSLLTQTLPESSKLSSLVKFVLQSNGKDYMIRVKTHNFSPDCTEDLIIGSVITSATSVIHKDQCFVFVSMNLDLLAMLVWCISDWRMLWTFDNRFLKNFVPGKIEPFKSHSLYPPCYVHDVSFWIDQKKGFDELEFHTVARAVSQDTIISIQFLSRFQHPKTQQVSLCYRLTYQTCDKALTQQQVASMQSQFRKEIQQHLYVIPR

SEQ ID NO: 18151 - protein, 475 aa, Homo sapiens
MAALGGLILSDVYPFSCKAVAGYKCTGYRSQDKSFHVEGALNHIFTRSLPFEGSQPRIFRIKLGNQWFSFPEPEALVGKLNRGFLEAPSCHPIKTINEKLIAELGKVFPLKRLKCSYPLLPQEGTSVLPFWNCDFLSAAFWISLHEDNSNSESLTGGTSQDVEDFLVSFSELSLLKNPGRDGKEEACEGTCGQAKICLRPSLLVHVQDVIEVPDFLSGSLHILSGPVFQKCHILPFTMPAFHETLFILGVNQNLKDGCLQSLLDHLKGILDSLLTQTLPESSKLSSLVKFVLQSNGKDYMIRVKTHNFSPDCTEDLIIGSVITSATSVIHKDQCFVFVSMNLDLLAMLVWCISDWRMLWTFDNRFLKNFVPGKIEPFKSHSLYPPCYVHDVSFWIDQKKGFDELEFHTVARAVSQDTIISIQFLSRFQHPKTQQVSLCYRLTYQTCDKALTQQQVASMQSQFRKEIQQHLYVIPR

SEQ ID NO: 18152 - protein, 435 aa, Homo sapiens
MSGYQRRPGATPLSRARSLAIPDAPAFYERRSCLPQLNCERPHGRDLDSPFFGIRPAFMCYVPSPVLASVGDTDFGYGKGKCSKQSPSGAHGTHFGDDRFEDLEEANPFSFREFLKTKNLGLSKEDPASRIYAKEASRHSLGLDHNSPPSQTGGYGLEYQQPFFEDPTGAGDLLDEEEDEDTGWSGAYLPSAIEQTHPERVPAGTSPCSTYLSFFSTPSELAGPESLPSWALSDTDSRVSPASPAGSPSADFAVHGESLGDRHLRTLQISYDALKDENSKLRRKLNEVQSFSEAQTEMVRTLERKLEAKMIKEESDYHDLESVVQQVEQNLELMTKRAVKAENHVVKLKQEISLLQAQVSNFQRENEALRCGQGASLTVVKQNADVALQNLRVVMNSAQASIKQLVSGAETLNLVAEILKSIDRISEVKDEEEDS

SEQ ID NO: 18153 - protein, 412 aa, Homo sapiens
MSGYQRRPGATPLSRARSLAIPDAPAFYERRSCLPQLNCERPHGRDLDSPFFGIRPAFMCYVPSPVLASVGDTDDRFEDLEEANPFSFREFLKTKNLGLSKEDPASRIYAKEASRHSLGLDHNSPPSQTGGYGLEYQQPFFEDPTGAGDLLDEEEDEDTGWSGAYLPSAIEQTHPERVPAGTSPCSTYLSFFSTPSELAGPESLPSWALSDTDSRVSPASPAGSPSADFAVHGESLGDRHLRTLQISYDALKDENSKLRRKLNEVQSFSEAQTEMVRTLERKLEAKMIKEESDYHDLESVVQQVEQNLELMTKRAVKAENHVVKLKQEISLLQAQVSNFQRENEALRCGQGASLTVVKQNADVALQNLRVVMNSAQASIKQLVSGAETLNLVAEILKSIDRISEVKDEEEDS

SEQ ID NO: 18154 - protein, 377 aa, Homo sapiens
MCYVPSPVLASVGDTDFGYGKGKCSKQSPSGAHGTHFGDDRFEDLEEANPFSFREFLKTKNLGLSKEDPASRIYAKEASRHSLGLDHNSPPSQTGGYGLEYQQPFFEDPTGAGDLLDEEEDEDTGWSGAYLPSAIEQTHPERVPAGTSPCSTYLSFFSTPSELAGPESLPSWALSDTDSRVSPASPAGSPSADFAVHGESLGDRHLRTLQISYDALKDENSKLRRKLNEVQSFSEAQTEMVRTLERKLEAKMIKEESDYHDLESVVQQVEQNLELMTKRAVKAENHVVKLKQEISLLQAQVSNFQRENEALRCGQGASLTVVKQNADVALQNLRVVMNSAQASIKQLVSGAETLNLVAEILKSIDRISEVKDEEEDS

SEQ ID NO: 18155 - protein, 362 aa, Homo sapiens
MSGYQRRPGATPLSRARSLAIPDDDRFEDLEEANPFSFREFLKTKNLGLSKEDPASRIYAKEASRHSLGLDHNSPPSQTGGYGLEYQQPFFEDPTGAGDLLDEEEDEDTGWSGAYLPSAIEQTHPERVPAGTSPCSTYLSFFSTPSELAGPESLPSWALSDTDSRVSPASPAGSPSADFAVHGESLGDRHLRTLQISYDALKDENSKLRRKLNEVQSFSEAQTEMVRTLERKLEAKMIKEESDYHDLESVVQQVEQNLELMTKRAVKAENHVVKLKQEISLLQAQVSNFQRENEALRCGQGASLTVVKQNADVALQNLRVVMNSAQASIKQLVSGAETLNLVAEILKSIDRISEVKDEEEDS

SEQ ID NO: 18156 - protein, 5405 aa, Homo sapiens
MGALWSWWILWAGATLLWGLTQEASVDLKNTGREEFLTAFLQNYQLAYSKAYPRLLISSLSESPASVSILSQADNTSKKVTVRPGESVMVNISAKAEMIGSKIFQHAVVIHSDYAISVQALNAKPDTAELTLLRPIQALGTEYFVLTPPGTSARNVKEFAVVAGAAGASVSVTLKGSVTFNGKFYPAGDVLRVTLQPYNVAQLQSSVDLSGSKVTASSPVAVLSGHSCAQKHTTCNHVVEQLLPTSAWGTHYVVPTLASQSRYDLAFVVASQATKLTYNHGGITGSRGLQAGDVVEFEVRPSWPLYLSANVGIQVLLFGTGAIRNEVTYDPYLVLIPDVAAYCPAYVVKSVPGCEGVALVVAQTKAISGLTIDGHAVGAKLTWEAVPGSEFSYAEVELGTADMIHTAEATTNLGLLTFGLAKAIGYATAADCGRTVLSPVEPSCEGMQCAAGQRCQVVGGKAGCVAESTAVCRAQGDPHYTTFDGRRYDMMGTCSYTMVELCSEDDTLPAFSVEAKNEHRGSRRVSYVGLVTVRAYSHSVSLTRGEVGFVLVDNQRSRLPVSLSEGRLRVYQSGPRAVVELVFGLVVTYDWDCQLALSLPARFQDQVCGLCGNYNGDPADDFLTPDGALAPDAVEFASSWKLDDGDYLCEDGCQNNCPACTPGQAQHYEGDRLCGMLTKLDGPFAVCHDTLDPRPFLEQCVYDLCVVGGERLSLCRGLSAYAQACLELGISVGDWRSPANCPLSCPANSRYELCGPACPTSCNGAAAPSNCSGRPCVEGCVCLPGFVASGGACVPASSCGCTFQGLQLAPGQEVWADELCQRRCTCNGATHQVTCRDKQSCPAGERCSVQNGLLGCYPDRFGTCQGSGDPHYVSFDGRRFDFMGTCTYLLVGSCGQNAALPAFRVLVENEHRGSQTVSYTRAVRVEARGVKVAVRREYPGQVLVDDVLQYLPFQAADGQVQVFRQGRDAVVRTDFGLTVTYDWNARVTAKVPSSYAEALCGLCGNFNGDPADDLALRGGGQAANALAFGNSWQEETRPGCGATEPGDCPKLDSLVAQQLQSKNECGILADPKGPFRECHSKLDPQGAVRDCVYDRCLLPGQSGPLCDALATYAAACQAAGATVHPWRSEELCPLSCPPHSHYEACSYGCPLSCGDLPVPGGCGSECHEGCVCDEGFALSGESCLPLASCGCVHQGTYHPPGQTFYPGPGCDSLCHCQEGGLVSCESSSCGPHEACQPSGGSLGCVAVGSSTCQASGDPHYTTFDGRRFDFMGTCVYVLAQTCGTRPGLHRFAVLQENVAWGNGRVSVTRVITVQVANFTLRLEQRQWKVTVNGVDMKLPVVLANGQIRASQHGSDVVIETDFGLRVAYDLVYYVRVTVPGNYYQQMCGLCGNYNGDPKDDFQKPNGSQAGNANEFGNSWEEVVPDSPCLPPTPCPPGSEDCIPSHKCPPELEKKYQKEEFCGLLSSPTGPLSSCHKLVDPQGPLKDCIFDLCLGGGNLSILCSNIHAYVSACQAAGGHVEPWRTETFCPMECPPNSHYELCADTCSLGCSALSAPPQCQDGCAEGCQCDSGFLYNGQACVPIQQCGCYHNGVYYEPEQTVLIDNCRQQCTCHAGKGMVCQEHSCKPGQVCQPSGGILSCVTKDPCHGVTCRPQETCKEQGGQGVCLPNYEATCWLWGDPHYHSFDGRKFDFQGTCNYVLATTGCPGVSTQGLTPFTVTTKNQNRGNPAVSYVRVVTVAALGTNISIHKDEIGKVRVNGVLTALPVSVADGRISVTQGASKALLVADFGLQVSYDWNWRVDVTLPSSYHGAVCGLCGNMDRNPNNDQVFPNGTLAPSIPIWGGSWRAPGWDPLCWDECRGSCPTCPEDRLEQYEGPGFCGPLAPGTGGPFTTCHAHVPPESFFKGCVLDVCMGGGDRDILCKALASYVAACQAAGVVIEDWRAQVGCEITCPENSHYEVCGSPCPASCPSPAPLTTPAVCEGPCVEGCQCDAGFVLSADRCVPLNNGCGCWANGTYHEAGSEFWADGTCSQWCRCGPGGGSLVCTPASCGLGEVCGLLPSGQHGCQPVSTAECQAWGDPHYVTLDGHRFNFQGTCEYLLSAPCHGPPLGAENFTVTVANEHRGSQAVSYTRSVTLQIYNHSLTLSARWPRKLQVDGVFVTLPFQLDSLLHAHLSGADVVVTTTSGLSLAFDGDSFVRLRVPAAYAGSLCGLCGNYNQDPADDLKAVGGKPAGWQVGGAQGCGECVSKPCPSPCTPEQQESFGGPDACGVISATDGPLAPCHGLVPPAQYFQGCLLDACQVQGHPGGLCPAVATYVAACQAAGAQLREWRRPDFCPFQCPAHSHYELCGDSCPGSCPSLSAPEGCESACREGCVCDAGFVLSGDTCVPVGQCGCLHDDRYYPLGQTFYPGPGCDSLCRCREGGEVSCEPSSCGPHETCRPSGGSLGCVAVGSTTCQASGDPHYTTFDGRRFDFMGTCVYVLAQTCGTRPGLHRFAVLQENVAWGNGRVSVTRVITVQVANFTLRLEQRQWKVTVNGVDMKLPVVLANGQIRASQHGSDVVIETDFGLRVAYDLVYYVRVTVPGNYYQLMCGLCGNYNGDPKDDFQKPNGSQAGNANEFGNSWEEVVPDSPCLPPPTCPPGSEGCIPSEECPPELEKKYQKEEFCGLLSSPTGPLSSCHKLVDPQGPLKDCIFDLCLGGGNLSILCSNIHAYVSACQAAGGQVEPWRNETFCPMECPQNSHYELCADTCSLGCSALSAPLQCPDGCAEGCQCDSGFLYNGQACVPIQQCGCYHNGAYYEPEQTVLIDNCRQQCTCHVGKVVVCQEHSCKPGQVCQPSGGILSCVNKDPCHGVTCRPQETCKEQGGQGVCLPNYEATCWLWGDPHYHSFDGRKFDFQGTCNYVLATTGCPGVSTQGLTPFTVTTKNQNRGNPAVSYVRVVTVAALGTNISIHKDEIGKVRVNGVLTALPVSVADGRISVTQGASKALLVADFGLQVSYDWNWRVDVTLPSSYHGAVCGLCGNMDRNPNNDQVFPNGTLAPSIPIWGGSWRAPGWDPLCWDECRGSCPTCPEDRLEQYEGPGFCGPLAPGTGGPFTTCHAHVPPESFFKGCVLDVCMGGGDRDILCKALASYVAACQAAGVVIEDWRAQVGCEITCPENSHYEVCGPPCPASCPSPAPLTTPAVCEGPCVEGCQCDAGFVLSADRCVPLNNGCGCWANGTYHEAGSEFWADGTCSQWCRCGPGGGSLVCTPASCGLGEVCGLLPSGQHGCQPVSTAECQAWGDPHYVTLDGHRFDFQGTCEYLLSAPCHGPPLGAENFTVTVANEHRGSQAVSYTRSVTLQIYNHSLTLSARWPRKLQVDGVFVTLPFQLDSLLHAHLSGADVVVTTTSGLSLAFDGDSFVRLRVPAAYAGSLCGLCGNYNQDPADDLKAVGGKPAGWQVGGAQGCGECVSKPCPSPCTPEQQESFGGPDACGVISATDGPLAPCHGLVPPAQYFQGCLLDACQVQGHPGGLCPAVATYVAACQAAGAQLREWRRPDFCPFQCPAHSHYELCGDSCPGSCPSLSAPEGCESACREGCVCDAGFVLSGDTCVPVGQCGCLHDDRYYPLGQTFYPGPGCDSLCRCREGGEVSCEPSSCGPHETCRPSGGSLGCVAVGSTTCQASGDPHYTTFDGHRFDFMGTCVYVLAQTCGTRPGLHRFAVLQENVAWGNGRVSVTRVITVQVANFTLRLEQRQWKVTVNGVDMKLPVVLANGQIRASQHGSDVVIETDFGLRVAYDLVYYVRVTVPGNYYQLMCGLCGNYNGDPKDDFQKPNGSQAGNANEFGNSWEEVVPDSPCLPPPTCPPGSAGCIPSDKCPPELEKKYQKEEFCGLLSSPTGPLSSCHKLVDPQGPLKDCIFDLCLGGGNLSILCSNIHAYVSACQAAGGHVEPWRNETFCPMECPQNSHYELCADTCSLGCSALSAPLQCPDGCAEGCQCDSGFLYNGQACVPIQQCGCYHNGVYYEPEQTVLIDNCRQQCTCHVGKVVVCQEHSCKPGQVCQPSGGILSCVTKDPCHGVTCRPQETCKEQGGQGVCLPNYEATCWLWGDPHYHSFDGRKFDFQGTCNYVLATTGCPGVSTQGLTPFTVTTKNQNRGNPAVSYVRVVTVAALGTNISIHKDEIGKVRVNGVLTALPVSVADGRISVAQGASKALLVADFGLQVSYDWNWRVDVTLPSSYHGAVCGLCGNMDRNPNNDQVFPNGTLAPSIPIWGGSWRAPGWDPLCWDECRGSCPTCPEDRLEQYEGPGFCGPLSSGTGGPFTTCHAHVPPESFFKGCVLDVCMGGGDRDILCKALASYVAACQAAGVVIEDWRAQVGCEITCPENSHYEVCGPPCPASCPSPAPLTTPAVCEGPCVEGCQCDAGFVLSADRCVPLNNGCGCWANGTYHEAGSEFWADGTCSQWCRCGPGGGSLVCTPASCGLGEVCGLLPSGQHGCQPVSTAECQAWGDPHYVTLDGHRFDFQGTCEYLLSAPCHGPPLGAENFTVTVANEHRGSQAVSYTRSVTLQIYNHSLTLSARWPRKLQVDGVFVALPFQLDSLLHAHLSGADVVVTTTSGLSLAFDGDSFVRLRVPAAYAASLCGLCGNYNQDPADDLKAVGGKPAGWQVGGAQGCGECVSKPCPSPCTPEQQESFGGPDACGVISATDGPLAPCHGLVPPAQYFQGCLLDACQVQGHPGGLCPAVATYVAACQAAGAQLGEWRRPDFCPLQCPAHSHYELCGDSCPVSCPSLSAPEGCESACREGCVCDAGFVLSGDTCVPVGQCGCLHDGRYYPLGEVFYPGPECERRCECGPGGHVTCQEGAACGPHEECRLEDGVQACHATGCGRCLANGGIHYITLDGRVYDLHGSCSYVLAQVCHPKPGDEDFSIVLEKNAAGDLQRLLVTVAGQVVSLAQGQQVTVDGEAVALPVAVGRVRVTAEGRNMVLQTTKGLRLLFDGDAHLLMSIPSPFRGRLCGLCGNFNGNWSDDFVLPNGSAASSVETFGAAWRAPGSSKGCGEGCGPQGCPVCLAEETAPYESNEACGQLRNPQGPFATCQAVLSPSEYFRQCVYDLCAQKGDKAFLCRSLAAYTAACQAAGVAVKPWRTDSFCPLHCPAHSHYSICTRTCQGSCAALSGLTGCTTRCFEGCECDDRFLLSQGVCIPVQDCGCTHNGRYLPVNSSLLTSDCSERCSCSSSSGLTCQAAGCPPGRVCEVKAEARNCWATRGLCVLSVGANLTTFDGARGATTSPGVYELSSRCPGLQNTIPWYRVVAEVQICHGKTEAVGQVHIFFQDGMVTLTPNKGVWVNGLRVDLPAEKLASVSVSRTPDGSLLVRQKAGVQVWLGANGKVAVIVSNDHAGKLCGACGNFDGDQTNDWHDSQEKPAMEKWRAQDFSPCYG

SEQ ID NO: 18157 - protein, 280 aa, Homo sapiens
MWFLTTLLLWVPVDGQVDTTKAVITLQPPWVSVFQEETVTLHCEVLHLPGSSSTQWFLNGTATQTSTPSYRITSASVNDSGEYRCQRGLSGRSDPIQLEIHRGWLLLQVSSRVFMEGEPLALRCHAWKDKLVYNVLYYRNGKAFKFFHWNSNLTILKTNISHNGTYHCSGMGKHRYTSAGISQYTVKGLQLPTPVWFHVLFYLAVGIMFLVNTVLWVTIRKELKRKKKWNLEISLDSGHEKKVISSLQEDRHLEEELKCQEQKEEQLQEGVHRKEPQGAT

SEQ ID NO: 18158 - protein, 224 aa, Homo sapiens
MWFLTTLLLWVPVDGQVDTTKAVITLQPPWVSVFQEETVTLHCEVLHLPGSSSTQWFLNGTATQTSTPSYRITSASVNDSGEYRCQRGLSGRSDPIQLEIHRGWLLLQVSSRVFMEGEPLALRCHAWKDKLVYNVLYYRNGKAFKFFHWNSNLTILKTNISHNGTYHCSGMGKHRYTSAGISQYTVKELFPAPVLNASVTSPLLEGNLVTLSCETKLLLQRPGL

SEQ ID NO: 18159 - protein, 188 aa, Homo sapiens
MWFLTTLLLWGWLLLQVSSRVFMEGEPLALRCHAWKDKLVYNVLYYRNGKAFKFFHWNSNLTILKTNISHNGTYHCSGMGKHRYTSAGISQYTVKGLQLPTPVWFHVLFYLAVGIMFLVNTVLWVTIRKELKRKKKWNLEISLDSGHEKKVISSLQEDRHLEEELKCQEQKEEQLQEGVHRKEPQGAT

SEQ ID NO: 18160 - protein, 224 aa, Homo sapiens
MAAAVPQRAWTVEQLRSEQLPKKDIIKFLQEHGSDSFLAEHKLLGNIKNVAKTANKDHLVTAYNHLFETKRFKGTESISKVSEQVKNVKLNEDKPKETKSEETLDEGPPKYTKSVLKKGDKTNFPKKGDVVHCWYTGTLQDGTVFDTNIQTSAKKKKNAKPLSFKVGVGKVIRGWDEALLTMSKGEKARLEIEPEWAYGKKGQPDAKIPPNAKLTFEVELVDID

SEQ ID NO: 18161 - protein, 427 aa, Homo sapiens
MFFTCGPNEAMVVSGFCRSPPVMVAGGRVFVLPCIQQIQRISLNTLTLNVKSEKVYTRHGVPISVTGIAQVKIQGQNKEMLAAACQMFLGKTEAEIAHIALETLEGHQRAIMAHMTVEEIYKDRQKFSEQVFKVASSDLVNMGISVVSYTLKDIHDDQDYLHSLGKARTAQVQKDARIGEAEAKRDAGIREAKAKQEKVSAQYLSEIEMAKAQRDYELKKAAYDIEVNTRRAQADLAYQLQVAKTKQQIEEQRVQVQVVERAQQVAVQEQEIARREKELEARVRKPAEAERYKLERLAEAEKSQLIMQAEAEAASVRMRGEAEAFAIGARARAEAEQMAKKAEAFQLYQEAAQLDMLLEKLPQVAEEISGPLTSANKITLVSSGSGTMGAAKVTGEVLDILTRLPESVERLTGVSISQVNHKPLRTA

SEQ ID NO: 18162 - protein, 379 aa, Homo sapiens
MFFTCGPNEAMVVSGFCRSPPVMVAGGRVFVLPCIQQIQRISLNTLTLNVKSEKVYTRHGVPISVTGIAQEIYKDRQKFSEQVFKVASSDLVNMGISVVSYTLKDIHDDQDYLHSLGKARTAQVQKDARIGEAEAKRDAGIREAKAKQEKVSAQYLSEIEMAKAQRDYELKKAAYDIEVNTRRAQADLAYQLQVAKTKQQIEEQRVQVQVVERAQQVAVQEQEIARREKELEARVRKPAEAERYKLERLAEAEKSQLIMQAEAEAASVRMRGEAEAFAIGARARAEAEQMAKKAEAFQLYQEAAQLDMLLEKLPQVAEEISGPLTSANKITLVSSGSGTMGAAKVTGEVLDILTRLPESVERLTGVSISQVNHKPLRTA

SEQ ID NO: 18163 - protein, 889 aa, Homo sapiens
MSYFGEHFWGEKNHGFEVLYHSVKQGPISTKELADFIRERATIEETYSKAMAKLSKLASNGTPMGTFAPLWEVFRVSSDKLALCHLELTRKLQDLIKDVLRYGEEQLKTHKKCKEEVVSTLDAVQVLSGVSQLLPKSRENYLNRCMDQERLRRESTSQKEMDKAETKTKKAAESLRRSVEKYNSARADFEQKMLDSALRFQAMEETHLRHMKALLGSYAHSVEDTHVQIGQVHEEFKQNIENVSVEMLLRKFAESKGTGREKPGPLDFEAYSAAALQEAMKRLRGAKAFRLPGLSRREREPEPPAAVDFLEPDSGTCPEVDEEGFTVRPDVTQNSTAEPSRFSSSDSDFDDEEPRKFYVHIKPAPARAPACSPEAAAAQLRATAGSLILPPGPGGTMKRHSSRDAAGKPQRPRSAPRTSSCAERLQSEEQVSKNLFGPPLESAFDHEDFTGSSSLGFTSSPSPFSSSSPENVEDSGLDSPSHAAPGPSPDSWVPRPGTPQSPPSCRAPPPEARGIRAPPLPDSPQPLASSPGPWGLEALAGGDLMPAPADPTAREGLAAPPRRLRSRKVSCPLTRSNGDLSRSLSPSPLGSSAASTALERPSFLSQTGHGVSRGPSPVVLGSQDALPIATAFTEYVHAYFRGHSPSCLARVTGELTMTFPAGIVRVFSGTPPPPVLSFRLVHTTAIEHFQPNADLLFSDPSQSDPETKDFWLNMAALTEALQRQAEQNPTASYYNVVLLRYQFSRPGPQSVPLQLSAHWQCGATLTQVSVEYGYRPGATAVPTPLTNVQILLPVGEPVTNVRLQPAATWNLEEKRLTWRLPDVSEAGGSGRLSASWEPLSGPSTPSPVAAQFTSEGTTLSGVDLELVGSGYRMSLVKRRFATGMYLVSC

SEQ ID NO: 18164 - protein, 888 aa, Homo sapiens
MSYFGEHFWGEKNHGFEVLYHSVKQGPISTKELADFIRERATIEETYSKAMAKLSKLASNGTPMGTFAPLWEVFRVSSDKLALCHLELTRKLQDLIKDVLRYGEEQLKTHKKCKEEVVSTLDAVQVLSGVSQLLPKSRENYLNRCMDQERLRRESTSQKEMDKAETKTKKAAESLRRSVEKYNSARADFEQKMLDSALRFQAMEETHLRHMKALLGSYAHSVEDTHVQIGQVHEEFKQNIENVSVEMLLRKFAESKGTGREKPGPLDFEAYSAAALQEAMKRLRGAKAFRLPGLSRREREPEPPAAVDFLEPDSGTCPEVDEEGFTVRPDVTQNSTAEPSRFSSSDSDFDDEEPRKFYVHIKPAPARAPACSPEAAAAQLRATAGSLILPPGPGGTMKRHSSRDAAGKPQRPRSAPRTSSCAERLQSEEQVSKNLFGPPLESAFDHEDFTGSSSLGFTSSPSPFSSSSPENVEDSGLDSPSHAAPGPSPDSWVPRPGTPQSPPSCRAPPPEARGIRAPPLPDSPQPLASSPGPWGLEALAGGDLMPAPADPTAREGLAAPPRRLRSRKVSCPLTRSNGDLSRSLSPSPLGSSAASTALERPSFLSQTGHGVSRGPSPVVLGSQDALPIATAFTEYVHAYFRGHSPSCLARVTGELTMTFPAGIVRVFSGTPPPPVLSFRLVHTTAIEHFQPNADLLFSDPSQSDPETKDFWLNMAALTEALQRQAEQNPTASYYNVVLLRYQFSRPGPQSVPLQLSAHWQCGATLTQVSVEYGYRPGATAVPTPLTNVQILLPVGEPVTNVRLQPAATWNLEEKRLTWRLPDVSEAGGSGRLSASWEPLSGPSTPSPVAAQFTSEGTTLSGVDLELVGSGYRMSLVKRRFATAAPPQG

SEQ ID NO: 18165 - protein, 839 aa, Homo sapiens
MAKLSKLASNGTPMGTFAPLWEVFRVSSDKLALCHLELTRKLQDLIKDVLRYGEEQLKTHKKCKEEVVSTLDAVQVLSGVSQLLPKSRENYLNRCMDQERLRRESTSQKEMDKAETKTKKAAESLRRSVEKYNSARADFEQKMLDSALRFQAMEETHLRHMKALLGSYAHSVEDTHVQIGQVHEEFKQNIENVSVEMLLRKFAESKGTGREKPGPLDFEAYSAAALQEAMKRLRGAKAFRLPGLSRREREPEPPAAVDFLEPDSGTCPEVDEEGFTVRPDVTQNSTAEPSRFSSSDSDFDDEEPRKFYVHIKPAPARAPACSPEAAAAQLRATAGSLILPPGPGGTMKRHSSRDAAGKPQRPRSAPRTSSCAERLQSEEQVSKNLFGPPLESAFDHEDFTGSSSLGFTSSPSPFSSSSPENVEDSGLDSPSHAAPGPSPDSWVPRPGTPQSPPSCRAPPPEARGIRAPPLPDSPQPLASSPGPWGLEALAGGDLMPAPADPTAREGLAAPPRRLRSRKVSCPLTRSNGDLSRSLSPSPLGSSAASTALERPSFLSQTGHGVSRGPSPVVLGSQDALPIATAFTEYVHAYFRGHSPSCLARVTGELTMTFPAGIVRVFSGTPPPPVLSFRLVHTTAIEHFQPNADLLFSDPSQSDPETKDFWLNMAALTEALQRQAEQNPTASYYNVVLLRYQFSRPGPQSVPLQLSAHWQCGATLTQVSVEYGYRPGATAVPTPLTNVQILLPVGEPVTNVRLQPAATWNLEEKRLTWRLPDVSEAGGSGRLSASWEPLSGPSTPSPVAAQFTSEGTTLSGVDLELVGSGYRMSLVKRRFATGMYLVSC

SEQ ID NO: 18166 - protein, 535 aa, Homo sapiens [sequence omitted]

SEQ ID NO: 18167 - protein, 321 aa, Homo sapiens
MGEPQGSMRILVTGGSGLVGKAIQKVVADGAGLPGEDWVFVSSKDADLTDTAQTRALFEKVQPTHVIHLAAMVGGLFRNIKYNLDFWRKNVHMNDNVLHSAFEVGARKVVSCLSTCIFPDKTTYPIDETMIHNGPPHNSNFGYSYAKRMIDVQNRAYFQQYGCTFTAVIPTNVFGPHDNFNIEDGHVLPGLIHKVHLAKSSGSALTVWGTGNPRRQFIYSLDLAQLFIWVLREYNEVEPIILSVGEEDEVSIKEAAEAVVEAMDFHGEVTFDTTKSDGQFKKTASNSKLRTYLPDFRFTPFKQAVKETCAWFTDNYEQARK

SEQ ID NO: 18168 - protein, 533 aa, Homo sapiens
MTKKRIAVIGGGVSGLSSIKCCVEEGLEPVCFERTDDIGGLWRFQENPEEGRASIYKSVIINTSKEMMCFSDYPIPDHYPNFMHNAQVLEYFRMYAKEFDLLKYIRFKTTVCSVKKQPDFATSGQWEVVTESEGKKEMNVFDGVMVCTGHHTNAHLPLESFPGIEKFKGQYFHSRDYKNPEGFTGKRVIIIGIGNSGGDLAVEISQTAKQVFLSTRRGAWILNRVGDYGYPADVLFSSRLTHFIWKICGQSLANKYLEKKINQRFDHEMFGLKPKHRALSQHPTLNDDLPNRIISGLVKVKGNVKEFTETAAIFEDGSREDDIDAVIFATGYSFDFPFLEDSVKVVKNKISLYKKVFPPNLERPTLAIIGLIQPLGAIMPISELQGRWATQVFKGLKTLPSQSEMMAEISKAQEEIDKRYVESQRHTIQGDYIDTMEELADLVGVRPNLLSLAFTDPKLALHLLLGPCTPIHYRVQGPGKWDGARKAILTTDDRIRKPLMTRVVERSSSMTSTMTIGKFMLALAFFAIIIAYF

SEQ ID NO: 18169 - protein, 285 aa, Homo sapiens
MTKKRIAVIGGGVSGLSSIKCCVEEGLEPVCFERTDDIGGLWRFQENPEEGRASIYKSVIINTSKEMMCFSDYPIPDHYPNFMHNAQVLEYFRMYAKEFDLLKYIRFKTTVCSVKKQPDFATSGQWEVVTESEGKKEMNVFDGVMVCTGHHTNAHLPLESFPGIEKFKGQYFHSRDYKNPEGFTGKRVIIIGIGNSGGDLAVEISQTAKQVFLSTRRGAWILNRVGDYGYPADVLFSSRLTHFIWKICGQSLANKYLEKKINQRFDHEMFGLKPKHRSKDIALTE

SEQ ID NO: 18170 - protein, 464 aa, Homo sapiens
MTKKRIAVIGGGVSGLSSIKCCVEEGLEPVCFERTDDIGGLWRFQENPEEGRASIYKSVIINTSKEMMCFSDYPIPDHYPNFMHNAQVLEYFRMYAKEFDLLKYIRFKTTVCSVKKQPDFATSGQWEVVTESEGKKEMNVFDGVMVCTGHHTNAHLPLESFPGIEKFKGQYFHSRDYKNPEGFTGKRVIIIGIGNSGGDLAVEISQTAKQVFLSTRRGAWILNRVGDYGYPADVLFSSRLTHFIWKICGQSLANKYLEKKINQRFDHEMFGLKPKHRALSQHPTLNDDLPNRIISGLVKVKGNVKEFTETAAIFEDGSREDDIDAVIFATGYSFDFPFLEDSVKVVKNKISLYKKVFPPNLERPTLAIIGLIQPLGAIMPISELQGRWATQVFKGLKTLPSQSEMMAEISKAQEEIDKSLTMRKTSDKPKLKNILQIPDYLKTVKIINKESLRNCPGIKGPKET

SEQ ID NO: 18171 - protein, 326 aa, Homo sapiens
MELSGATMARGLAVLLVLFLHIKNLPAQAADTCPEVKVVGLEGSDKLTILRGCPGLPGAPGPKGEAGVIGERGERGLPGAPGKAGPVGPKGDRGEKGMRGEKGDAGQSQSCATGPRNCKDLLDRGYFLSGWHTIYLPDCRPLTVLCDMDTDGGGWTVFQRRMDGSVDFYRDWAAYKQGFGSQLGEFWLGNDNIHALTAQGSSELRVDLVDFEGNHQFAKYKSFKVADEAEKYKLVLGAFVGGSAGNSLTGHNNNFFSTKDQDNDVSSSNCAEKFQGAWWYADCHASNLNGLYLMGPHESYANGINWSAAKGYKYSYKVSEMKVRPA

SEQ ID NO: 18172 - protein, 207 aa, Homo sapiens
MYSAPSACTCLCLHFLLLCFQVQVLVAEENVDFRIHVENQTRARDDVSRKQLRLYQLYSRTSGKHIQVLGRRISARGEDGDKYAQLLVETDTFGSQVRIKGKETEFYLCMNRKGKLVGKPDGTSKECVFIEKVLENNYTALMSAKYSGWYVGFTKKGRPRKGPKTRENQQDVHFMKRYPKGQPELQKPFKYTTVTKRSRRIRPTHPA

SEQ ID NO: 18173 - protein, 155 aa, Homo sapiens
MAEGEITTFTALTEKFNLPPGNYKKPKLLYCSNGGHFLRILPDGTVDGTRDRSDQHIQLQLSAESVGEVYIKSTETGQYLAMDTDGLLYGSQTPNEECLFLERLEENHYNTYISKKHAEKNWFVGLKKNGSCKRGPRTHYGQKAILFLPLPVSSD

SEQ ID NO: 18174 - protein, 60 aa, Homo sapiens
MAEGEITTFTALTEKFNLPPGNYKKPKLLYCSNGGHFLRILPDGTVDGTRDRSDQHTDTK

SEQ ID NO: 18175 - protein, 734 aa, Homo sapiens
MLLWLLLLILTPGREQSGVAPKAVLLLNPPWSTAFKGEKVALICSSISHSLAQGDTYWYHDEKLLKIKHDKIQITEPGNYQCKTRGSSLSDAVHVEFSPDWLILQALHPVFEGDNVILRCQGKDNKNTHQKVYYKDGKQLPNSYNLEKITVNSVSRDNSKYHCTAYRKFYILDIEVTSKPLNIQVQELFLHPVLRASSSTPIEGSPMTLTCETQLSPQRPDVQLQFSLFRDSQTLGLGWSRSPRLQIPAMWTEDSGSYWCEVETVTHSIKKRSLRSQIRVQRVPVSNVNLEIRPTGGQLIEGENMVLICSVAQGSGTVTFSWHKEGRVRSLGRKTQRSLLAELHVLTVKESDAGRYYCAADNVHSPILSTWIRVTVRIPVSHPVLTFRAPRAHTVVGDLLELHCESLRGSPPILYRFYHEDVTLGNSSAPSGGGASFNLSLTAEHSGNYSCDADNGLGAQHSHGVSLRVTVPVSRPVLTLRAPGAQAVVGDLLELHCESLRGSFPILYWFYHEDDTLGNISAHSGGGASFNLSLTTEHSGNYSCEADNGLGAQHSKVVTLNVTGTSRNRTGLTAAGITGLVLSILVLAAAAALLHYARARRKPGGLSATGTSSHSPSECQEPSSSRPSRIDPQEPTHSKPLAPMELEPMYSNVNPGDSNPIYSQIWSIQHTKENSANCPMMHQEHEELTVLYSELKKTHPDDSAGEASSRGRAHEEDDEENYENVPRVLLASDH

SEQ ID NO: 18176 - protein, 639 aa, Homo sapiens
MLLWLLLLILTPGREQSGVAPKAVLLLNPPWSTAFKGEKVALICSSISHSLAQGDTYWYHDEKLLKIKHDKIQITEPGNYQCKTRGSSLSDAVHVEFSPDWLILQALHPVFEGDNVILRCQGKDNKNTHQKVYYKDGKQLPNSYNLEKITVNSVSRDNSKYHCTAYRKFYILDIEVTSKPLNIQVQGVPVSNVNLEIRPTGGQLIEGENMVLICSVAQGSGTVTFSWHKEGRVRSLGRKTQRSLLAELHVLTVKESDAGRYYCAADNVHSPILSTWIRVTVRIPVSHPVLTFRAPRAHTVVGDLLELHCESLRGSPPILYRFYHEDVTLGNSSAPSGGGASFNLSLTAEHSGNYSCDADNGLGAQHSHGVSLRVTVPVSRPVLTLRAPGAQAVVGDLLELHCESLRGSFPILYWFYHEDDTLGNISAHSGGGASFNLSLTTEHSGNYSCEADNGLGAQHSKVVTLNVTGTSRNRTGLTAAGITGLVLSILVLAAAAALLHYARARRKPGGLSATGTSSHSPSECQEPSSSRPSRIDPQEPTHSKPLAPMELEPMYSNVNPGDSNPIYSQIWSIQHTKENSANCPMMHQEHEELTVLYSELKKTHPDDSAGEASSRGRAHEEDDEENYENVPRVLLASDH

SEQ ID NO: 18177 - protein, 740 aa, Homo sapiens
MLLWLLLLILTPGREQSGVAPKAVLLLNPPWSTAFKGEKVALICSSISHSLAQGDTYWYHDEKLLKIKHDKIQITEPGNYQCKTRGSSLSDAVHVEFSPDWLILQALHPVFEGDNVILRCQGKDNKNTHQKVYYKDGKQLPNSYNLEKITVNSVSRDNSKYHCTAYRKFYILDIEVTSKPLNIQVQELFLHPVLRASSSTPIEGSPMTLTCETQLSPQRPDVQLQFSLFRDSQTLGLGWSRSPRLQIPAMWTEDSGSYWCEVETVTHSIKKRSLRSQIRVQRVPVSNVNLEIRPTGGQLIEGENMVLICSVAQGSGTVTFSWHKEGRVRSLGRKTQRSLLAELHVLTVKESDAGRYYCAADNVHSPILSTWIRVTVRTLLSPSVPVSHPVLTFRAPRAHTVVGDLLELHCESLRGSPPILYRFYHEDVTLGNSSAPSGGGASFNLSLTAEHSGNYSCDADNGLGAQHSHGVSLRVTVPVSRPVLTLRAPGAQAVVGDLLELHCESLRGSFPILYWFYHEDDTLGNISAHSGGGASFNLSLTTEHSGNYSCEADNGLGAQHSKVVTLNVTGTSRNRTGLTAAGITGLVLSILVLAAAAALLHYARARRKPGGLSATGTSSHSPSECQEPSSSRPSRIDPQEPTHSKPLAPMELEPMYSNVNPGDSNPIYSQIWSIQHTKENSANCPMMHQEHEELTVLYSELKKTHPDDSAGEASSRGRAHEEDDEENYENVPRVLLASDH

SEQ ID NO: 18178 - protein, 189 aa, Homo sapiens
MLLWLLLLILTPGREQSGVAPKAVLLLNPPWSTAFKGEKVALICSSISHSLAQGDTYWYHDEKLLKIKHDKIQITEPGNYQCKTRGSSLSDAVHVEFSPDWLILQALHPVFEGDNVILRCQGKDNKNTHQKVYYKDGKQLPNSYNLEKITVNSVSRDNSKYHCTAYRKFYILDIEVTSKPLNIQVQGNG

SEQ ID NO: 18179 - protein, 199 aa, Homo sapiens
MLLWLLLLILTPGREQSGVAPKAVLLLNPPWSTAFKGEKVALICSSISHSLAQGDTYWYHDEKLLKIKHDKIQITEPGNYQCKTRGSSLSDAVHVEFSPDWLILQALHPVFEGDNVILRCQGKDNKNTHQKVYYKDGKQLPNSYNLEKITVNSVSRDNSKYHCTAYRKFYILDIEVTSKPLNIQVQEARCPAAILPLQR

SEQ ID NO: 18180 - protein, 742 aa, Homo sapiens
MLLWLLLLILTPGREQSGVAPKAVLLLNPPWSTAFKGEKVALICSSISHSLAQGDTYWYHDEKLLKIKHDKIQITEPGNYQCKTRGSSLSDAVHVEFSPDWLILQALHPVFEGDNVILRCQGKDNKNTHQKVYYKDGKQLPNSYNLEKITVNSVSRDNSKYHCTAYRKFYILDIEVTSKPLNIQVQELFLHPVLRASSSTPIEGSPMTLTCETQLSPQRPDVQLQFSLFRDSQTLGLGWSRSPRLQIPAMWTEDSGSYWCEVETVTHSIKKRSLRSQIRVQRVPVSNVNLEIRPTGGQLIEGENMVLICSVAQGSGTVTFSWHKEGRVRSLGRKTQRSLLAELHVLTVKESDAGRYYCAADNVHSPILSTWIRVTVRIPVSHPVLTFRAPRAHTVVGDLLELHCESLRGSPPILYRFYHEDVTLGNSSAPSGGGASFNLSLTAEHSGNYSCDADNGLGAQHSHGVSLRVTVPVSRPVLTLRAPGAQAVVGDLLELHCESLRGSFPILYWFYHEDDTLGNISAHSGGGASFNLSLTTEHSGNYSCEADNGLGAQHSKVVTLNVTGTSRNRTGLTAAGITGLVLSILVLAAAAALLHYARARRKPGGLSATGTSSHSPSECQEPSSSRPSRIDPQEPTHSKPLAPMELEPMYSNVNPGDSNPIYSQIWSIQHTKENSANCPMMHQEHEELTVLYSELKKTHPDDSAGEASSRGRAHEEDDEENYENILNPRKNKVQDFPCLCNT

SEQ ID NO: 18181 - protein, 707 aa, Homo sapiens
MLLWLLLLILTPGREQSGVAPKAVLLLNPPWSTAFKGEKVALICSSISHSLAQGDTYWYHDEKLLKIKHDKIQITEPGNYQCKTRGSSLSDAVHVEFSPDWLILQALHPVFEGDNVILRCQGKDNKNTHQKVYYKDGKQLPNSYNLEKITVNSVSRDNSKYHCTAYRKFYILDIEVTSKPLNIQVQELFLHPVLRASSSTPIEGSPMTLTCETQLSPQRPDVQLQFSLFRDSQTLGLGWSRSPRLQIPAMWTEDSGSYWCEVETVTHSIKKRSLRSQIRVQRVPVSNVNLEIRPTGGQLIEGENMVLICSVAQGSGTVTFSWHKEGRVRSLGRKTQRSLLAELHVLTVKESDAGRYYCAADNVHSPILSTWIRVTVRIPVSHPVLTFRAPRAHTVVGDLLELHCESLRGSPPILYRFYHEDVTLGNSSAPSGGGASFNLSLTAEHSGNYSCDADNGLGAQHSHGVSLRVTVPVSRPVLTLRAPGAQAVVGDLLELHCESLRGSFPILYWFYHEDDTLGNISAHSGGGASFNLSLTTEHSGNYSCEADNGLGAQHSKVVTLNVTGTSRNRTGLTAAGITGLVLSILVLAAAAALLHYARARRKPGGLSATGTSSHSPSECQEPSSSRPSRIDPQEPTHSKPLAPMELEPMYSNVNPGDSNPIYSQIWSIQHTKENSANCPMMHQEHEELTVLYSELKKEQSSRFSMSL

SEQ ID NO: 18182 - protein, 239 aa, Homo sapiens
MGLIWLLLLSLLEPGWPAAGPGARLRRDAGGRGGVYEHLGGAPRRRKLYCATKYHLQLHPSGRVNGSLENSAYSILEITAVEVGIVAIRGLFSGRYLAMNKRGRLYASEHYSAECEFVERIHELGYNTYASRLYRTVSSTPGARRQPSAERLWYVSVNGKGRPRRGFKTRRTQKSSLFLPRVLDHRDHEMVRQLQSGLPRPPGKGVQPRRRRQKQSPDNLEPSHVQASRLGSQLEASAH

SEQ ID NO: 18183 - protein, 1084 aa, Homo sapiens
MEQPKGVDWTVIILTCQYKDSVQVFQRELEVRQKREQIPAGTLLLAVEDPEKRVGSGGATLNALLVAAEHLSARAGFTVVTSDVLHSAWILILHMGRDFPFDDCGRAFTCLPVENPEAPVEALVCNLDCLLDIMTYRLGPGSPPGVWVCSTDMLLSVPANPGISWDSFRGARVIALPGSPAYAQNHGVYLTDPQGLVLDIYYQGTEAEIQRCVRPDGRVPLVSGVVFFSVETAERLLATHVSPPLDACTYLGLDSGARPVQLSLFFDILHCMAENVTREDFLVGRPPELGQGDADVAGYLQSARAQLWRELRDQPLTMAYVSSGSYSYMTSSASEFLLSLTLPGAPGAQIVHSQVEEQQLLAAGSSVVSCLLEGPVQLGPGSVLQHCHLQGPIHIGAGCLVTGLDTAHSKALHGRELRDLVLQGHHTRLHGSPGHAFTLVGRLDSWERQGAGTYLNVPWSEFFKRTGVRAWDLWDPETLPAEYCLPSARLFPVLHPSRELGPQDLLWMLDHQEDGGEALRAWRASWRLSWEQLQPCLDRAATLASRRDLFFRQALHKARHVLEARQDLSLRPLIWAAVREGCPGPLLATLDQVAAGAGDPGVAARALACVADVLGCMAEGRGGLRSGPAANPEWMRPFSYLECGDLAAGVEALAQERDKWLSRPALLVRAARHYEGAGQILIRQAVMSAQHFVSTEQVELPGPGQWVVAECPARVDFSGGWSDTPPLAYELGGAVLGLAVRVDGRRPIGARARRIPEPELWLAVGPRQDEMTVKIVCRCLADLRDYCQPHAPGALLKAAFICAGIVHVHSELQLSEQLLRTFGGGFELHTWSELPHGSGLGTSSILAGTALAALQRAAGRVVGTEALIHAVLHLEQVLTTGGGWQDQVGGLMPGIKVGRSRAQLPLKVEVEEVTVPEGFVQKLNDHLLLVYTGKTRLARNLLQDVLRSWYARLPAVVQNAHSLVRQTEECAEGFRQGSLPLLGQCLTSYWEQKKLMAPGCEPLTVRRMMDVLAPHVHGQSLAGAGGGGFLYLLTKEPQQKEALEAVLAKTEGLGNYSIHLVEVDTQGLSLKLLGTEASTCCPFP

SEQ ID NO: 18184 - protein, 1090 aa, Homo sapiens
MEQPKGVDWTVIILTCQYKDSVQVFQRELEVRQKREQIPAGTLLLAVEDPEKRVGSGGATLNALLVAAEHLSARAGFTWICVGVSLWIRGCHPPGRLPEASVHRAFPLLQVVTSDVLHSAWILILHMGRDFPFDDCGRAFTCLPVENPEAPVEALVCNLDCLLDIMTYRLGPGSPPGVWVCSTDMLLSVPANPGISWDSFRGARVIALPGSPAYAQNHGVYLTDPQGLVLDIYYQGTEAEIQRCVRPDGRVPLVSGVVFFSVETAERLLATHVSPPLDACTYLGLDSGARPVQLSLFFDILHCMAENVTREDFLVGRPPELGQGDADVAGYLQSARAQLWRELRDQPLTMAYVSSGSYSYMTSSASEFLLSLTLPGAPGAQIVHSQVEEQQLLAAGSSVVSCLLEGPVQLGPGSVLQHCHLQGPIHIGAGCLVTGLDTAHSKALHGRELRDLVLQGHHTRLHGSPGHAFTLVGRLDSWERQGAGTYLNVPWSEFFKRTGVRAWDLWDPETLPAEYCLPSARLFPVLHPSRELGPQDLLWMLDHQEDGGEALRAWRASWRLSWEQLQPCLDRAATLASRRDLFFRQALHKARHVLEARQDLSLRPLIWAAVREGCPGPLLATLDQVAAGAGDPGVAARALACVADVLGCMAEGRGGLRSGPAANPEWMRPFSYLECGDLAAGVEALAQERDKWLSRPALLVRAARHYEGAGQILIRQAVMSAQHFVSTEQVELPGPGQWVVAECPARVDFSGGWSDTPPLAYELGGAVLGLAVRVDGRRPIGARARRIPEPELWLAVGPRQDEMTVKIVCRCLADLRDYCQPHAPGALLKAAFICAGIVHVHSELQLSTSSILAGTALAALQRAAGRVVGTEALIHAVLHLEQVLTTGGGWQDQVGGLMPGIKVGRSRAQLPLKVEVEEVTVPEGFVQKLNDHLLLVYTGKTRLARNLLQDVLRSWYARLPAVVQNAHSLVRQTEECAEGFRQGSLPLLGQCLTSYWEQKKLMAPGCEPLTVRRMMDVLAPHVHGQSLAGAGGGGFLYLLTKEPQQKEALEAVLAKTEGLGNYSIHLVEVDTQGLSLKLLGTEASTCCPFP

SEQ ID NO: 18185 - protein, 211 aa, Homo sapiens
MRLFLWNAVLTLFVTSLIGALIPEPEVKIEVLQKPFICHRKTKGGDLMLVHYEGYLEKDGSLFHSTHKHNNGQPIWFTLGILEALKGWDQGLKGMCVGEKRKLIIPPALGYGKEGKGKIPPESTLIFNIDLLEIRNGPRSHESFQEMDLNDDWKLSKDEVKAYLKKEFEKHGAVVNESHHDALVEDIFDKEDEDKDGFISAREFTYKHDEL

SEQ ID NO: 18186 - protein, 582 aa, Homo sapiens
MFPAGPPSHSLLRLPLLQLLLLVVQAVGRGLGRASPAGGPLEDVVIERYHIPRACPREVQMGDFVRYHYNGTFEDGKKFDSSYDRNTLVAIVVGVGRLITGMDRGLMGMCVNERRRLIVPPHLGYGSIGLAGLIPPDATLYFDVVLLDVWNKEDTVQVSTLLRPPHCPRMVQDGDFVRYHYNGTLLDGTSFDTSYSKGGTYDTYVGSGWLIKGMDQGLLGMCPGERRKIIIPPFLAYGEKGYGTVIPPQASLVFHVLLIDVHNPKDAVQLETLELPPGCVRRAGAGDFMRYHYNGSLMDGTLFDSSYSRNHTYNTYIGQGYIIPGMDQGLQGACMGERRRITIPPHLAYGENGTGDKIPGSAVLIFNVHVIDFHNPADVVEIRTLSRPSETCNETTKLGDFVRYHYNCSLLDGTQLFTSHDYGAPQEATLGANKVIEGLDTGLQGMCVGERRQLIVPPHLAHGESGARGVPGSAVLLFEVELVSREDGLPTGYLFVWHKDPPANLFEDMDLNKDGEVPPEEFSTFIKAQVSEGKGRLMPGQDPEKTIGDMFQNQDRNQDGKITVDELKLKSDEDEERVHEEL

SEQ ID NO: 18187 - protein, 355 aa, Homo sapiens
MRYHYNGSLMDGTLFDSSYSRNHTYNTYIGQGYIIPGMDQGLQGACMGERRRITIPPHLAYGENGTDSIGFLQGSAPLRPFRSGEGQPSLGREGGYGKTEPAYPQDPAVLGASVSSPVKWASHADPQGDKIPGSAVLIFNVHVIDFHNPADVVEIRTLSRPSETCNETTKLGDFVRYHYNCSLLDGTQLFTSHDYGAPQEATLGANKVIEGLDTGLQGMCVGERRQLIVPPHLAHGESGARGVPGSAVLLFEVELVSREDGLPTGYLFVWHKDPPANLFEDMDLNKDGEVPPEEFSTFIKAQVSEGKGRLMPGQDPEKTIGDMFQNQDRNQDGKITVDELKLKSDEDEERVHEEL

SEQ ID NO: 18188 - protein, 208 aa, Homo sapiens
MALGQKLFITMSRGAGRLQGTLWALVFLGILVGMVVPSPAGTRANNTLLDSRGWGTLLSRSRAGLAGEIAGVNWESGYLVGIKRQRRLYCNVGIGFHLQVLPDGRISGTHEENPYSLLEISTVERGVVSLFGVRSALFVAMNSKGRLYATPSFQEECKFRETLLPNNYNAYESDLYQGTYIALSKYGRVKRGSKVSPIMTVTHFLPRI

SEQ ID NO: 18189 - protein, 993 aa, Homo sapiens
MPALARDGGQLPLLVVFSAMIFGTITNQDLPVIKCVLINHKNNDSSVGKSSSYPMVSESPEDLGCALRPQSSGTVYEAAAVEVDVSASITLQVLVDAPGNISCLWVFKHSSLNCQPHFDLQNRGVVSMVILKMTETQAGEYLLFIQSEATNYTILFTVSIRNTLLYTLRRPYFRKMENQDALVCISESVPEPIVEWVLCDSQGESCKEESPAVVKKEEKVLHELFGTDIRCCARNELGRECTRLFTIDLNQTPQTTLPQLFLKVGEPLWIRCKAVHVNHGFGLTWELENKALEEGNYFEMSTYSTNRTMIRILFAFVSSVARNDTGYYTCSSSKHPSQSALVTIVEKGFINATNSSEDYEIDQYEEFCFSVRFKAYPQIRCTWTFSRKSFPCEQKGLDNGYSISKFCNHKHQPGEYIFHAENDDAQFTKMFTLNIRRKPQVLAEASASQASCFSDGYPLPSWTWKKCSDKSPNCTEEITEGVWNRKANRKVFGQWVSSSTLNMSEAIKGFLVKCCAYNSLGTSCETILLNSPGPFPFIQDNISFYATIGVCLLFIVVLTLLICHKYKKQFRYESQLQMVQVTGSSDNEYFYVDFREYEYDLKWEFPRENLEFGKVLGSGAFGKVMNATAYGISKTGVSIQVAVKMLKEKADSSEREALMSELKMMTQLGSHENIVNLLGACTLSGPIYLIFEYCCYGDLLNYLRSKREKFHRTWTEIFKEHNFSFYPTFQSHPNSSMPGSREVQIHPDSDQISGLHGNSFHSEDEIEYENQKRLEEEEDLNVLTFEDLLCFAYQVAKGMEFLEFKSCVHRDLAARNVLVTHGKVVKICDFGLARDIMSDSNYVVRGNARLPVKWMAPESLFEGIYTIKSDVWSYGILLWEIFSLGVNPYPGIPVDANFYKLIQNGFKMDQPFYATEEIYIIMQSCWAFDSRKRPSFPNLTSFLGCQLADAEEAMYQNVDGRVSECPHTYQNRRPFSREMDLGLLSPQAQVEDS

SEQ ID NO: 18190 - protein, 952 aa, Homo sapiens
MPALARDGGQLPLLVVFSAMIFGTITNQDLPVIKCVLINHKNNDSSVGKSSSYPMVSESPEDLGCALRPQSSGTVYEAAAVEVDVSASITLQVLVDAPGNISCLWVFKHSSLNCQPHFDLQNRGVVSMVILKMTETQAGEYLLFIQSEATNYTILFTVSIRNTLLYTLRRPYFRKMENQDALVCISESVPEPIVEWVLCDSQGESCKEESPAVVKKEEKVLHELFGTDIRCCARNELGRECTRLFTIDLNQTPQTTLPQLFLKVGEPLWIRCKAVHVNHGFGLTWELENKALEEGNYFEMSTYSTNRTMIRILFAFVSSVARNDTGYYTCSSSKHPSQSALVTIVEKGFINATNSSEDYEIDQYEEFCFSVRFKAYPQIRCTWTFSRKSFPCEQKGLDNGYSISKFCNHKHQPGEYIFHAENDDAQFTKMFTLNIRRKPQVLAEASASQASCFSDGYPLPSWTWKKCSDKSPNCTEEITEGVWNRKANRKVFGQWVSSSTLNMSEAIKGFLVKCCAYNSLGTSCETILLNSPGPFPFIQDNISFYATIGVCLLFIVVLTLLICHKYKKQFRYESQLQMVQVTGSSDNEYFYVDFREYEYDLKWEFPRENLEFGKVLGSGAFGKVMNATAYGISKTGVSIQVAVKMLKEKADSSEREALMSELKMMTQLGSHENIVNLLGACTLSGPIYLIFEYCCYGDLLNYLRSKREKFHRTWTEIFKEHNFSFYPTFQSHPNSSMPGSREVQIHPDSDQISGLHGNSFHSEDEIEYENQKRLEEEEDLNVLTFEDLLCFAYQVAKGMEFLEFKSARLPVKWMAPESLFEGIYTIKSDVWSYGILLWEIFSLGVNPYPGIPVDANFYKLIQNGFKMDQPFYATEEIYIIMQSCWAFDSRKRPSFPNLTSFLGCQLADAEEAMYQNVDGRVSECPHTYQNRRPFSREMDLGLLSPQAQVEDS

SEQ ID NO: 18191 - protein, 403 aa, Homo sapiens
MEPVGCCGECRGSSVDPRSTFVLSNLAEVVERVLTFLPAKALLRVACVCRLWRECVRRVLRTHRSVTWISAGLAEAGHLEGHCLVRVVAEELENVRILPHTVLYMADSETFISLEECRGHKRARKRTSMETALALEKLFPKQCQVLGIVTPGIVVTPMGSGSNRPQEIEIGESGFALLFPQIEGIKIQPFHFIKDPKNLTLERHQLTEVGLLDNPELRVVLVFGYNCCKVGASNYLQQVVSTFSDMNIILAGGQVDNLSSLTSEKNPLDIDASGVVGLSFSGHRIQSATVLLNEDVSDEKTAEAAMQRLKAANIPEHNTIGFMFACVGRGFQYYRAKGNVEADAFRKFFPSVPLFGFFGNGEIGCDRIVTGNFILRKCNEVKDDDLFHSYTTIMALIHLGSSK

SEQ ID NO: 18192 - protein, 46 aa, Homo sapiens
MEPVGCCGECRGSSVDPRSTFVLSNLAEVVERVLTFLPAKALLRVA

SEQ ID NO: 18193 - protein, 276 aa, Homo sapiens
MEPVGCCGECRGSSVDPRSTFVLSNLAEVVERVLTFLPAKALLRVACVCRLWRECVRRVLRTHRSVTWISAGLAEAGHLEGHCLVRVVAEELENVRILPHTVLYMADSETFISLEECRGHKRARKRTSMETALALEKLFPKQCQVLGIVTPGIVVTPMGSGSNRPQEIEIGESGFALLFPQIEGIKIQPFHFIKDPKNLTLERHQLTEVGLLDNPELRVVLVFGYNCCKVGASNYLQQVVSTFSDMNIILAGGQVDNLSSLTSEKYVLCASDFVCE

SEQ ID NO: 18194 - protein, 1188 aa, Homo sapiens
MGPRKKSVKTCIMNNEIPEEMTADETKDYMNQLSHEVLCHIFRYLPLQDIMCMECLSRKLKEAVTLYLRVVRVVDLCAGRWWEYMPSGFTDASFLTLLKKMPDVEQLYGLHPRYLERRRVRGHEAFSIPGVLEALQACPNLVGVETSHLELVESIWTYMPHVHILGKFRNRNGAFPIPPENKLKIPIGAKIQTLHLVGVNVPEIPCIPMLRHLYMKWVRLTKPQPFKDFLCISLRTFVMRNCAGPTNSLKYVPLVTGLASARNLEHLEMVRVPFLGGLIQHVVEDSWRSGGFRNLHTIVLGACKNALEVDLGYLIITAARRLHEVRIQPSLTKDGVFSALKMAELEFPQFETLHLGYVDEFLLQSRMANADLVKYGLADVVENPGIITDIGMKAVNEVFSCIKYLAIYNCPHLHNPYNWISDHSRWTRLVDINLVRCHALKLDSFGQFIELLPSLEFISLDQMFREPPKGCARVGLSAGTGIGVSSALVSNQNSNNDDNNAQNNNANIHDNNHHHPDDSDEENDFRQDLQPGEQQFAADALNEMEDIVQEDGEVVAESGNNTPAHSQAIIPVDVDEEQAGPSGLQRVVKPTSITVHDSESDDEEDSLELQEVWIPKNGTRRYSEREEKTGESVQSRELSVSGKGKTPLRKRYNSHQMGQSKQFPLEESSCEKGCQVTSEQIKADMKAARDIPEKKKNKDVYPSCSSTTASTVGNSSSHNTASQSPDFVRTVNSGGSSEPSPTEVDVSRQCACSPGGSEDSEAMEEGDAESSVCPRCCCHRPQESQRRTSRCSDEERPSTSRACVVNGPDGTRSAFSFRTLPQGGSSGPAHDERTNGSGSGATGEDRRGSSQPESCDVQSNEDYPRRPLTRARSRLSHVLLVSESEVAKTKPRHAMKRKRTADKSTSTSDPVIEDDHVQVLVLKSKNLVGVTMTNCGITDLVLKDCPKMMFIHATRCRVLKHLKVENAPIVNRFDYAQCKKLNMDQVLDQILRMPPERNRIIYLRPMQQVDTLTLEQKLFSGPYPYHICIIHEFSNPPNVRNKVRIRSWMDTIANINQELIKYEFFPEATRSEEDLKKYPKYPWGREIYTLEGVVDGAPYSMISDFPWLRSLRAAEPNSFARYDFEDDEESTIYAPRRKGQLSADICMETIGEEISEMRQMKKGVFQRVVAIFIHYCDVNGEPVEDDYI

SEQ ID NO: 18195 - protein, 1113 aa, Homo sapiens
MGPRKKSVKTCIMNNEIPEEMTADETKDYMNQLSHEVLCHIFRYLPLQDIMCMECLSRKLKEAVTLYLRVVRVVDLCAGRWWEYMPSGFTDASFLTLLKKMPDVEQLYGLHPRYLERRRVRGHEAFSIPGVLEALQACPNLVGVETSHLELVESIWTYMPHVHILGKFRNRNGAFPIPPENKLKIPIGAKIQTLHLVGVNVPEIPCIPMLRHLYMKWVRLTKPQPFKDFLCISLRTFVMRNCAGPTNSLKYVPLVTGLASARNLEHLEMVRVPFLGGLIQHVVEDSWRSGGFRNLHTIVLGACKNALEVDLGYLIITAARRLHEVRIQPSLTKDGVFSALKMAELEFPQFETLHLGYVDEFLLQSRMANADLVKYGLADVVENPGIITDIGMKAVNEVFSCIKYLAIYNCPHLHNPYNWISDHSRWTRLVDINLVRCHALKLDSFGQFIELLPSLEFISLDQMFREPPKGCARVGLSAGTGIGVSSALVSNQNSNNDDNNAQNNNANIHDNNHHHPDDSDEENDFRQDLQPGEQQFAADALNEMEDIVQEDGEVVAESGNNTPAHSQAIIPVDVDEEQAGPSGLQRVVKPTSITVHDSESDDEEDSLELQEVWIPKNGTRRYSEREEKTGESVQSRELSVSGKGKTPLRKRYNSHQMGQSKQFPLEESSCEKGCQVTSEQIKADMKAARDIPEKKKNKDVYPSCSSTTASTVGNSSSHNTASQSPDFVRTVNSGGSSEPSPTEVDVSRQCACSPGGSEDSEAMEEGDAESSVCPRCCCHRPQESQRRTSRCSDEERPSTSRACVVNGPDEVAKTKPRHAMKRKRTADKSTSTSDPVIEDDHVQVLVLKSKNLVGVTMTNCGITDLVLKDCPKMMFIHATRCRVLKHLKVENAPIVNRFDYAQCKKLNMDQVLDQILRMPPERNRIIYLRPMQQVDTLTLEQKLFSGPYPYHICIIHEFSNPPNVRNKVRIRSWMDTIANINQELIKYEFFPEATRSEEDLKKYPKYPWGREIYTLEGVVDGAPYSMISDFPWLRSLRAAEPNSFARYDFEDDEESTIYAPRRKGQLSADICMETIGEEISEMRQMKKGVFQRVVAIFIHYCDVNGEPVEDDYI

SEQ ID NO: 18196 - protein, 943 aa, Homo sapiens
MGPRKKSVKTCIMNNEIPEEMTADETKDYMNQLSHEVLCHIFRYLPLQDIMCMECLSRKLKEAVTLYLRVVRVVDLCAGRWWEYMPSGFTDASFLTLLKKMPDVEQLYGLHPRYLERRRVRGHEAFSIPGVLEALQACPNLVGVETSHLELVESIWTYMPHVHILGKFRNRNGAFPIPPENKLKIPIGAKIQTLHLVGVNVPEIPCIPMLRHLYMKWVRLTKPQPFKDFLCISLRTFVMRNCAGPTNSLKYVPLVTGLASARNLEHLEMVRVPFLGGLIQHVVEDSWRSGGFRNLHTIVLGACKNALEVDLGYLIITAARRLHEVRIQPSLTKDGVFSALKMAELEFPQFETLHLGYVDEFLLQSRMANADLVKYGLADVVENPGIITDIGMKAVNEVFSCIKYLAIYNCPHLHNPYNWISDHSRWTRLVDINLVRCHALKLDSFGQFIELLPSLEFISLDQMFREPPKGCARVGLSAGTGIGVSSALVSNQNSNNDDNNAQNNNANIHDNNHHHPDDSDEENDFRQDLQPGEQQFAADALNEMEDIVQEDGEVVAESGNNTPAHSQAIIPVDVDEEQAGPSGLQRVVKPTSITVHDSESDDEEDSLELQEVWIPKNGTRRYSEREEKTGESVQSRELSEVAKTKPRHAMKRKRTADKSTSTSDPVIEDDHVQVLVLKSKNLVGVTMTNCGITDLVLKDCPKMMFIHATRCRVLKHLKVENAPIVNRFDYAQCKKLNMDQVLDQILRMPPERNRIIYLRPMQQVDTLTLEQKLFSGPYPYHICIIHEFSNPPNVRNKVRIRSWMDTIANINQELIKYEFFPEATRSEEDLKKYPKYPWGREIYTLEGVVDGAPYSMISDFPWLRSLRAAEPNSFARYDFEDDEESTIYAPRRKGQLSADICMETIGEEISEMRQMKKGVFQRVVAIFIHYCDVNGEPVEDDYI

SEQ ID NO: 18197 - protein, 364 aa, Homo sapiens
MTSELDIFVGNTTLIDEDVYRLWLDGYSVTDAVALRVRSGILEQTGATAAVLQSDTMDHYRTFHMLERLLHAPPKLLHQLIFQIPPSRQALLIERYYAFDEAFVREVLGKKLSKGTKKDLDDISTKTGITLKSCRRQFDNFKRVFKVVEEMRGSLVDNIQQHFLLSDRLARDYAAIVFFANNRFETGKKKLQYLSFGDFAFCAELMIQNWTLGAVGEAPTDPDSQMDDMDMDLDKEFLQDLKELKVLVADKDLLDLHKSLVCTALRGKLGVFSEMEANFKNLSRGLVNVAAKLTHNKDVRDLFVDLVEKFVEPCRSDHWPLSDVRFFLNQYSASVHSLDGFRHQALWDRYMGTLRGCLLRLYHD

SEQ ID NO: 18198 - protein, 357 aa, Homo sapiens
MTSELDIFVGNTTLIDEDVYRLWLDGYSVTDAVALRVRSGILEQTGATAAVLQSDTMDHYRTFHMLERLLHAPPKLLHQLIFQIPPSRQALLIERYYAFDEAFVREVLGKKLSKGTKKDLDDISTKTGITLKSCRRQFDNFKRVFKVVEEMRGSLVDNIQQHFLLSDRLARDYAAIVFFANNRFETGKKKLQYLSFGDFAFCAELMIQNWTLGAVDSQMDDMDMDLDKEFLQDLKELKVLVADKDLLDLHKSLVCTALRGKLGVFSEMEANFKNLSRGLVNVAAKLTHNKDVRDLFVDLVEKFVEPCRSDHWPLSDVRFFLNQYSASVHSLDGFRHQALWDRYMGTLRGCLLRLYHD

SEQ ID NO: 18199 - protein, 255 aa, Homo sapiens
MAVGNINELPENILLELFTHVPARQLLLNCRLVCSLWRDLIDLVTLWKRKCLREGFITEDWDQPVADWKIFYFLRSLHRNLLHNPCAEEGFEFWSLDVNGGDEWKVEDLSRDQRKEFPNDQVKKYFVTSYYTCLKSQVVDLKAEGYWEELMDTTRPDIEVKDWFAARPDCGSKYQLCVQLLSSAHAPLGTFQPDPATIQQKSDAKWREVSHTFSNYPPGVRYIWFQHGGVDTHYWAGWYGPRVTNSSITIGPPLP

SEQ ID NO: 18200 - protein, 224 aa, Homo sapiens
MAVGNINELPENILLELFTHVPARQLLLNCRLVCSLWRDLIDLVTLWKRKCLREGFITEDWDQPVADWKIFYFLRSLHRNLLHNPCAEEGFEFWSLDVNGGDEWKVEDLSRDQRKEFPNDQVRSQARLRVQVPAVRSAPVVRARASGDLPARPGDHPAEERCQVEGGLPHILQLPARRPLHLVSARRRGHSLLGRLVRPEGHQQQHHHRAPAALTPPEPPSAEP

SEQ ID NO: 18201 - protein, 1213 aa, Homo sapiens
MRSRNQGGESASDGHISCPKPSIIGNAGEKSLSEDAKKKKKSNRKEDDVMASGTVKRHLKTSGECERKTKKSLELSKEDLIQLLSIMEGELQAREDVIHMLKTEKTKPEVLEAHYGSAEPEKVLRVLHRDAILAQEKSIGEDVYEKPISELDRLEEKQKETYRRMLEQLLLAEKCHRRTVYELENEKHKHTDYMNKSDDFTNLLEQERERLKKLLEQEKAYQARKEKENAKRLNKLRDELVKLKSFALMLVDERQMHIEQLGLQSQKVQDLTQKLREEEEKLKAITSKSKEDRQKLLKLEVDFEHKASRFSQEHEEMNAKLANQESHNRQLRLKLVGLTQRIEELEETNKNLQKAEEELQELRDKIAKGECGNSSLMAEVENLRKRVLEMEGKDEEITKTESQCRELRKKLQEEEHHSKELRLEVEKLQKRMSELEKLEEAFSKSKSECTQLHLNLEKEKNLTKDLLNELEVVKSRVKELECSESRLEKAELSLKDDLTKLKSFTVMLVDERKNMMEKIKQEERKVDGLNKNFKVEQGKVMDVTEKLIEESKKLLKLKSEMEEKVYNLTRERDELIGKLKSEEEKSSELSCSVDLLKKRLDGIEEVEREITRGRSRKGSELTCPEDNKIKELTLEIERLKKRLQQLEVVEGDLMKTEDEYDQLEQKFRTEQDKANFLSQQLEEIKHQIAKNKAIEKGEVVSQEAELRHRFRLEEAKSRDLKAEVQALKEKIHELMNKEDQLSQLQVDYSVLQQRFMEEENKNKNMGQEVLNLTKELELSKRYSRALRPSVNGRRMVDVPVTSTGVQTDAVSGEAAEEETPAVFIRKSFQEENHIMSNLRQVGLKKPVERSSVLDRYPPAANELTMRKSWIPWMRKRENGPSITQEKGPRTNSSPGHPGEVVLSPKQGQPLHIRVTPDHENSTATLEITSPTSEEFFSSTTVIPTLGNQKPRITIIPSPNVMPQKQKSGDTTLGPERAMSPVTITTFSREKTPESGRGAFADRPTSPIQIMTVSTSAAPAEIAVSPESQEMPMGRTILKVTPEKQTVPTPVRKYNSNANIITTEDNKIHIHLGSQFKRSPGTSGEGVSPVITVRPVNVTAEKEVSTGTVLRSPRNHLSSRPGASKVTSTITITPVTTSSARGTQSVSGQDGSSQRPTPTRIPMSKGMKAGKPVVAAPGAGNLTKFEPRAETQSMKIELKKSAASSTTSLGGGKG

SEQ ID NO: 18202 - protein, 1177 aa, Homo sapiens
MRSRNQGGESASDGHISCPKPSIIGNAGEKSLSEDAKKKKKSNRKEDDVMASGTVKRHLKTSGECERKTKKSLELSKEDLIQLLSIMEGELQAREDVIHMLKTEKTKPEVLEAHYGSAEPEKVLRVLHRDAILAQEKSIGEDVYEKPISELDRLEEKQKETYRRMLEQLLLAEKCHRRTVYELENEKHKHTDYMNKSDDFTNLLEQERERLKKLLEQEKAYQARKEKENAKRLNKLRDELVKLKSFALMLVDERQMHIEQLGLQSQKVQDLTQKLREEEEKLKAITSKSKEDRQKLLKLEVDFEHKASRFSQEHEEMNAKLANQESHNRQLRLKLVGLTQRIEELEETNKNLQKAEEELQELRDKIAKGECGNSSLMAEVENLRKRVLEMEGKDEEITKTESQCRELRKKLQEEEHHSKELRLEVEKLQKRMSELEKLEEAFSKSKSECTQLHLNLEKEKNLTKDLLNELEVVKSRVKELECSESRLEKAELSLKDDLTKLKSFTVMLVDERKNMMEKIKQEERKVDGLNKNFKVEQGKVMDVTEKLIEESKKLLKLKSEMEEKVYNLTRERDELIGKLKSEEEKSSELSCSVDLLKKRLDGIEEVEREITRGRSRKGSELTCPEDNKIKELTLEIERLKKRLQQLEVVEGDLMKTEDEYDQLEQKFRTEQDKANFLSQQLEEIKHQIAKNKAIEKGEVVSQEAELRHRFRLEEAKSRDLKAEVQALKEKIHELMNKEDQLSQLQVDYSVLQQRFMEEENKNKNMGQEVLNLTKELELSKRYSRALRPSVNGRRMVDVPVTSTGVQTDAVSGEAAEEETPAVFIRKSFQEENHIMSNLRQVGLKKPVERSSVLDRYPPAANELTMRKSWIPWMRKRENGPSITQEKGPRTNSSPGHPGEVVLSPKQGQPLHIRVTPDHENSTATLEITSPTSEEFFSSTTVIPTLGNQKPRITIIPSPNVMPQKQKSGDTTLGPERAMSPVTITTFSREKTPESGRGAFADRPTSPIQIMTVSTSAAPAEIAVSPESQEMPMGRTILKVTPEKQTVPTPVRKYNSNANIITTEDNKIHIHLGSQFKRSPGTSGEGVSPVITVRPVNVTAEKEVSTGTVLRSPRNHLSSRPGASKVTSTITITPVTTSSARGTQSVSGQDGSSQRPTPTRIPMSKESIIIHQLRMNSR

SEQ ID NO: 18203 - protein, 965 aa, Homo sapiens
MLVDERQMHIEQLGLQSQKVQDLTQKLREEEEKLKAITSKSKEDRQKLLKLEVDFEHKASRFSQEHEEMNAKLANQESHNRQLRLKLVGLTQRIEELEETNKNLQKAEEELQELRDKIAKGECGNSSLMAEVENLRKRVLEMEGKDEEITKTESQCRELRKKLQEEEHHSKELRLEVEKLQKRMSELEKLEEAFSKSKSECTQLHLNLEKEKNLTKDLLNELEVVKSRVKELECSESRLEKAELSLKDDLTKLKSFTVMLVDERKNMMEKIKQEERKVDGLNKNFKVEQGKVMDVTEKLIEESKKLLKLKSEMEEKVYNLTRERDELIGKLKSEEEKSSELSCSVDLLKKRLDGIEEVEREITRGRSRKGSELTCPEDNKIKELTLEIERLKKRLQQLEVVEGDLMKTEDEYDQLEQKFRTEQDKANFLSQQLEEIKHQIAKNKAIEKGEVVSQEAELRHRFRLEEAKSRDLKAEVQALKEKIHELMNKEDQLSQLQVDYSVLQQRFMEEENKNKNMGQEVLNLTKELELSKRYSRALRPSVNGRRMVDVPVTSTGVQTDAVSGEAAEEETPAVFIRKSFQEENHIMSNLRQVGLKKPVERSSVLDRYPPAANELTMRKSWIPWMRKRENGPSITQEKGPRTNSSPGHPGEVVLSPKQGQPLHIRVTPDHENSTATLEITSPTSEEFFSSTTVIPTLGNQKPRITIIPSPNVMPQKQKSGDTTLGPERAMSPVTITTFSREKTPESGRGAFADRPTSPIQIMTVSTSAAPAEIAVSPESQEMPMGRTILKVTPEKQTVPTPVRKYNSNANIITTEDNKIHIHLGSQFKRSPGTSGEGVSPVITVRPVNVTAEKEVSTGTVLRSPRNHLSSRPGASKVTSTITITPVTTSSARGTQSVSGQDGSSQRPTPTRIPMSKGMKAGKPVVAAPGAGNLTKFEPRAETQSMKIELKKSAASSTTSLGGGKG

SEQ ID NO: 18204 - protein, 504 aa, Homo sapiens
MTPSPLLLLLLPPLLLGAFPPAAAARGPPKMADKVVPRQVARLGRTVRLQCPVEGDPPPLTMWTKDGRTIHSGWSRFRVLPQGLKVKQVEREDAGVYVCKATNGFGSLSVNYTLVVLDDISPGKESLGPDSSSGGQEDPASQQWARPRFTQPSKMRRRVIARPVGSSVRLKCVASGHPRPDITWMKDDQALTRPEAAEPRKKKWTLSLKNLRPEDSGKYTCRVSNRAGAINATYKVDVIQRTRSKPVLTGTHPVNTTVDFGGTTSFQCKVRSDVKPVIQWLKRVEYGAEGRHNSTIDVGGQKFVVLPTGDVWSRPDGSYLNKLLITRARQDDAGMYICLGANTMGYSFRSAFLTVLPDPKPPGPPVASSSSATSLPWPVVIGIPAGAVFILGTLLLWLCQAQKKPCTPAPAPPLPGHRPPGTARDRSGDKDLPSLAALSAGPGVGLCEEHGSPAAPQHLLGPGPVAGPKLYPKLYTDIHTHTHTHSHTHSHVEGKVHQHIHYQC

SEQ ID NO: 18205 - protein, 324 aa, Homo sapiens
MASEALHQVGDGEEAVLKKENFNMMNALDQLPKPFSNPKSMNRTVTTKGLPLASKGNLVNFLEDDTINLLKPLPVEDSDCSSDETSISAFSSTLLNPIKLAVTQPNSSFFAGMLEGELNKLSFSPMAKNAENEDLALGPCPCPSKSQMATRGLLDLDNPELETETSSTHSESSVVVDLPDTPFIFEHTVNNSTAVISWTYALGKQPVSFYQLLLQEVAKTQENELPEAKNRPWIFNKILGTTVKLMELKPNTCYCLSVRAANTAGVGKWCKPYKFATLATDFSSFPENYPIQITVRRKEPRQKIVSIGPEEMRRLEDLEYLFPC

SEQ ID NO: 18206 - protein, 621 aa, Homo sapiens
MSPVFPMLTVLTMFYYICLRRRARTATRGEMMNTHRAIESNSQTSPLNAEVVQYAKEVVDFSSHYGSENSMSYTMWNLAGVPNVFPSSGDFTQTAVFRTYGTWWDQCPSASLPFKRTPPNFQSQDYVELTFEQQVYPTAVHVLETYHPGAVIRILACSANPYSPNPPAEVRWEILWSERPTKVNASQARQFKPCIKQINFPTNLIRLEVNSSLLEYYTELDAVVLHGVKDKPVLSLKTSLIDMNDIEDDAYAEKDGCGMDSLNKKFSSAVLGEGPNNGYFDKLPYELIQLILNHLTLPDLCRLAQTCKLLSQHCCDPLQYIHLNLQPYWAKLDDTSLEFLQSRCTLVQWLNLSWTGNRGFISVAGFSRFLKVCGSELVRLELSCSHFLNETCLEVISEMCPNLQALNLSSCDKLPPQAFNHIAKLCSLKRLVLYRTKVEQTALLSILNFCSELQHLSLGSCVMIEDYDVIASMIGAKCKKLRTLDLWRCKNITENGIAELASGCPLLEELDLGWCPTLQSSTGCFTRLAHQLPNLQKLFLTANRSVCDTDIDELACNCTRLQQLDILGTRMVSPASLRKLLESCKDLSLLDVSFCSQIDNRAVLELNASFPKVFIKKSFTQ

SEQ ID NO: 18207 - protein, 244 aa, Homo sapiens
MDTESNRRANLALPQEPSSVPAFEVLEISPQEVSSGRLLKSASSPPLHTWLTVLKKEQEFLGVTQILTAMICLCFGTVVCSVLDISHIEGDIFSSFKAGYPFWGAIFFSISGMLSIISERRNATYLVRGSLGANTASSIAGGTGITILIINLKKSLAYIHIHSCQKFFETKCFMASFSTEIVVMMLFLTILGLGSAVSLTICGAGEELKGNKVPEDRVYEELNIYSATYSELEDPGEMSPPIDL

SEQ ID NO: 18208 - protein, 743 aa, Homo sapiens
MLSRLGALLQEAVGAREPSIDLLQAFVEHWKGITHYYIESTDESTPAKKTDIPWRLKQMLDILVYEEQQQAAAGEAGPCLEYLLQHKILETLCTLGKAEYPPGMRQQVFQFFSKVLAQVQHPLLHYLSVHRPVQKLLRLGGTASGSVTEKEEVQFTTVLCSKIQQDPELLAYILEGKKIVGRKKACGEPTALPKDTTSHGDKDCSHDGAPARPQLDGESCGAQALNSHMPAETEELDGGTTESNLITSLLGLCQSKKSRVALKAQENLLLLVSMASPAAATYLVQSSACCPAIVRHLCQLYRSMPVFLDPADIATLEGISWRLPSAPSDEASFPGKEALAAFLGWFDYCDHLITEAHTVVADALAKAVAENFFVETLQPQLLHVSEQSILTSTALLTAMLRQLRSPALLREAVAFLLGTDRQPEAPGDNPHTLYAHLIGHCDHLSDEISITTLRLFEELLQKPHEGIIHSLVLRNLEGRPYVAWGSPEPESYEDTLDLEEDPYFTDSFLDSGFQTPAKPRLAPATSYDGKTAVTEIVNSFLCLVPEEAKTSAFLEETGYDTYVHDAYGLFQECSSRVASWGWPLTPTPLDPHEPERPFFEGHFLRVLFDRMSRILDQPYSLNLQVTSVLSRLALFPHPHIHEYLLDPYISLAPGCRSLFSVLVRVIGDLMQRIQRVPQFPGKLLLVRKQLTGQAPGEQLDHQTLLQGVVVLEEFCKELAAIAFVKFPPHDPRQNVSPAPEGQV

SEQ ID NO: 18209 - protein, 2391 aa, Homo sapiens
MTDLLRSVVTVIDVFYKYTKQDGECGTLSKGELKELLEKELHPVLKNPDDPDTVDVIMHMLDRDHDRRLDFTEFLLMIFKLTMACNKVLSKEYCKASGSKKHRRGHRHQEEESETEEDEEDTPGHKSGYRHSSWSEGEEHGYSSGHSRGTVKCRHGSNSRRLGRQGNLSSSGNQEGSQKRYHRSSCGHSWSGGKDRHGSSSVELRERINKSHISPSRESGEEYESGSGSNSWERKGHGGLSCGLETSGHESNSTQSRIREQKLGSSCSGSGDSGRRSHACGYSNSSGCGRPQNASSSCQSHRFGGQGNQFSYIQSGCQSGIKGGQGHGCVSGGQPSGCGQPESNPCSQSYSQRGYGARENGQPQNCGGQWRTGSSQSSCCGQYGSGGSQSCSNGQHEYGSCGRFSNSSSSNEFSKCDQYGSGSSQSTSFEQHGTGLSQSSGFEQHVCGSGQTCGQHESTSSQSLGYDQHGSSSGKTSGFGQHGSGSGQSSGFGQCGSGSGQSSGFGQHGSVSGQSSGFGQHGSVSGQSSGFGQHESRSRQSSYGQHGSGSSQSSGYGQYGSRETSGFGQHGLGSGQSTGFGQYGSGSGQSSGFGQHGSGSGQSSGFGQHESRSGQSSYGQHSSGSSQSSGYGQHGSRQTSGFGQHGSGSSQSTGFGQYGSGSGQSSGFGQHVSGSGQSSGFGQHESRSGHSSYGQHGFGSSQSSGYGQHGSSSGQTSGFGQHELSSGQSSSFGQHGSGSGQSSGFGQHGSGSGQSSGFGQHESRSGQSSYGQHSSGSSQSSGYGQHGSRQTSGFGQHGSGSSQSTGFGQYGSGSGQSAGFGQHGSGSGQSSGFGQHESRSHQSSYGQHGSGSSQSSGYGQHGSSSGQTSGFGQHRSSSGQYSGFGQHGSGSGQSSGFGQHGTGSGQYSGFGQHESRSHQSSYGQHGSGSSQSSGYGQHGSSSGQTFGFGQHRSGSGQSSGFGQHGSGSGQSSGFGQHESGSGKSSGFGQHESRSSQSNYGQHGSGSSQSSGYGQHGSSSGQTTGFGQHRSSSGQYSGFGQHGSGSDQSSGFGQHGTGSGQSSGFGQYESRSRQSSYGQHGSGSSQSSGYGQHGSNSGQTSGFGQHRPGSGQSSGFGQYGSGSGQSSGFGQHGSGTGKSSGFAQHEYRSGQSSYGQHGTGSSQSSGCGQHESGSGPTTSFGQHVSGSDNFSSSGQHISDSGQSTGFGQYGSGSGQSTGLGQGESQQVESGSTVHGRQETTHGQTINTTRHSQSGQGQSTQTGSRVTRRRRSSQSENSDSEVHSKVSHRHSEHIHTQAGSHYPKSGSTVRRRQGTTHGQRGDTTRHGHSGHGQSTQTGSRTSGRQRFSHSDATDSEVHSGVSHRPHSQEQTHSQAGSQHGESESTVHERHETTYGQTGEATGHGHSGHGQSTQRGSRTTGRRGSGHSESSDSEVHSGGSHRPQSQEQTHGQAGSQHGESGSTVHGRHGTTHGQTGDTTRHAHYHHGKSTQRGSSTTGRRGSGHSESSDSEVHSGGSHTHSGHTHGQSGSQHGESESIIHDRHRITHGQTGDTTRHSYSGHEQTTQTGSRTTGRQRTSHSESTDSEVHSGGSHRPHSREHTYGQAGSQHEEPEFTVHERHGTTHGQIGDTTGHSHSGHGQSTQRGSRTTGRQRSSHSESSDSEVHSGVSHTHTGHTHGQAGSQHGQSESIVPERHGTTHGQTGDTTRHAHYHHGLTTQTGSRTTGRRGSGHSEYSDSEGYSGVSHTHSGHTHGQARSQHGESESIVHERHGTIHGQTGDTTRHAHSGHGQSTQTGSRTTGRRSSGHSEYSDSEGHSGFSQRPHSRGHTHGQAGSQHGESESIVDERHGTTHGQTGDTSGHSQSGHGQSTQSGSSTTGRRRSGHSESSDSEVHSGGSHTHSGHTHSQARSQHGESESTVHKRHQTTHGQTGDTTEHGHPSHGQTIQTGSRTTGRRGSGHSEYSDSEGPSGVSHTHSGHTHGQAGSHYPESGSSVHERHGTTHGQTADTTRHGHSGHGQSTQRGSRTTGRRASGHSEYSDSEGHSGVSHTHSGHAHGQAGSQHGESGSSVHERHGTTHGQTGDTTRHAHSGHGQSTQRGSRTAGRRGSGHSESSDSEVHSGVSHTHSGHTYGQARSQHGESGSAIHGRQGTIHGQTGDTTRHGQSGHGQSTQTGSRTTGRQRSSHSESSDSEVHSEASPTHSGHTHSQAGSRHGQSGSSGHGRQGTTHGQTGDTTRHAHYGYGQSTQRGSRTTGRRGSGHSESSDSEVHSWGSHTHSGHIQGQAGSQQRQPGSTVHGRLETTHGQTGDTTRHGHSGYGQSTQTGSRSSRASHFQSHSSERQRHGSSQVWKHGSYGPAEYDYGHTGYGPSGGSRKSISNSHLSWSTDSTANKQLSRH

SEQ ID NO: 18210 - protein, 437 aa, Homo sapiens
MASPSSFTYYCPPSSSPVWSEPLYSLRPEHARERLQDDSVETVTSIEQAKVEEKIQEVFSSYKFNHLVPRLVLQREKHFHYLKRGLRQLTDAYECLDASRPWLCYWILHSLELLDEPIPQIVATDVCQFLELCQSPEGGFGGGPGQYPHLAPTYAAVNALCIIGTEEAYDIINREKLLQYLYSLKQPDGSFLMHVGGEVDVRSAYCAASVASLTNIITPDLFEGTAEWIARCQNWEGGIGGVPGMEAHGGYTFCGLAALVILKRERSLNLKSLLQWVTSRQMRFEGGFQGRCNKLVDGCYSFWQAGLLPLLHRALHAQGDPALSMSHWMFHQQALQEYILMCCQCPAGGLLDKPGKSRDFYHTCYCLSGLSIAQHFGSGAMLHDVVLGVPENALQPTHPVYNIGPDKVIQATTYFLQKPVPGFEELKDETSAEPATD

SEQ ID NO: 18211 - protein, 391 aa, Homo sapiens
MIAKVEEKIQEVFSSYKFNHLVPRLVLQREKHFHYLKRGLRQLTDAYECLDASRPWLCYWILHSLELLDEPIPQIVATDVCQFLELCQSPEGGFGGGPGQYPHLAPTYAAVNALCIIGTEEAYDIINREKLLQYLYSLKQPDGSFLMHVGGEVDVRSAYCAASVASLTNIITPDLFEGTAEWIARCQNWEGGIGGVPGMEAHGGYTFCGLAALVILKRERSLNLKSLLQWVTSRQMRFEGGFQGRCNKLVDGCYSFWQAGLLPLLHRALHAQGDPALSMSHWMFHQQALQEYILMCCQCPAGGLLDKPGKSRDFYHTCYCLSGLSIAQHFGSGAMLHDVVLGVPENALQPTHPVYNIGPDKVIQATTYFLQKPVPGFEELKDETSAEPATD

SEQ ID NO: 18212 - protein, 379 aa, Homo sapiens
MAATEGVGEAAQGGEPGQPAQPPPQPHPPPPQQQHKEEMAAEAGEAVASPMDDGFVSLDSPSYVLYRDRAEWADIDPVPQNDGPNPVVQIIYSDKFRDVYDYFRAVLQRDERSERAFKLTRDAIELNAANYTVWHFRRVLLKSLQKDLHEEMNYITAIIEEQPKNYQVWHHRRVLVEWLRDPSQELEFIADILNQDAKNYHAWQHRQWVIQEFKLWDNELQYVDQLLKEDVRNNSVWNQRYFVISNTTGYNDRAVLEREVQYTLEMIKLVPHNESAWNYLKGILQDRGLSKYPNLLNQLLDLQPSHSSPYLIAFLVDIYEDMLENQCDNKEDILNKALELCEILAKEKDTIRKEYWRYIGRSLQSKHSTENDSPTNVQQ

SEQ ID NO: 18213 - protein, 312 aa, Homo sapiens
MAATEGVGEAAQGGEPGQPAQPPPQPHPPPPQQQHKEEMAAEAGEAVASPMDDGFVSLDSPSYVLYRHFRRVLLKSLQKDLHEEMNYITAIIEEQPKNYQVWHHRRVLVEWLRDPSQELEFIADILNQDAKNYHAWQHRQWVIQEFKLWDNELQYVDQLLKEDVRNNSVWNQRYFVISNTTGYNDRAVLEREVQYTLEMIKLVPHNESAWNYLKGILQDRGLSKYPNLLNQLLDLQPSHSSPYLIAFLVDIYEDMLENQCDNKEDILNKALELCEILAKEKDTIRKEYWRYIGRSLQSKHSTENDSPTNVQQ

SEQ ID NO: 18214 - protein, 233 aa, Homo sapiens
MWQLLLPTALLLLVSAGMRTEDLPKAVVFLEPQWYSVLEKDSVTLKCQGAYSPEDNSTQWFHNESLISSQASSYFIDAATVNDSGEYRCQTNLSTLSDPVQLEVHIGWLLLQAPRWVFKEEDPIHLRCHSWKNTALHKVTYLQNGKDRKYFHHNSDFHIPKATLKDSGSYFCRGLVGSKNVSSETVNITITQGLAVSTISSFSPPGYQVSFCLVMVLLFAVDTGLYFSVKTNI

SEQ ID NO: 18215 - protein, 650 aa, Homo sapiens
MASNMDREMILADFQACTGIENIDEAITLLEQNNWDLVAAINGVIPQENGILQSEYGGETIPGPAFNPASHPASAPTSSSSSAFRPVMPSRQIVERQPRMLDFRVEYRDRNVDVVLEDTCTVGEIKQILENELQIPVSKMLLKGWKTGDVEDSTVLKSLHLPKNNSLYVLTPDLPPPSSSSHAGALQESLNQNFMLIITHREVQREYNLNFSGSSTIQEVKRNVYDLTSIPVRHQLWEGWPTSATDDSMCLAESGLSYPCHRLTVGRRSSPAQTREQSEEQITDVHMVSDSDGDDFEDATEFGVDDGEVFGMASSALRKSPMMPENAENEGDALLQFTAEFSSRYGDCHPVFFIGSLEAAFQEAFYVKARDRKLLAIYLHHDESVLTNVFCSQMLCAESIVSYLSQNFITWAWDLTKDSNRARFLTMCNRHFGSVVAQTIRTQKTDQFPLFLIIMGKRSSNEVLNVIQGNTTVDELMMRLMAAMEIFTAQQQEDIKDEDEREARENVKREQDEAYRLSLEADRAKREAHEREMAEQFRLEQIRKEQEEEREAIRLSLEQALPPEPKEENAEPVSKLRIRTPSGEFLERRFLASNKLQIVFDFVASKGFPWDEYKLLSTFPRRDVTQLDPNKSLLEVKLFPQETLFLEAKE

SEQ ID NO: 18216 - protein, 498 aa, Homo sapiens
MASNMDREMILADFQACTGIENIDEAITLLEQNNWDLVAAINGVIPQENGILQSEYGGETIPGPAFNPASHPASAPTSSSSSAFRPVMPSRQIVERQPRMLDFRVEYRDRNVDVVLEDTCTVGEIKQILENELQIPVSKMLLKGWKTGDVEDSTVLKSLHLPKNNSLYVLTPDLPPPSSSSHAGALQEFSSRYGDCHPVFFIGSLEAAFQEAFYVKARDRKLLAIYLHHDESVLTNVFCSQMLCAESIVSYLSQNFITWAWDLTKDSNRARFLTMCNRHFGSVVAQTIRTQKTDQFPLFLIIMGKRSSNEVLNVIQGNTTVDELMMRLMAAMEIFTAQQQEDIKDEDEREARENVKREQDEAYRLSLEADRAKREAHEREMAEQFRLEQIRKEQEEEREAIRLSLEQALPPEPKEENAEPVSKLRIRTPSGEFLERRFLASNKLQIVFDFVASKGFPWDEYKLLSTFPRRDVTQLDPNKSLLEVKLFPQETLFLEAKE

SEQ ID NO: 18217 - protein, 1009 aa, Homo sapiens
MSGVSEPLSRVKLGTLRRPEGPAEPMVVVPVDVEKEDVRILKVCFYSNSFNPGKNFKLVKCTVQTEIREIITSILLSGRIGPNIRLAECYGLRLKHMKSDEIHWLHPQMTVGEVQDKYECLHVEAEWRYDLQIRYLPEDFMESLKEDRTTLLYFYQQLRNDYMQRYASKVSEGMALQLGCLELRRFFKDMPHNALDKKSNFELLEKEVGLDLFFPKQMQENLKPKQFRKMIQQTFQQYASLREEECVMKFFNTLAGFANIDQETYRCELIQGWNITVDLVIGPKGIRQLTSQDAKPTCLAEFKQIRSIRCLPLEEGQAVLQLGIEGAPQALSIKTSSLAEAENMADLIDGYCRLQGEHQGSLIIHPRKDGEKRNSLPQIPMLNLEARRSHLSESCSIESDIYAEIPDETLRRPGGPQYGIAREDVVLNRILGEGFFGEVYEGVYTNHKGEKINVAVKTCKKDCTLDNKEKFMSEAVIMKNLDHPHIVKLIGIIEEEPTWIIMELYPYGELGHYLERNKNSLKVLTLVLYSLQICKAMAYLESINCVHRDIAVRNILVASPECVKLGDFGLSRYIEDEDYYKASVTRLPIKWMSPESINFRRFTTASDVWMFAVCMWEILSFGKQPFFWLENKDVIGVLEKGDRLPKPDLCPPVLYTLMTRCWDYDPSDRPRFTELVCSLSDVYQMEKDIAMEQERNARYRTPKILEPTAFQEPPPKPSRPKYRPPPQTNLLAPKLQFQVPEGLCASSPTLTSPMEYPSPVNSLHTPPLHRHNVFKRHSMREEDFIQPSSREEAQQLWEAEKVKMRQILDKQQKQMVEDYQWLRQEEKSLDPMVYMNDKSPLTPEKEVGYLEFTGPPQKPPRLGAQSIQPTANLDRTDDLVYLNVMELVRAVLELKNELCQLPPEGYVVVVKNVGLTLRKLIGSVDDLLPSLPSSSRTEIEGTQKLLNKDLAELINKMRLAQQNAVTSLSEECKRQMLTASHTLAVDAKNLLDAVDQAKVLANLAHPPAE

SEQ ID NO: 18218 - protein, 967 aa, Homo sapiens
MSGVSEPLSRVKLGTLRRPEGPAEPMVVVPVDVEKEDVRILKVCFYSNSFNPGKNFKLVKCTVQTEIREIITSILLSGRIGPNIRLAECYGLRLKHMKSDEIHWLHPQMTVGEVQDKYECLHVEAEWRYDLQIRYLPEDFMESLKEDRTTLLYFYQQLRNDYMQRYASKVSEGMALQLGCLELRRFFKDMPHNALDKKSNFELLEKEVGLDLFFPKQMQENLKPKQFRKMIQQTFQQYASLREEECVMKFFNTLAGFANIDQETYRCELIQGWNITVDLVIGPKGIRQLTSQDAKPTCLAEFKQIRSIRCLPLEEGQAVLQLGIEGAPQALSIKTSSLAEAENMADLIDGYCRLQGEHQGSLIIHPRKDGEKRNSLPQIPMLNLEARRSHLSESCSIESDIYAEIPDETLRRPGGPQYGIAREDVVLNRILGEGFFGEVYEGVYTNHKGEKINVAVKTCKKDCTLDNKEKFMSEAVIMKNLDHPHIVKLIGIIEEEPTWIIMELYPYGELGHYLERNKNSLKVLTLVLYSLQICKAMAYLESINCVHRDIAVRNILVASPECVKLGDFGLSRYIEDEDYYKASVTRLPIKWMSPESINFRRFTTASDVWMFAVCMWEILSFGKQPFFWLENKDVIGVLEKGDRLPKPDLCPPVLYTLMTRCWDYDPSDRPRFTELVCSLSDVYQMEKDIAMEQERNARYRTPKILEPTAFQEPPPKPSRPKYRPPPQTNLLAPKLQFQEEDFIQPSSREEAQQLWEAEKVKMRQILDKQQKQMVEDYQWLRQEEKSLDPMVYMNDKSPLTPEKEVGYLEFTGPPQKPPRLGAQSIQPTANLDRTDDLVYLNVMELVRAVLELKNELCQLPPEGYVVVVKNVGLTLRKLIGSVDDLLPSLPSSSRTEIEGTQKLLNKDLAELINKMRLAQQNAVTSLSEECKRQMLTASHTLAVDAKNLLDAVDQAKVLANLAHPPAE

SEQ ID NO: 18219 - protein, 500 aa, Homo sapiens
MASMLLAQRLACSFQHSYRLLVPGSRHISQAAAKVDVEFDYDGPLMKTEVPGPRSQELMKQLNIIQNAEAVHFFCNYEESRGNYLVDVDGNRMLDLYSQISSVPIGYSHPALLKLIQQPQNASMFVNRPALGILPPENFVEKLRQSLLSVAPKGMSQLITMACGSCSNENALKTIFMWYRSKERGQRGFSQEELETCMINQAPGCPDYSILSFMGAFHGRTMGCLATTHSKAIHKIDIPSFDWPIAPFPRLKYPLEEFVKENQQEEARCLEEVEDLIVKYRKKKKTVAGIIVEPIQSEGGDNHASDDFFRKLRDIARKHGCAFLVDEVQTGGGCTGKFWAHEHWGLDDPADVMTFSKKMMTGGFFHKEEFRPNAPYRIFNTWLGDPSKNLLLAEVINIIKREDLLNNAAHAGKALLTGLLDLQARYPQFISRVRGRGTFCSFDTPDDSIRNKLILIARNKGVVLGGCGDKSIRFRPTLVFRDHHAHLFLNIFSDILADFK

SEQ ID NO: 18220 - protein, 444 aa, Homo sapiens
MGKGGNQGEGAAEREVSVPTFSWEEIQKHNLRTDRWLVIDRKVYNITKWSIQHPGGQRVIGHYAGEDATDAFRAFHPDLEFVGKFLKPLLIGELAPEEPSQDHGKNSKITEDFRALRKTAEDMNLFKTNHVFFLLLLAHIIALESIAWFTVFYFGNGWIPTLITAFVLATSQAQAGWLQHDYGHLSVYRKPKWNHLVHKFVIGHLKGASANWWNHRHFQHHAKPNIFHKDPDVNMLHVFVLGEWQPIEYGKKKLKYLPYNHQHEYFFLIGPPLLIPMYFQYQIIMTMIVHKNWVDLAWAVSYYIRFFITYIPFYGILGALLFLNFIRFLESHWFVWVTQMNHIVMEIDQEAYRDWFSSQLTATCNVEQSFFNDWFSGHLNFQIEHHLFPTMPRHNLHKIAPLVKSLCAKHGIEYQEKPLLRALLDIIRSLKKSGKLWLDAYLHK

SEQ ID NO: 18221 - protein, 422 aa, Homo sapiens
MHGREAGPFVCVCVLLASIPTPQTPLLQASLPPFHPASAGHPITGQQDAFRAFHPDLEFVGKFLKPLLIGELAPEEPSQDHGKNSKITEDFRALRKTAEDMNLFKTNHVFFLLLLAHIIALESIAWFTVFYFGNGWIPTLITAFVLATSQAQAGWLQHDYGHLSVYRKPKWNHLVHKFVIGHLKGASANWWNHRHFQHHAKPNIFHKDPDVNMLHVFVLGEWQPIEYGKKKLKYLPYNHQHEYFFLIGPPLLIPMYFQYQIIMTMIVHKNWVDLAWAVSYYIRFFITYIPFYGILGALLFLNFIRFLESHWFVWVTQMNHIVMEIDQEAYRDWFSSQLTATCNVEQSFFNDWFSGHLNFQIEHHLFPTMPRHNLHKIAPLVKSLCAKHGIEYQEKPLLRALLDIIRSLKKSGKLWLDAYLHK

SEQ ID NO: 18222 - protein, 386 aa, Homo sapiens
MGKGGNQGEGAAEREVSVPTFSWEEIQKHNLRTDRWLVIDRKVYNITKWSIQHPGGQRVIGHYAGEDATDAFRAFHPDLEFVGKFLKPLLIGELAPEEPSQDHGKNSKITEDFRALRKTAEDMNLFKTNHVFFLLLLAHIIALESIAWFTVFYFGNGWIPTLITAFVLATSQAQAGWLQHDYGHLSVYRKPKWNHLVHKFVIGHLKGASANWWNHRHFQHHAKPNIFHKDPDVNMLHVFVLGEWQPIEYGKKKLKYLPYNHQHEYFFLIGPPLLIPMYFQYQIIMTMIVHKNWVDLAWAVSYYIRFFITYIPFYGILGALLFLNFIRFLESHWFVWVTQMNHIVMEIDQEAYRDWFSSQLTATCNVEQSFFNDWFSGHLNFQIEHQ

SEQ ID NO: 18223 - protein, 413 aa, Homo sapiens
MTREPPGCRRVNSLMLYTLRSITSHRSSHPERWATSSQDAFRAFHPDLEFVGKFLKPLLIGELAPEEPSQDHGKNSKITEDFRALRKTAEDMNLFKTNHVFFLLLLAHIIALESIAWFTVFYFGNGWIPTLITAFVLATSQAQAGWLQHDYGHLSVYRKPKWNHLVHKFVIGHLKGASANWWNHRHFQHHAKPNIFHKDPDVNMLHVFVLGEWQPIEYGKKKLKYLPYNHQHEYFFLIGPPLLIPMYFQYQIIMTMIVHKNWVDLAWAVSYYIRFFITYIPFYGILGALLFLNFIRFLESHWFVWVTQMNHIVMEIDQEAYRDWFSSQLTATCNVEQSFFNDWFSGHLNFQIEHHLFPTMPRHNLHKIAPLVKSLCAKHGIEYQEKPLLRALLDIIRSLKKSGKLWLDAYLHK

SEQ ID NO: 18224 - protein, 961 aa, Homo sapiens
MLLLLLLAPLFLRPPGAGGAQTPNATSEGCQIIHPPWEGGIRYRGLTRDQVKAINFLPVDYEIEYVCRGEREVVGPKVRKCLANGSWTDMDTPSRCVRICSKSYLTLENGKVFLTGGDLPALDGARVDFRCDPDFHLVGSSRSICSQGQWSTPKPHCQVNRTPHSERRAVYIGALFPMSGGWPGGQACQPAVEMALEDVNSRRDILPDYELKLIHHDSKCDPGQATKYLYELLYNDPIKIILMPGCSSVSTLVAEAARMWNLIVLSYGSSSPALSNRQRFPTFFRTHPSATLHNPTRVKLFEKWGWKKIATIQQTTEVFTSTLDDLEERVKEAGIEITFRQSFFSDPAVPVKNLKRQDARIIVGLFYETEARKVFCEVYKERLFGKKYVWFLIGWYADNWFKIYDPSINCTVDEMTEAVEGHITTEIVMLNPANTRSISNMTSQEFVEKLTKRLKRHPEETGGFQEAPLAYDAIWALALALNKTSGGGGRSGVRLEDFNYNNQTITDQIYRAMNSSSFEGVSGHVVFDASGSRMAWTLIEQLQGGSYKKIGYYDSTKDDLSWSKTDKWIGGSPPADQTLVIKTFRFLSQKLFISVSVLSSLGIVLAVVCLSFNIYNSHVRYIQNSQPNLNNLTAVGCSLALAAVFPLGLDGYHIGRNQFPFVCQARLWLLGLGFSLGYGSMFTKIWWVHTVFTKKEEKKEWRKTLEPWKLYATVGLLVGMDVLTLAIWQIVDPLHRTIETFAKEEPKEDIDVSILPQLEHCSSRKMNTWLGIFYGYKGLLLLLGIFLAYETKSVSTEKINDHRAVGMAIYNVAVLCLITAPVTMILSSQQDAAFAFASLAIVFSSYITLVVLFVPKMRRLITRGEWQSEAQDTMKTGSSTNNNEEEKSRLLEKENRELEKIIAEKEERVSELRHQLQSRQQLRSRRHPPTPPEPSGGLPRGPPEPPDRLSCDGSRVHLLYK

SEQ ID NO: 18225 - protein, 844 aa, Homo sapiens
MGPGAPFARVGWPLPLLVVMAAGVAPVWASHSPHLPRPHSRVPPHPSSERRAVYIGALFPMSGGWPGGQACQPAVEMALEDVNSRRDILPDYELKLIHHDSKCDPGQATKYLYELLYNDPIKIILMPGCSSVSTLVAEAARMWNLIVLSYGSSSPALSNRQRFPTFFRTHPSATLHNPTRVKLFEKWGWKKIATIQQTTEVFTSTLDDLEERVKEAGIEITFRQSFFSDPAVPVKNLKRQDARIIVGLFYETEARKVFCEVYKERLFGKKYVWFLIGWYADNWFKIYDPSINCTVDEMTEAVEGHITTEIVMLNPANTRSISNMTSQEFVEKLTKRLKRHPEETGGFQEAPLAYDAIWALALALNKTSGGGGRSGVRLEDFNYNNQTITDQIYRAMNSSSFEGVSGHVVFDASGSRMAWTLIEQLQGGSYKKIGYYDSTKDDLSWSKTDKWIGGSPPADQTLVIKTFRFLSQKLFISVSVLSSLGIVLAVVCLSFNIYNSHVRYIQNSQPNLNNLTAVGCSLALAAVFPLGLDGYHIGRNQFPFVCQARLWLLGLGFSLGYGSMFTKIWWVHTVFTKKEEKKEWRKTLEPWKLYATVGLLVGMDVLTLAIWQIVDPLHRTIETFAKEEPKEDIDVSILPQLEHCSSRKMNTWLGIFYGYKGLLLLLGIFLAYETKSVSTEKINDHRAVGMAIYNVAVLCLITAPVTMILSSQQDAAFAFASLAIVFSSYITLVVLFVPKMRRLITRGEWQSEAQDTMKTGSSTNNNEEEKSRLLEKENRELEKIIAEKEERVSELRHQLQSRQQLRSRRHPPTPPEPSGGLPRGPPEPPDRLSCDGSRVHLLYK

SEQ ID NO: 18226 - protein, 899 aa, Homo sapiens
MLLLLLLAPLFLRPPGAGGAQTPNATSEGCQIIHPPWEGGIRYRGLTRDQVKAINFLPVDYEIEYVCRGEREVVGPKVRKCLANGSWTDMDTPSRCVNRTPHSERRAVYIGALFPMSGGWPGGQACQPAVEMALEDVNSRRDILPDYELKLIHHDSKCDPGQATKYLYELLYNDPIKIILMPGCSSVSTLVAEAARMWNLIVLSYGSSSPALSNRQRFPTFFRTHPSATLHNPTRVKLFEKWGWKKIATIQQTTEVFTSTLDDLEERVKEAGIEITFRQSFFSDPAVPVKNLKRQDARIIVGLFYETEARKVFCEVYKERLFGKKYVWFLIGWYADNWFKIYDPSINCTVDEMTEAVEGHITTEIVMLNPANTRSISNMTSQEFVEKLTKRLKRHPEETGGFQEAPLAYDAIWALALALNKTSGGGGRSGVRLEDFNYNNQTITDQIYRAMNSSSFEGVSGHVVFDASGSRMAWTLIEQLQGGSYKKIGYYDSTKDDLSWSKTDKWIGGSPPADQTLVIKTFRFLSQKLFISVSVLSSLGIVLAVVCLSFNIYNSHVRYIQNSQPNLNNLTAVGCSLALAAVFPLGLDGYHIGRNQFPFVCQARLWLLGLGFSLGYGSMFTKIWWVHTVFTKKEEKKEWRKTLEPWKLYATVGLLVGMDVLTLAIWQIVDPLHRTIETFAKEEPKEDIDVSILPQLEHCSSRKMNTWLGIFYGYKGLLLLLGIFLAYETKSVSTEKINDHRAVGMAIYNVAVLCLITAPVTMILSSQQDAAFAFASLAIVFSSYITLVVLFVPKMRRLITRGEWQSEAQDTMKTGSSTNNNEEEKSRLLEKENRELEKIIAEKEERVSELRHQLQSRQQLRSRRHPPTPPEPSGGLPRGPPEPPDRLSCDGSRVHLLYK

SEQ ID NO: 18227 - protein, 931 aa, Homo sapiens
MLLLLLLAPLFLRPPGAGGAQTPNATSEGCQIIHPPWEGGIRYRGLTRDQVKAINFLPVDYEIEYVCRGEREVVGPKVRKCLANGSWTDMDTPSRCVRICSKSYLTLENGKVFLTGGDLPALDGARVDFRCDPDFHLVGSSRSICSQGQWSTPKPHCQVNRTPHSERRAVYIGALFPMSGGWPGGQACQPAVEMALEDVNSRRDILPDYELKLIHHDSKCDPGQATKYLYELLYNDPIKIILMPGCSSVSTLVAEAARMWNLIVLSYGSSSPALSNRQRFPTFFRTHPSATLHNPTRVKLFEKWGWKKIATIQQTTEVFTSTLDDLEERVKEAGIEITFRQSFFSDPAVPVKNLKRQDARIIVGLFYETEARKVFCEVYKERLFGKKYVWFLIGWYADNWFKIYDPSINCTVDEMTEAVEGHITTEIVMLNPANTRSISNMTSQEFVEKLTKRLKRHPEETGGFQEAPLAYDAIWALALALNKTSGGGGRSGVRLEDFNYNNQTITDQIYRAMNSSSFEGVSGHVVFDASGSRMAWTLIEQLQGGSYKKIGYYDSTKDDLSWSKTDKWIGGSPPADQTLVIKTFRFLSQKLFISVSVLSSLGIVLAVVCLSFNIYNSHVRYIQNSQPNLNNLTAVGCSLALAAVFPLGLDGYHIGRNQFPFVCQARLWLLGLGFSLGYGSMFTKIWWVHTVFTKKEEKKEWRKTLEPWKLYATVGLLVGMDVLTLAIWQIVDPLHRTIETFAKEEPKEDIDVSILPQLEHCSSRKMNTWLGIFYGYKGLLLLLGIFLAYETKSVSTEKINDHRAVGMAIYNVAVLCLITAPVTMILSSQQDAAFAFASLAIVFSSYITLVVLFVPKMRRLITRGEWQSEAQDTMKTGSSTNNNEEEKSRLLEKENRELEKIIAESGGLPRGPPEPPDRLSCDGSRVHLLYK

SEQ ID NO: 18228 - protein, 578 aa, Homo sapiens
MLLLLLLAPLFLRPPGAGGAQTPNATSEGCQIIHPPWEGGIRYRGLTRDQVKAINFLPVDYEIEYVCRGEREVVGPKVRKCLANGSWTDMDTPSRCVRICSKSYLTLENGKVFLTGGDLPALDGARVDFRCDPDFHLVGSSRSICSQGQWSTPKPHCQVNRTPHSERRAVYIGALFPMSGGWPGGQACQPAVEMALEDVNSRRDILPDYELKLIHHDSKCDPGQATKYLYELLYNDPIKIILMPGCSSVSTLVAEAARMWNLIVLSYGSSSPALSNRQRFPTFFRTHPSATLHNPTRVKLFEKWGWKKIATIQQTTEVFTSTLDDLEERVKEAGIEITFRQSFFSDPAVPVKNLKRQDARIIVGLFYETEARKVFCEVYKERLFGKKYVWFLIGWYADNWFKIYDPSINCTVDEMTEAVEGHITTEIVMLNPANTRSISNMTSQEFVEKLTKRLKRHPEETGGFQEAPLAYDAIWALALALNKTSGGGGRSGVRLEDFNYNNQTITDQIYRAMNSSSFEGVSGHVVFDASGSRMAWTLIEQLQGGSYKKIGYYDSTKDDLSWSKTDKWIVISRTHSPT

SEQ ID NO: 18229 - protein, 416 aa, Homo sapiens
MNLPRAERPRSTPQRSLRDSDGEDGKIDVLGEEEDEDEVEDEEEEARQQFLEQSLQPGLQVARWGGVALPREHIEGGGGPSDPSEFGTKFRAPPRSAAASEDARQPAKPPYSYIALITMAILQNPHKRLTLSGICAFISGRFPYYRRKFPAWQNSIRHNLSLNDCFVKIPREPGHPGKGNYWSLDPASQDMFDNGSFLRRRKRFKRHQLTPGAHLPHPFPLPAAHAALHNPHPGPLLGAPAPPQPVPGAYPNTAPGRRPYALLHPHPLRYLLLSARVYAGAPKKAEGADLATPAPFPCCSPHLVLSLGRRARVWRRHREADASLSALRVLCKGSGERVQGLRRVCPRPRGATATCSSDHQACCIPKPLPLCCKCPPPLLLGQFCSNSSSIRRTAPTAALPPRARCWAGTCRPRRRC

SEQ ID NO: 18230 - protein, 1045 aa, Homo sapiens
MEAKVRPSRRSRAQRDRGRRREAARDARAQSPSSGDEPEPSPGKENAGLRGAPPRGAAPAPRTARPPRRRRRESSSQEEEVIDGFAIASFSTLEALEKDMALKPHERKEKWERRLIKKPRESETCPPAEPSENRRPLEAGSPGQDLEPACDGARKVPLQPSKQMKVTVSKGGDRDSDDDSVLEATSSRDPLSDSSAHAVSGRGYSCDSESGPDDKASVGSEKLFAPGTDKGPALEKSEAKAGPVPKVSGLERSRELSAESFLPTASPAPHAAPCPGPPPGSRANPLVKKEPPAPHRHTPQPPPPQPRGLLPTHVPASLGAFAGHSQAAANGLHGLSRSSSAPLGLGKHVSLSPHGPGPHLSTSHLALRSQAQHQLHAAMFAAPPTLPPPPALPASSLVLPGHPADHELLRQELNTRFLVQSAERPGASLGPGALLRAEFHQHQHTHQHTHQHTHQHQHTFAPFPAGLPPTPPAAPPPFDKYAPKLDSPYFRHSSVSFFPSFPPAIPGLPTLLPHPGPFGSLQGAFQPKVSDPYRAVVKVSTCWEGPWQGRTLVPPGRPRGARDSRSLQKTWVGVAPAPLSASILSQKPGRWCAVHVQIAWQIYRHQQKIKEMQLDPHKLEVGAKLDLFGRPPAPGVFAGFHYPQDLARPLFPSTGAAHPASNPFGPSAHPGSFLPTGPLTDPFSRPSTFGGLGSLSSHAFGGLGSHALAPGGSIFAPKEGSSVHGLPSPHEAWNRLHRAPPSFPAPPPWPKSVDAERVSALTNHDREPDNGKEEQERDLLEKTRLLSRASPATPAGHPVSGLLLRAQSELGRSGAPAEREAEPRVKESRSPAKEEAAKMPARASPPHSKAAPGDVKVKEERGEDEASEPPAGGLHPAPLQLGLGRERLGAPGFAWEPFRGLELPRRAFPAAAPAPGSAALLEPPERPYRDREPHGYSPERLRGELERARAPHLPPAAPALDGALLPSLGALHFPRLSPAALHNGLLARTPPAAAALGAPPPLVTAAGPPTPPGPPRSRTTPLGGLGPGEARDYSPSRNPPEVEAR

SEQ ID NO: 18231 - protein, 492 aa, Homo sapiens
MGSCCSCLNRDSVPDNHPTKFKVTNVDDEGVELGSGVMELTQSELVLHLHRREAVRWPYLCLRRYGYDSNLFSFESGRRCQTGQGIFAFKCSRAEEIFNLLQDLMQCNSINVMEEPVIITRNSHPAELDLPRAPQPPNALGYTVSSFSNGCPGEGPRFSAPRRLSTSSLRHPSLGEESTHALIAPDEQSHTYVNTPASEDDHRRGRHCLQPLPEGQAPFLPQARGPDQRDPQVFLQPGQVKFVLGPTPARRHMVKCQGLCPSLHDPPHHNNNNEAPSECPAQPKCTYENVTGGLWRGAGWRLSPEEPGWNGLAHRRAALLHYENLPPLPPVWESQAQQLGGEAGDDGDSRDGLTPSSNGFPDGEEDETPLQKPTSTRAAIRSHGSFPVPLTRRRGSPRVFNFDFRRPGPEPPRQLNYIQVELKGWGGDRPKGPQNPSSPQAPMPTTHPARSSDSYAVIDLKKTVAMSNLQRALPRDDGTARKTRHNSTDLPL

SEQ ID NO: 18232 - protein, 1810 aa, Homo sapiens
METLDSQRVQDRLLAAPGCSSPSGQQELFSSHVMQEESANDMECEQLPAEILRQVTVHRDPIYGFGFVAGSERPVVVRSVRPGGPSENKLLAGDQIVAINEEDVSEAPRERLIELIRSAKEFIVLTVLHTHQSPKSAFISAAKKAKLRSNPVKVRFSEQVAVGETDAKMMKKEALLLIPNVLKVFLENGQIKSFTFDGRTTVKDVMLTLQDRLSLRFIEHFALVLEYAGPEQNHKFLLLQDKQPLAYVVQRTHYHGMKCLFRISFFPKDPVELLRRDPAAFEYLYIQSRNDVIRERFGMDPKPEMLLGLAALHIYITVSATRPSQKISLKNVEKEWGLEPFLPPSLLQVIKEKNLRKSLSQQLKAHQTHPSCGTKGSAIQAKLQYLRILNELPTFTGVLFNTVGLDEKQSATTLLVGPRHGISHVIDLKTNLTTVLSEFSKISKIQLFRENQGVARVETSIMDAKPLVLLMEWPEATNFACLIAGYCRLLLDSRKMVFSRPASQPLPPPMIKADYMHSAHRPVTGGHLGKKESSYVGSVGTSPRKSSRCTPPPADSELVSFCYLHMREQRKEQESRTDVNENLIFFEETRPRTKSDPTSKSSGQGYEVVPDDFDAASLDHEPCASRARSYTLDNSLGAEALNFYCDSCKAKLQEQLGPRKGGKPGSSRDNIVDLMSLPPPGSEEEEEEEDETTSLLPAIAAPPPGFRDNSSDEDDPKRRAVQSQEQGRHLRGLLYDEIPVTLIDSVQTRTVRDHAQELDDALVSTLQALEALAASEDGPHPPPPQTAGLIVLATITPESSLDSGHETNSSELTDMSEMMSAMKQHQNTTYFLAQHLNKDSLLARKDLPFRIQSCAAQAVLTAPYSLGRPDPNPSLQPIATGQSPGPPGARRKLPQSEGQVQGERTYSLAVHPALSPQLSEQKNLSLLSPVPEDKGPGHTRAGLEMSLRAATSSLSEEQVSELRDNLPKEVRLSPKLILDPKSSVTPAIISAALQQVVHNKSLVTAGGALGNPPSRGERRLEASMGRPEVSMMSSSASKNLKFKISPSAPETSWNSQHQLGAEVSSSPRAPTGSRADSLHLSQQEDSLPVQNFPPKSYLLRTSRESVGKQATGEVAGKGGPVGGKPTLQKQGTISSQGEKAQLESTPKRSKLEETSLVPRATYPMALQSPSCQSRSHSPSCQPHGHSPSSQSRGQSPSCQPRGQSPLRSQAASRQVSTMPSRKLETTLNGAHSTSEGPAKPKSSRGPFRLRNLFSATFPTRQKKETDERQAQLQKVKQYELEFLEELLKPPSQGELPGTEYLQPPAPGRCSCQLRSSPVQQGPGMSREQRRSCDCKRICRGGRPQATQTPVPSLRGRERDRVLPSQRQPEAGPGVSLSSPINVQRIRSTSLESRECRSDPESGVSCLTTCASGGECLGAPNYRKLMRRYSISELDQGDRASLTSDVYPHPPLGMLPREAKEVEASLPIALGPKSRSLESPTLGDPSYVQVAPETKGPRQMAVFSLPEEVYRKPAELDEDSESSKCCSIRYCFYYRKCDMADDASDGKDELSYSIPMKILPGMKLDEQVVPVVSRTLQVLDAATCSSSSPEASRTQEIDLRVSTFEGSLAKINALRAHAYGLPDGFLAARLDTNELLTVLRQCVASPEARAPKPYVSQISEYKLELALKFKELRASCRRVANVDKSPTHMLAAITGSFQVLSSLIETFVRLVFIVRSEAQRQELLAKVEEVVRNYTFLLRAAEESTARNLNQQQQQQQQQQQQQQQQQQQQQQQQQQQVAAAAGAATEHPPGSPTSATVMSTFTHSLKTLIK

SEQ ID NO: 18233 - protein, 326 aa, Homo sapiens
MYQDYPGNFDTSSRGSSGSPAHAESYSSGGGGQQKFRVDMPGSGSAFIPTINAITTSQDLQWMVQPTVITSMSNPYPRSHPYSPLPGLASVPGHMALPRPGVIKTIGTTVGRRRRDEQLSPEEEEKRRIRRERNKLAAAKCRNRRRELTEKLQAETEELEEEKSGLQKEIAELQKEKEKLEFMLVAHGPVCKISPEERRSPPAPGLQPMRSGGGSVGAVVVKQEPLEEDSPSSSSAGLDKAQRSVIKPISIAGGFYGEEPLHTPIVVTSTPAVTPGTSNLVFTYPSVLEQESPASPSESCSKAHRRSSSSGDQSSDSLNSPTLLAL

SEQ ID NO: 18234 - protein, 318 aa, Homo sapiens
MVQGWRIKSKFRVDMPGSGSAFIPTINAITTSQDLQWMVQPTVITSMSNPYPRSHPYSPLPGLASVPGHMALPRPGVIKTIGTTVGRRRRDEQLSPEEEEKRRIRRERNKLAAAKCRNRRRELTEKLQAIGPWQVAVPHIPLFPWQETEELEEEKSGLQKEIAELQKEKEKLEFMLVAHGPVCKISPEERRSPPAPGLQPMRSGGGSVGAVVVKQEPLEEDSPSSSSAGLDKAQRSVIKPISIAGGFYGEEPLHTPIVVTSTPAVTPGTSNLVFTYPSVLEQESPASPSESCSKAHRRSSSSGDQSSDSLNSPTLLAL

SEQ ID NO: 18235 - protein, 287 aa, Homo sapiens
MPGSGSAFIPTINAITTSQDLQWMVQPTVITSMSNPYPRSHPYSPLPGLASVPGHMALPRPGVIKTIGTTVGRRRRDEQLSPEEEEKRRIRRERNKLAAAKCRNRRRELTEKLQAETEELEEEKSGLQKEIAELQKEKEKLEFMLVAHGPVCKISPEERRSPPAPGLQPMRSGGGSVGAVVVKQEPLEEDSPSSSSAGLDKAQRSVIKPISIAGGFYGEEPLHTPIVVTSTPAVTPGTSNLVFTYPSVLEQESPASPSESCSKAHRRSSSSGDQSSDSLNSPTLLAL

SEQ ID NO: 18236 - protein, 749 aa, Homo sapiens
MEEESGEELGLDRSTPKDFHFYHMDLYDSEDRLHLFPEENTRMRKVVQAEMANESRGAGDGKAQRDLQEEVDELVHLYGLEDDHELGDEFVDENIPRTGVSEYPPYMMKRRDPAREQRDWRLSGEAAEAEDLGFGGWGSAGQCQDLREAYRYTHGRASEEYECYVIPEEEDEEEAADVFCVTCKTPIRAFQKVFDEHKEHEVIPLNEALESAKDEIHKNMYKLEKQIIEMENFANHLEEVFITVEENFGKQEQNFESHYNEILETLAQKYEEKIQALGEKKKEKLEALYGQLVSCGENLDTCKELMETIEEMCHEEKVDFIKDAVAMADRLGKFLKTKTDVEISAQPEFEDQTLDFSDVEQLMGSINTIPAPSAPVINPQVPNSATGSSVRVCWSLYSDDTVESYQLSYRPVQDSSPGTDQAEFTVTVKETYCSVTNLVPNTQYEFWVTAHNRAGPSPSSERAVYMTAPSPPIIKTKEIRSCEEAVLICWESGNLNPVDSYTVELTQAESPEASGVTESVVGIPTCESVVQLQPGRSYIIYVRALNMGGPSVRSEPATVHTIGSYFRLNKDTCHPWLTISEDGLTAVRSERRTPARELSPSDTHFTRCVAVMGNLIPVRGHHYWEVEVDEHLDYRVGVAFADVRKQEDLGANCLSWCMRHTFASSRHKYEFLHNRTTPDIRITVPPKKIGILLDYEHSKLSFFNVDLSQHLYTFSCQLHEFVHPCFSLEKPGCLKVHNGISMPKHVTFY

SEQ ID NO: 18237 - protein, 704 aa, Homo sapiens
MEEESGEELGLDRSTPKDFHFYHMDLYDSEDRLHLFPEENTRMRKVVQAEMANESRGAGDGKAQRDLQEEVDELVHLYGLEDDHELGDEFVDENIPRTGVSEYPPYMMKRRDPAREQRDWRLSGEAAEAEDLGFGGWGSAGQCQDLREAYRYTHGRASEEYECYVIPEEEDEEEAADVFCVTCKTPIRAFQKVFDEHKEHEVIPLNEALESAKDEIHKNMYKLEKQIIEMENFANHLEEVFITVEENFGKQEQNFESHYNEILETLAQKYEEKIQALGEKKKEKLEALYGQLVSCGENLDTCKELMETIEEMCHEEKVDFIKDAVAMADRLGKFLKTKTDVEISAQPEFEDQTLDFSDVEQLMGSINTIPAPSAPVINPQVPNSATGSSVRVCWSLYSDDTVESYQLSYRPVQDSSPGTDQAAPSPPIIKTKEIRSCEEAVLICWESGNLNPVDSYTVELTQAESPEASGVTESVVGIPTCESVVQLQPGRSYIIYVRALNMGGPSVRSEPATVHTIGSYFRLNKDTCHPWLTISEDGLTAVRSERRTPARELSPSDTHFTRCVAVMGNLIPVRGHHYWEVEVDEHLDYRVGVAFADVRKQEDLGANCLSWCMRHTFASSRHKYEFLHNRTTPDIRITVPPKKIGILLDYEHSKLSFFNVDLSQHLYTFSCQLHEFVHPCFSLEKPGCLKVHNGISMPKHVTFY

SEQ ID NO: 18238 - protein, 278 aa, Homo sapiens
MGKGNEDPDLHCSSIQCSTDQPPFQQISFTEKGSDEKKPFKEKGKTAFSHSSEKHIQRQGSEPNPNKENSEETKLKAGNSTAGSEPESSSYRENCRKRKMSSKDSCQDTAGNCPEKECSLSLNKKSRSSTPVHNSEIQETCDAHHRGRSRACTGRSKRHRSRALGVQTPSIRKSLVTSVRAMSEAVYQDLAQVWAQQIHSPLTCEQLTLLTRLRGPLCAQVQTLYSMATQAAYVFPAESWLVPATLPGPGESALDREAHPFPGQEITETVSGSDEAKL

SEQ ID NO: 18239 - protein, 478 aa, Homo sapiens
MTLSGGGSASDMSGQTVLTAEDVDIDVVGEGDDGLEEKDSDAGCDSPAGPPELRLDEADEVPPAAPHHGQPQPPHQQPLTLPKEAAGAGAGPGGDVGAPEADGCKGGVGGEEGGASGGGPGAGSGSAGGLAPSKPKNSLVKPPYSYIALITMAILQSPQKKLTLSGICEFISNRFPYYREKFPAWQNSIRHNLSLNDCFVKIPREPGNPGKGNYWTLDPQSEDMFDNGSFLRRRKRFKRHQQEHLREQTALMMQSFGAYSLAAAAGAAGPYGRPYGLHPAAAAGAYSHPAAAAAAAAAAALQYPYALPPVAPVLPPAVPLLPSGELGRKAAAFGSQLGPGLQLQLNSLGAAAAAAGTAGAAGTTASLIKSEPSARPSFSIENIIGGGPAAPGGSAVGAGVAGGTGGSGGGSTAQSFLRPPGTVQSAALMATHQPLSLSRTTATIAPILSVPLSGQFLQPAASAAAAAAAAAQAKWPAQ

SEQ ID NO: 18240 - protein, 879 aa, Homo sapiens
MGRLASRPLLLALLSLALCRGRVVRVPTATLVRVVGTELVIPCNVSDYDGPSEQNFDWSFSSLGSSFVELASTWEVGFPAQLYQERLQRGEILLRRTANDAVELHIKNVQPSDQGHYKCSTPSTDATVQGNYEDTVQVKVLADSLHVGPSARPPPSLSLREGEPFELRCTAASASPLHTHLALLWEVHRGPARRSVLALTHEGRFHPGLGYEQRYHSGDVRLDTVGSDAYRLSVSRALSADQGSYRCIVSEWIAEQGNWQEIQEKAVEVATVVIQPSVLRAAVPKNVSVAEGKELDLTCNITTDRADDVRPEVTWSFSRMPDSTLPGSRVLARLDRDSLVHSSPHVALSHVDARSYHLLVRDVSKENSGYYYCHVSLWAPGHNRSWHKVAEAVSSPAGVGVTWLEPDYQVYLNASKVPGFADDPTELACRVVDTKSGEANVRFTVSWYYRMNRRSDNVVTSELLAVMDGDWTLKYGERSKQRAQDGDFIFSKEHTDTFNFRIQRTTEEDRGNYYCVVSAWTKQRNNSWVKSKDVFSKPVNIFWALEDSVLVVKARQPKPFFAAGNTFEMTCKVSSKNIKSPRYSVLIMAEKPVGDLSSPNETKYIISLDQDSVVKLENWTDASRVDGVVLEKVQEDEFRYRMYQTQVSDAGLYRCMVTAWSPVRGSLWREAATSLSNPIEIDFQTSGPIFNASVHSDTPSVIRGDLIKLFCIITVEGAALDPDDMAFDVSWFAVHSFGLDKAPVLLSSLDRKGIVTTSRRDWKSDLSLERVSVLEFLLQVHGSEDQDFGNYYCSVTPWVKSPTGSWQKEAEIHSKPVFITVKMDVLNAFKYPLLIGVGLSTVIGLLSCLIGYCSSHWCCKKEVQETRRERRRLMSMEMD

SEQ ID NO: 18241 - protein, 2139 aa, Homo sapiens
MAGASRHPTGTPRQLLVALACLLLSRPALQGRASSLGTEPDPALYLPARGALDGTRPDGPSVLIANPGLRVPLGRSLWLDPLRDLVIGVQPGDRCEVTVLDALPRLKGALSPRRFPCTFGPRQVQYTHFGSHSPGRARVLLQLRYDAPTHTLVLPFTLAVDLVFSQLELVTRNRPLVVEKLRSWSRAIDRRVLDFASLKSGATATRRCRLTPLPHEDGPLPKYGRLVDAVGAPLPRGKGVDCEAFLRAGVRYQHTATSSPNRDYVPMMVELLGPEGQDAGSAGVLVREHFQLLVRIRGGAENTPPRPSFMATMMMEVDPLVLTALTPDALAAEDVESDPGDLVFNILNAPTHPPGHPGQQGYVVSTDDPLGLPVSFFTQQELRELKIAYQPPAENSHGERLFQLELEVVDGDGAASDPFAFMVTVKSMNTLVPVASHNRGLVLFEGQSRPLSSTHSIPISDKDNLEEVKMAAVRGLRHGQLVVFGAPAGCKYFTPADLAAGRVVYQHDGSNTYSDNIIFRMEDGHHQVDFLFPLTILPVDDEPPMVNTNTGLSLTEGQVVQISPFVLSATDIDSEDSTIHFVLENQPLKGNEEEPQWELAPGSSHSGHYLGDLLLQQAELPLSTEDEDWHYMEKEGLYEKVVTEWLQRDIMEGRLFYRHLGPHSPQSVMVQLAFHVQDDHDPPNLSKQHIFTIKVQPVDILSPQLYPGTTLEMTVQEYQLTHFQKNFLRYIDQDSDDQNLWYTLLTLPTDTDGNHQVRAGEIVLTDSPDTLIMHFTQAQVNQHKVAYQPPQKLGIAPRVVQFTYQVEDAAGNSVPGTFTLFLQPVDNQPPEVTNRGFAILEGGSFNLSSNELHVTDPDTDIDQIVFILVRGPQHGHLQYFKRCMVPGESFMQADVINGSVSYQHGRDQTTTSDTFHLEVSDGVHHIPITIPISVHPNVANRSPRISLRSSSLLDVSIDVLENKATEITMGVIHGKRKDVGDLMLSFIVKDSPKLGTILVNGLPTERFTQEDLINGRVAYAHTAGEVGFQKQHDAFSLILSKDSYQWVVGNSIIEKVQVQVTVLPVDNVGPKVFVGESFIVYEGEKNSLTLQHLHVEDVDTHQDELLCTVTSQPASGYLEKIASAPGSKMSQSGSPISAFSLRDIQVRHINYVQSIHKGVEPQEDQFTFYCSDGINFSPNVFFPIIILPTNDEQPKLFAHEFKVLEGMSLVIDTQLLNGADADLPPNELHFQLTALPRHGRIIQQLATGSQPIHSFTLKEIQEASTIVYEHDDSETKEDSFEVWLSDGKHTTHRKVPIVVTLVDDETPHLTVNNGLKVEKGHSEIITNRILKATDLDSDDKSLSFVLHSGPQQGLLQRLRKPRGEVRNNLTLGMNFTQDEINRGLICYIHTGQEGIVDIIKFDVTDGVNTLTDHYFYVTIGNLDSVFPEVISKRITLIEGARVTLTNNLLTNSDINSSDEHHFSITRAPSLGHLESSDYAGEPIASFTQLQLASNKISYVHTSNDEKKMDSFEFQVIGELYPVFRTFRIFITDVDNKKPILTIHRLTLQKEDSQLITLLELTVEDSDTPDDLILFTITQVPMHGKILYNGSRPVTTFTKQDLNKNLISYKHDGSETTEDSFSLTVTDGTHTDFYVLPDTALATHKPQVMRVQIRSLDNRLPQITTNRGAPALKRLHTGHMGFLITSKSLKAEDQDSPHRLLKYKVTRGPEHGFIIKTGLGNQSTRVFTQADIDEMKISYVLNEGSNASKDIFYFSVEDNGGNKLTNQPFHLNWAWICLEKEYYIVDEDSTFLEVTLTRRGYLGETSFISIGTKDETAKKDKDFKWKTNKQIQFNPGQTTATWRVRIIPDNEYETSETFQIILSEPLMAVLEFPEMATVEIVDPGDESTVYIPEAEYKIEEDIGELLIPVRRSGDASQELIVICSTRQGSATGTISSTVLFSDYISRPEDHTSILHFDKNETQKTCQVLIIDDSLYEEEESFSVSLRLPVGGQLGARFPTTKVTILADRYDEPVLHFGDAEYHVNESARYVEVCVWRRGTDLSQPSSIAVRSRKSEQESAEAGTDYVGISRNLDFAPGVRMQTFQVTILDDLGQPTLEGPEKFELLLQMPMGAVLGEPNKTTIFIEDTITDCKQSACSSFD

SEQ ID NO: 18242 - protein, 353 aa, Homo sapiens
METNFSIPLNETEEVLPEPAGHTVLWIFSLLVHGVTFVFGVLGNGLVIWVAGFRMTRTVNTICYLNLALADFSFSAILPFRMVSVAMREKWPFGSFLCKLVHVMIDINLFVSVYLITIIALDRCICVLHPAWAQNHRTMSLAKRVMTGLWIFTIVLTLPNFIFWTTISTTNGDTYCIFNFAFWGDTAVERLNVFITMAKVFLILHFIIGFSVPMSIITVCYGIIAAKIHRNHMIKSSRPLRVFAAVVASFFICWFPYELIGILMAVWLKEMLLNGKYKIILVLINPTSSLAFFNSCLNPILYVFMGRNFQERLIRSLPTSLERALTEVPDSAQTSNTDTTSASPPEETELQAM

SEQ ID NO: 18243 - protein, 378 aa, Homo sapiens
MSSFDLPAPSPPRCSPQFPSIGQEPPEMNLYYENFFHPQGVPSPQRPSFEGGGEYGATPNPYLWFNGPTMTPPPYLPGPNASPFLPQAYGVQRPLLPSVSGLGGSDLGWLPIPSQEELMKLVRPPYSYSALIAMAIHGAPDKRLTLSQIYQYVADNFPFYNKSKAGWQNSIRHNLSLNDCFKKVPRDEDDPGKGNYWTLDPNCEKMFDNGNFRRKRKRKSDVSSSTASLALEKTESSLPVDSPKTTEPQDILDGASPGGTTSSPEKRPSPPPSGAPCLNSFLSSMTAYVSGGSPTSHPLVTPGLSPEPSDKTGQNSLTFNSFSPLTNLSNHSGGGDWANPMPTNMLSYGGSVLSQFSPHFYNSVNTSGVLYPREGTEV

SEQ ID NO: 18244 - protein, 283 aa, Homo sapiens
MSSFDLPAPSPPRCSPQFPSIGQEPPEMNLYYENFFHPQGVPSPQRPSFEGGGEYGATPNPYLWFNGPTMTPPPYLPGPNASPFLPQAYGVQRPLLPSVSGLGGSDLGWLPIPSQEELMKLVRPPYSYSALIAMAIHGAPDKRLTLSQIYQYVADNFPFYNKSKAGWQNSIRHNLSLNDCFKKVPRDEDDPAYVSGGSPTSHPLVTPGLSPEPSDKTGQNSLTFNSFSPLTNLSNHSGGGDWANPMPTNMLSYGGSVLSQFSPHFYNSVNTSGVLYPREGTEV

SEQ ID NO: 18245 - protein, 233 aa, Homo sapiens
MPCRREEEEEAGEEAEGEEEEDDSFLLLQQSVTLGSSGEVDRLVAQIGETLQLDAAQDSPASPCAPPGVPLRAPGPLAAAVPADKARPPAVPLLLPPASAETVGPAPSGALRCALGDRGRVRGRAAPYCVAEVAAGPSALPGPCRRGWLRDAVTSRRLQQRRWTQAGARAGDDDPHRLLQQLVLSGNLIKEAVRRLQRAVAAVAATGPASAPGPGGGRSGPDRIALQPSGSLL

SEQ ID NO: 18246 - protein, 2057 aa, Homo sapiens
MLRLVVQSAKIDPPLAPLPRPCMSIDFRDIKKRTRVVEGNDPVWNETLIWHLWNRPLENDSFLQVTLQDMGSQKKERFIGLATVLLKPLLKQPSEVLFVKDLTLLNHSMKPTDCTVTLQVAHMSNQDIEKTGAEDHLGITAREAASQKLMVPGSTAHRALSSKPQHFQVRVKVFEARQLMGNNIKPVVKVSIAGQQHQTRIKMGNNPFFNEIFFQNFHEVPAKFFDETILIQVVNSSAMRYKAEIGRFQTDIGFIYHSPGHTLLRKWLGLCQPNNPGSGVTGYLKVTIYALGVGDQALIDQKLLYGTDDTDIQIFKSAVVPINMAYLQLFIYCAEDLHLKKHQSVNPQLEVELIGEKLRTHMQTQTDNPIWNQILTFRIQLPCLSSYIKFRVLDCRKKDCPDEIGTASLSLNQISSTGEEIEGVYSGFLPCFGPSFLTLHGGKKAPFRIQEEGACIPDSVRDGLAYRGRVFLELITQIKSYQDSTIKDLSHEVTRIEKHQNRQKYGLCVIFLSCTMMPNFKELIHFEVSIGHYGNKMDLNYKPLVSSTPYSPVIYDGNIYHYVPWYNTKPVVAVTSNWEDVSFRMNCLNLLHFTRDRLKANLDTLKSTRNPKDPALLYQWEKLLRELAEDCKRPLPCMTYQPKATSLDRKRWQLRSLLLQELAQKAKQAKPKDMVATAEDWLYRLNTVLPEPQMGLPDVMIWLVAKEQRVAYAQVPAHSVLFSPAGALHSGRLCGKIQTLFLQYPEGEGQKDVLPAHLRVCMWLGNVTDSKDLQLLRQGDTAVYAEMYENQAKYKDQWGQQGLYHCPNFSDVMGNKTLPMTDFQPPLGWHWQDSWTVEPQRRLLLDIDINKSQVLEEVYENQGRDTRGAWGPAAIPNTDVNGQPMEARENVKCPQGWHFKKDWVVELNHAVDSKGWEYGVGIPPSGLPQVWSPVEKTYHSCRRRRWARVRFRNHGELSHEQETLSFLQLGLAKGEEEGWEYDTFGSKFHLNPQPQSRFRRRCWRRRLAPNKDKGIAPIFLLEGSLAMDLKYHAGKEEDSKTWPWGLDRQFRDPQRQDTRPPNLPFIYCTFNKPHYYQLFCYIYQARNLVSNQILTFQGPFIRVVFLNHSQCTQTLRSSAGPTWAQTLIFQHLLLYENPQDTKESPPLVVLELWQRDFWGKESLWGRSVWPPMVWLDLQDRILPPMRWHPLVKELGKEEGEILASCELILQTEKLGEKQLPILSVPWKNGAYTLPKSIQPTIKRMAIEILAWGLRNMKKASSPQLLVEFGEESLRTEPIRDFQTNPNFPESESVLVLTVLMPTEEAYALPLVVKVVDNWAFGQQTVTGQANIDFLQPYFCDPWAQDYMHPKLPTLSEKKHQDFLGYLYRKFWFKSSKAEDEYEHEVDWWSKLFWATDEHKSLKYKYKDYHTLKVYECELEAVPAFQGLQDFCQTFKLYQEQPKLDSPVVGEFKGLFRIYPFPENPEAPKPPLQFLVWPEREDFPQPCLVRVYMVRAINLQPQDYNGLCDPYVILKLGKTELGNRDMYQPNTLDPIFGMMFELTCNIPLEKDLEIQLYDFDLFSPDDKIGTTVIDLENRLLSGFGAHCGLSKSYCQSGPFRWRDQMPPSYLLERYAKRKGLPPPLFSPEEDAVFYNGKKFKLQSFEPKTPTVHGLGPKKERLALYLLHTQGLVPEHVETRTLYSHSQPGIDQGKVQMWVDIFPKKLGPPGPQVNINPRKPKRYELRCIIWKTANVDLVDDNLSREKTSDIYIKGWLYGLEKDMQKTDIHYHSLTGEADFNWRFIFTMDYLAAERTCVQSQKDYIWSLDATSMKFPARLIIQVWDNDIFSPDDFLGVLELDLSDMPLPARHAKQCSIRMMDADPKWPYFIQYKHFSLFKKKTVTGWWPCQVLDGGKWRLSGKVKMSLEILSEKEALIKPAGRGQSEPNQYPTLHPPLRTNTSFTWLRSPVQNFCYIFWKRYRFKLIAFMVISIIALMLFNFIYSAPHYLAMSWIKPQLQLYPPIKIFNIINSLNTSNASSSILPTQDPNLKPTIDHEWKLHPGPTNHLSDIFPELPAPGD

SEQ ID NO: 18247 - protein, 802 aa, Homo sapiens
MKKASSPQLLVEFGEESLRTEPIRDFQTNPNFPESESVLVLTVLMPTEEAYALPLVVKVVDNWAFGQQTVTGQANIDFLQPYFCDPWAQDYMHPKLPTLSEKKHQDFLGYLYRKFWFKSSKAEDEYEHEVDWWSKLFWATDEHKSLKYKYKDYHTLKVYECELEAVPAFQGLQDFCQTFKLYQEQPKLDSPVVGEFKGLFRIYPFPENPEAPKPPLQFLVWPEREDFPQPCLVRVYMVRAINLQPQDYNGLCDPYVILKLGKTELGNRDMYQPNTLDPIFGMMFELTCNIPLEKDLEIQLYDFDLFSPDDKIGTTVIDLENRLLSGFGAHCGLSKSYCQSGPFRWRDQMPPSYLLERYAKRKGLPPPLFSPEEDAVFYNGKKFKLQSFEPKTPTVHGLGPKKERLALYLLHTQGLVPEHVETRTLYSHSQPGIDQGKVQMWVDIFPKKLGPPGPQVNINPRKPKRYELRCIIWKTANVDLVDDNLSREKTSDIYIKGWLYGLEKDMQKTDIHYHSLTGEADFNWRFIFTMDYLAAERTCVQSQKDYIWSLDATSMKFPARLIIQVWDNDIFSPDDFLGVLELDLSDMPLPARHAKQCSIRMMDADPKWPYFIQYKHFSLFKKKTVTGWWPCQVLDGGKWRLSGKVKMSLEILSEKEALIKPAGRGQSEPNQYPTLHPPLRTNTSFTWLRSPVQNFCYIFWKRYRFKLIAFMVISIIALMLFNFIYSAPHYLAMSWIKPQLQLYPPIKIFNIINSLNTSNASSSILPTQDPNLKPTIDHEWKLHPGPTNHLSDIFPELPAPGD

SEQ ID NO: 18248 - protein, 801 aa, Homo sapiens
MKKASSPQLLVEFGEESLRTEPIRDFQTNPNFPESESVLVLTLMPTEEAYALPLVVKVVDNWAFGQQTVTGQANIDFLQPYFCDPWAQDYMHPKLPTLSEKKHQDFLGYLYRKFWFKSSKAEDEYEHEVDWWSKLFWATDEHKSLKYKYKDYHTLKVYECELEAVPAFQGLQDFCQTFKLYQEQPKLDSPVVGEFKGLFRIYPFPENPEAPKPPLQFLVWPEREDFPQPCLVRVYMVRAINLQPQDYNGLCDPYVILKLGKTELGNRDMYQPNTLDPIFGMMFELTCNIPLEKDLEIQLYDFDLFSPDDKIGTTVIDLENRLLSGFGAHCGLSKSYCQSGPFRWRDQMPPSYLLERYAKRKGLPPPLFSPEEDAVFYNGKKFKLQSFEPKTPTVHGLGPKKERLALYLLHTQGLVPEHVETRTLYSHSQPGIDQGKVQMWVDIFPKKLGPPGPQVNINPRKPKRYELRCIIWKTANVDLVDDNLSREKTSDIYIKGWLYGLEKDMQKTDIHYHSLTGEADFNWRFIFTMDYLAAERTCVQSQKDYIWSLDATSMKFPARLIIQVWDNDIFSPDDFLGVLELDLSDMPLPARHAKQCSIRMMDADPKWPYFIQYKHFSLFKKKTVTGWWPCQVLDGGKWRLSGKVKMSLEILSEKEALIKPAGRGQSEPNQYPTLHPPLRTNTSFTWLRSPVQNFCYIFWKRYRFKLIAFMVISIIALMLFNFIYSAPHYLAMSWIKPQLQLYPPIKIFNIINSLNTSNASSSILPTQDPNLKPTIDHEWKLHPGPTNHLSDIFPELPAPGD

SEQ ID NO: 18249 - protein, 505 aa, Homo sapiens
MSNICQRLWEYLEPYLPCLSTEADKSTVIENPGALCSPQSQRHGHYFVALFDYQARTAEDLSFRAGDKLQVLDTLHEGWWFARHLEKRRDGSSQQLQGYIPSNYVAEDRSLQAEPWFFGAIGRSDAEKQLLYSENKTGSFLIRESESQKGEFSLSVLDGAVVKHYRIKRLDEGGFFLTRRRIFSTLNEFVSHYTKTSDGLCVKLGKPCLKIQVPAPFDLSYKTVDQWEIDRNSIQLLKRLGSGQFGEVWEGLWNNTTPVAVKTLKPGSMDPNDFLREAQIMKNLRHPKLIQLYAVCTLEDPIYIITELMRHGSLQEYLQNDTGSKIHLTQQVDMAAQVASGMAYLESRNYIHRDLAARNVLVGEHNIYKVADFGLARVFKVDNEDIYESRHEIKLPVKWTAPEAIRSNKFSIKSDVWSFGILLYEIITYGKMPYSGMTGAQVIQMLAQNYRLPQPSNCPQQFYNIMLECWNAEPKERPTFETLRWKLEDYFETDSSYSDANNFIR

SEQ ID NO: 18250 - protein, 363 aa, Homo sapiens
MDSTSLLPNPWIRVLDGAVVKHYRIKRLDEGGFFLTRRRIFSTLNEFVSHYTKTSDGLCVKLGKPCLKIQVPAPFDLSYKTVDQWEIDRNSIQLLKRLGSGQFGEVWEGLWNNTTPVAVKTLKPGSMDPNDFLREAQIMKNLRHPKLIQLYAVCTLEDPIYIITELMRHGSLQEYLQNDTGSKIHLTQQVDMAAQVASGMAYLESRNYIHRDLAARNVLVGEHNIYKVADFGLARVFKVDNEDIYESRHEIKLPVKWTAPEAIRSNKFSIKSDVWSFGILLYEIITYGKMPYSGMTGAQVIQMLAQNYRLPQPSNCPQQFYNIMLECWNAEPKERPTFETLRWKLEDYFETDSSYSDANNFIR

SEQ ID NO: 18251 - protein, 490 aa, Homo sapiens
MGPVMPPSKKPESSGISVSSGLSQCYGGSGFSKALQEDDDLDFSLPDIRLEEGAMEDEELTNLNWLHESKNLLKSFGESVLRSVSPVQDLDDDTPPSPAHSDMPYDARQNPNCKPPYSFSCLIFMAIEDSPTKRLPVKDIYNWILEHFPYFANAPTGWKNSVRHNLSLNKCFKKVDKERSQSIGKGSLWCIDPEYRQNLIQALKKTPYHPHPHVFNTPPTCPQAYQSTSGPPIWPGSTFFKRNGALLQDPDIDAASAMMLLNTPPEIQAGFPPGVIQNGARVLSRGLFPGVRPLPITPIGVTAAMRNGITSCRMRTESEPSCGSPVVSGDPKEDHNYSSAKSSNARSTSPTSDSISSSSSSADDHYEFATKGSQEGSEGSEGSFRSHESPSDTEEDDRKHSQKEPKDSLGDSGYASQHKKRQHFAKARKVPSDTLPLKKRRTEKPPESDDEEMKEAAGSLLHLAGIRSCLNNITNRTAKGQKEQKETTKN

SEQ ID NO: 18252 - protein, 468 aa, Homo sapiens
MGPVMPPSKKPESSGISVSSGLSQCYGGSGFSKALQEDDDLDFSLPDIRLEEGAMEDEELTNLNWLHESKNLLKSFGESVLRSVSPVQDLDDDTPPSPAHSDMPYDARQNPNCKPPYSFSCLIFMAIEDSPTKRLPVKDIYNWILEHFPYFANAPTGWKNSVRHNLSLNKCFKKVDKERSQSIGKGSLWCIDPEYRQNLIQALKKTPYHPHPHVFNTPPTCPQAYQSTSGPPIWPGSTFFKRNGALLQVPPGVIQNGARVLSRGLFPGVRPLPITPIGVTAAMRNGITSCRMRTESEPSCGSPVVSGDPKEDHNYSSAKSSNARSTSPTSDSISSSSSSADDHYEFATKGSQEGSEGSEGSFRSHESPSDTEEDDRKHSQKEPKDSLGDSGYASQHKKRQHFAKARKVPSDTLPLKKRRTEKPPESDDEEMKEAAGSLLHLAGIRSCLNNITNRTAKGQKEQKETTKN

SEQ ID NO: 18253 - protein, 308 aa, Homo sapiens
MPGQELRTVNGSQMLLVLLVLSWLPHGGALSLAEASRASFPGPSELHSEDSRFRELRKRYEDLLTRLRANQSWEDSNTDLVPAPAVRILTPEVRLGSGGHLHLRISRAALPEGLPEASRLHRALFRLSPTASRSWDVTRPLRRQLSLARPQAPALHLRLSPPPSQSDQLLAESSSARPQLELHLRPQAARGRRRARARNGDHCPLGPGRCCRLHTVRASLEDLGWADWVLSPREVQVTMCIGACPSQFRAANMHAQIKTSLHRLKPDTVPAPCCVPASYNPMVLIQKTDTGVSLQTYDDLLAKDCHCI

SEQ ID NO: 18254 - protein, 340 aa, Homo sapiens
MSELEQLRQEAEQLRNQIQDARKACNDATLVQITSNMDSVGRIQMRTRRTLRGHLAKIYAMHWGYDSRLLVSASQDGKLIIWDSYTTNKMHAIPLRSSWVMTCAYAPSGNYVACGGLDNICSIYNLKTREGNVRVSRELPGHTGYLSCCRFLDDSQIVTSSGDTTCALWDIETAQQTTTFTGHSGDVMSLSLSPDMRTFVSGACDASSKLWDIRDGMCRQSFTGHVSDINAVSFFPNGYAFATGSDDATCRLFDLRADQELLLYSHDNIICGITSVAFSKSGRLLLAGYDDFNCNVWDTLKGDRAGVLAGHDNRVSCLGVTDDGMAVATGSWDSFLRIWN

SEQ ID NO: 18255 - protein, 407 aa, Homo sapiens
MVLAAPLLLGFLLLALELRPRGEAAEGPAAAAAAAAAAAAAGVGGERSSRPAPSVAPEPDGCPVCVWRQHSRELRLESIKSQILSKLRLKEAPNISREVVKQLLPKAPPLQQILDLHDFQGDALQPEDFLEEDEYHATTETVISMAQETDPAVQTDGSPLCCHFHFSPKVMFTKVLKAQLWVYLRPVPRPATVYLQILRLKPLTGEGTAGGGGGGRRHIRIRSLKIELHSRSGHWQSIDFKQVLHSWFRQPQSNWGIEINAFDPSGTDLAVTSLGPGAEGLHPFMELRVLENTKRSRRNLGLDCDEHSSESRCCRYPLTVDFEAFGWDWIIAPKRYKANYCSGQCEYMFMQKYPHTHLVQQANPRGSAGPCCTPTKMSPINMLYFNDKQQIIYGKIPGMVVDRCGCS

SEQ ID NO: 18256 - protein, 436 aa, Homo sapiens
MEPDDFDSEDKEILSWDINDVKLPQNVKKTDWFQEWPDSYAKHIYSSEDKNAQRHLSSWAMRNTNNHNSRILKKSCLGVVVCGRDCLAEEGRKIYLRPAICDKARQKQQRKRCPNCDGPLKLIPCRGHGGFPVTNFWRHDGRFIFFQSKGEHDHPKPETKLEAEARRAMKKVNTAPSSVSLSLKGSTETRSLPGETQSQGSLPLTWSFQEGVQLPGSYSGHLIANTPQQNSLNDCFSFSKSYGLGGITDLTDQTSTVDPMKLYEKRKLSSSRTYSSGDLLPPSASGVYSDHGDLQAWSKNAALGRNHLADNCYSNYPFPLTSWPCSFSPSQNSSEPFYQQLPLEPPAAKTGCPPLWPNPAGNLYEEKVHVDFNSYVQSPAYHSPQEDPFLFTYASHPHQQYSLPSKSSKWDFEEEMTYLGLDHCNNDMLLNLCPLR

SEQ ID NO: 18257 - protein, 903 aa, Homo sapiens
MTTIHSRQMLQEHVSMEFSSSTTHVQTFSQTTKIVGEEVVRRKSSSIVEFFSLVTRSSNIPAGDSVPEFVEKPQPVTAPEGDKAVFRARVQGNAKPHISWKRESGIPIKESAKIFYDSINKEHVLKLEPLTSDDSDNYKCIASNDHADAIYTVSLLVTEGQEKMDFKKMLKKRAPPAPKKKQKKVANEKEMLEILSKVPKKDFEKVCMEYGFTDFRGLLRKLKEMKKKVEVEAIRILKPLEDKETKVDTTVVFDCIMELKDPNVKMIWIKGTEPLRIQYSLGKYDVKQMGTKYMLVISNVNMNDAGIYSLSVGDKRMSAELTVLDEPLKFLGEMKPVKVTERQTAVFEIRLSKKEPNFVWKFNGKELKRDDKYEITVSEDGLTHTLKIKDARLSDSGEFSAEAGNLVQKAQLTVDRIPIKFVSNLKNVRVKERSRACLECELTSKDVTLRWKKDGQLLMHGTKYSMNHEGKRAELIIEDAQLSDGGEYTVVAMQDGDPTEYYSTAIVTVEERLATVKSGMSDVHAATGSPAELCVVLNDEKVEGVWLKDGKEITDLPGMQIVKQGAVHKLIFPSMGPEHEGKYTFRAKGTESEASVFIADPPTIDPSVLEALAAHAITVKVGHTAHIKVPFRGKPLPKVTWYKDGMEVTEEERVSMERGEDQALLTISNCVREDSGLILLKLKNDHGSATATLHLSVLEPPGFASQPQVTDVTKEAVTITWNAPTQDGGAPVLGYIVERRKKGSNLWVPVNKDPIQGTKCTVDGLLEDTEYEFRVIAVNKAGPGQPSVPSSSVVAKDPVKPPGLVQDLHVSDSSNSSISLAWREPAEGDPPSGYILEMRAEDTKEWSKCTKIPISGTCYTVGGLIERQKYFFRIRAVNEAGVGEPVELDKGVRAMPPPGLTTT

SEQ ID NO: 18258 - protein, 1326 aa, Homo sapiens
MTTIHSRQMLQEHVSMEFSSSTTHVQTFSQTTKIVGEEVVRRKSSSIVEFFSLVTRSSNIPAGDSVPEFVEKPQPVTAPEGDKAVFRARVQGNAKPHISWKRESGIPIKESAKIFYDSINKEHVLKLEPLTSDDSDNYKCIASNDHADAIYTVSLLVTEGQEKMDFKKMLKKRAPPAPKKKQKKVANEKEMLEILSKVPKKDFEKVCMEYGFTDFRGLLRKLKEMKKKVEVEAIRILKPLEDKETKVDTTVVFDCIMELKDPNVKMIWIKGTEPLRIQYSLGKYDVKQMGTKYMLVISNVNMNDAGIYSLSVGDKRMSAELTVLDEPLKFLGEMKPVKVTERQTAVFEIRLSKKEPNFVWKFNGKELKRDDKYEITVSEDGLTHTLKIKDARLSDSGEFSAEAGNLVQKAQLTVDRIPIKFVSNLKNVRVKERSRACLECELTSKDVTLRWKKDGQLLMHGTKYSMNHEGKRAELIIEDAQLSDGGEYTVVAMQDGDPTEYYSTAIVTVEERLATVKSGMSDVHAATGSPAELCVVLNDEKVEGVWLKDGKEITDLPGMQIVKQGAVHKLIFPSMGPEHEGKYTFRAKGTESEASVFIADPPTIDPSVLEALAAHAITVKVGHTAHIKVPFRGKPLPKVTWYKDGMEVTEEERVSMERGEDQALLTISNCVREDSGLILLKLKNDHGSATATLHLSVLDRPKPPQGRVEFLELSGSCVHMKWKAPKDNGGRPVTQFIVERRAVGKKSWIKIGEVDGKVTNFSTNKVEEGKAYQFRILAVNSEGVSDPLETEEVFAGNPIEPPGFASQPQVTDVTKEAVTITWNAPTQDGGAPVLGYIVERRKKGSNLWVPVNKDPIQGTKCTVDGLLEDTEYEFRVIAVNKAGPGQPSVPSSSVVAKDPVKPPGLVQDLHVSDSSNSSISLAWREPAEGDPPSGYILEMRAEDTKEWSKCTKIPISGTCYTVGGLIERQKYFFRIRAVNEAGVGEPVELDKGVRAMPPPAAPKFDLSARLKSHMVVRAGTALCIHAAFSGSPPPDVIWQKDGVPTKGRETITKSKNHSQFLINSTKRSDSGVYRILLQNEFGEARYDIHVRVADFPRPPTNLRLFEEVPNTVTLTWNHSPDVQEDGEAHYIIMKRDASTATWYTAAERVFSNKYTVTGLLPGRKYYFRVVARNEIGDSEPLDSRDTWLINKDQIQDLSAKLKPYEKKDWRHAPRFVTPLKPHTVLRGQDCTMTCAFLGNPRPTVTLYKGDVNITANSKFWYNSTSGVCTLVIPTCTLKDSGDYSVLVENELGKDRSSCTLTVYDKDDKSVVASITESLQKKSKHLM

SEQ ID NO: 18259 - protein, 192 aa, Homo sapiens
MRAKPQSPLPRNPVPAWSPPTTTTDPMLEKDAAGGDFPANLVLQLMPLKTFPAAIRGVIQSELNYSVILQWVVTMDPEPVLSWTFSGVPCGMGEKLFIRRLSCEQLGTYMCIATNSKKQLVSEPVTISLPKPIMQPTEAEPMEPDPTLSLSGGSAIGLLAAGILGAGALIAGMCFIIIQSLRTDRQRIGICS

SEQ ID NO: 18260 - protein, 68 aa, Homo sapiens
MSSGASASALQRLVEQLKLEAGVERIKVSQAAAELQQYCMQNACKDALLVGVPAGSNPFREPRSCALL

SEQ ID NO: 18261 - protein, 300 aa, Homo sapiens
MAESEDRSLRIVLVGKTGSGKSATANTILGEEIFDSRIAAQAVTKNCQKASREWQGRDLLVVDTPGLFDTKESLDTTCKEISRCIISSCPGPHAIVLVLLLGRYTEEEQKTVALIKAVFGKSAMKHMVILFTRKEELEGQSFHDFIADADVGLKSIVKECGNRCCAFSNSKKTSKAEKESQVQELVELIEKMVQCNEGAYFSDDIYKDTEERLKQREEVLRKIYTDQLNEEIKLVEEDKHKSEEEKEKEIKLLKLKYDEKIKNIREEAERNIFKDVFNRIWKMLSEIWHRFLSKCKFYSS

SEQ ID NO: 18262 - protein, 472 aa, Homo sapiens
MSENNKNSLESSLRQLKCHFTWNLMEGENSLDDFEDKVFYRTEFQNREFKATMCNLLAYLKHLKGQNEAALECLRKAEELIQQEHADQAEIRSLVTWGNYAWVYYHMGRLSDVQIYVDKVKHVCEKFSSPYRIESPELDCEEGWTRLKCGGNQNERAKVCFEKALEKKPKNPEFTSGLAIASYRLDNWPPSQNAIDPLRQAIRLNPDNQYLKVLLALKLHKMREEGEEEGEGEKLVEEALEKAPGVTDVLRSAAKFYRRKDEPDKAIELLKKALEYIPNNAYLHCQIGCCYRAKVFQVMNLRENGMYGKRKLLELIGHAVAHLKKADEANDNLFRVCSILASLHALADQYEDAEYYFQKEFSKELTPVAKQLLHLRYGNFQLYQMKCEDKAIHHFIEGVKINQKSREKEKMKDKLQKIAKMRLSKNGADSEALHVLAFLQELNEKMQQADEDSERGLESGSLIPSASSWNGE

SEQ ID NO: 18263 - protein, 682 aa, Homo sapiens
MCGIFAYMNYRVPRTRKEIFETLIKGLQRLEYRGYDSAGVAIDGNNHEVKERHIQLVKKRGKVKALDEELYKQDSMDLKVEFETHFGIAHTRWATHGVPSAVNSHPQRSDKGNEFVVIHNGIITNYKDLRKFLESKGYEFESETDTETIAKLIKYVFDNRETEDITFSTLVERVIQQLEGAFALVFKSVHYPGEAVATRRGSPLLIGVRSKYKLSTEQIPILYRTCTLENVKNICKTRMKRLDSSACLHAVGDKAVEFFFASDASAIIEHTNRVIFLEDDDIAAVADGKLSIHRVKRSASDDPSRAIQTLQMELQQIMKGNFSAFMQKEIFEQPESVFNTMRGRVNFETNTVLLGGLKDHLKEIRRCRRLIVIGCGTSYHAAVATRQVLEELTELPVMVELASDFLDRNTPVFRDDVCFFISQSGETADTLLALRYCKDRGALTVGVTNTVGSSISRETDCGVHINAGPEIGVASTKAYTSQFISLVMFGLMMSEDRISLQNRRQEIIRGLRSLPELIKEVLSLEEKIHDLALELYTQRSLLVMGRGYNYATCLEGALKIKEITYMHSEGILAGELKHGPLALIDKQMPVIMVIMKDPCFAKCQNALQQVTARQGRPIILCSKDDTESSKFAYKTIELPHTVDCLQGILSVIPLQLLSFHLAVLRGYDVDFPRNLAKSVTVE

SEQ ID NO: 18264 - protein, 924 aa, Homo sapiens
MPGPSPGLRRALLGLWAALGLGLFGLSAVSQEPFWADLQPRVAFVERGGSLWLNCSTNCPRPERGGLETSLRRNGTQRGLRWLARQLVDIREPETQPVCFFRCARRTLQARGLIRTFQRPDRVELMPLPPWQPVGENFTLSCRVPGAGPRASLTLTLLRGAQELIRRSFAGEPPRARGAVLTATVLARREDHGANFSCRAELDLRPHGLGLFENSSAPRELRTFSLSPDAPRLAAPRLLEVGSERPVSCTLDGLFPASEARVYLALGDQNLSPDVTLEGDAFVATATATASAEQEGARQLVCNVTLGGENRETRENVTIYSFPAPLLTLSEPSVSEGQMVTVTCAAGAQALVTLEGVPAAVPGQPAQLQLNATENDDRRSFFCDATLDVDGETLIKNRSAELRVLYAPRLDDSDCPRSWTWPEGPEQTLRCEARGNPEPSVHCARSDGGAVLALGLLGPVTRALSGTYRCKAANDQGEAVKDVTLTVEYAPALDSVGCPERITWLEGTEASLSCVAHGVPPPDVICVRSGELGAVIEGLLRVAREHAGTYRCEATNPRGSAAKNVAVTVEYGPRFEEPSCPSNWTWVEGSGRLFSCEVDGKPQPSVKCVGSGGATEGVLLPLAPPDPSPRAPRIPRVLAPGIYVCNATNRHGSVAKTVVVSAESPPEMDESTCPSHQTWLEGAEASALACAARGRPSPGVRCSREGIPWPEQQRVSREDAGTYHCVATNAHGTDSRTVTVGVEYRPVVAELAASPPGGVRPGGNFTLTCRAEAWPPAQISWRAPPGALNIGLSSNNSTLSVAGAMGSHGGEYECAATNAHGRHARRITVRVAGPWLWVAVGGAAGGAALLAAGAGLAFYVQSTACKKGEYNVQEAESSGEAVCLNGAGGGAGGAAGAEGGPEAAGGAAESPAEGEVFAIQLTSA

SEQ ID NO: 18265 - protein, 417 aa, Homo sapiens
MAWFALYLLSLLWATAGTSTQTQSSCSVPSAQEPLVNGIQVLMENSVTSSAYPNPSILIAMNLAGAYNLKAQKLLTYQLMSSDNNDLTIGQLGLTIMALTSSCRDPGDKVSILQRQMENWAPSSPNAEASAFYGPSLAILALCQKNSEATLPIAVRFAKTLLANSSPFNVDTGAMATLALTCMYNKIPVGSEEGYRSLFGQVLKDIVEKISMKIKDNGIIGDIYSTGLAMQALSVTPEPSKKEWNCKKTTDMILNEIKQGKFHNPMSIAQILPSLKGKTYLDVPQVTCSPDHEVQPTLPSNPGPGPTSASNITVIYTINNQLRGVELLFNETINVSVKSGSVLLVVLEEAQRKNPMFKFETTMTSWGLVVSSINNIAENVNHKTYWQFLSGVTPLNEGVADYIPFNHEHITANFTQY

SEQ ID NO: 18266 - protein, 392 aa, Homo sapiens
MAVPSAQEPLVNGIQVLMENSVTSSAYPNPSILIAMNLAGAYNLKAQKLLTYQLMSSDNNDLTIGQLGLTIMALTSSCRDPGDKVSILQRQMENWAPSSPNAEASAFYGPSLAILALCQKNSEATLPIAVRFAKTLLANSSPFNVDTGAMATLALTCMYNKIPVGSEEGYRSLFGQVLKDIVEKISMKIKDNGIIGDIYSTGLAMQALSVTPEPSKKEWNCKKTTDMILNEIKQGKFHNPMSIAQILPSLKGKTYLDVPQVTCSPDHEVQPTLPSNPGPGPTSASNITVIYTINNQLRGVELLFNETINVSVKSGSVLLVVLEEAQRKNPMFKFETTMTSWGLVVSSINNIAENVNHKTYWQFLSGVTPLNEGVADYIPFNHEHITANFTQY

SEQ ID NO: 18267 - protein, 653 aa, Homo sapiens
MRPLRPRAALLALLASLLAAPPVAPAEAPHLVHVDAARALWPLRRFWRSTGFCPPLPHSQADQYVLSWDQQLNLAYVGAVPHRGIKQVRTHWLLELVTTRGSTGRGLSYNFTHLDGYLDLLRENQLLPGFELMGSASGHFTDFEDKQQVFEWKDLVSSLARRYIGRYGLAHVSKWNFETWNEPDHHDFDNVSMTMQGFLNYYDACSEGLRAASPALRLGGPGDSFHTPPRSPLSWGLLRHCHDGTNFFTGEAGVRLDYISLHRKGARSSISILEQEKVVAQQIRQLFPKFADTPIYNDEADPLVGWSLPQPWRADVTYAAMVVKVIAQHQNLLLANTTSAFPYALLSNDNAFLSYHPHPFAQRTLTARFQVNNTRPPHVQLLRKPVLTAMGLLALLDEEQLWAEVSQAGTVLDSNHTVGVLASAHRPQGPADAWRAAVLIYASDDTRAHPNRSVAVTLRLRGVPPGPGLVYVTRYLDNGLCSPDGEWRRLGRPVFPTAEQFRRMRAAEDPVAAAPRPLPAGGRLTLRPALRLPSLLLVHVCARPEKPPGQVTRLRALPLTQGQLVLVWSDEHVGSKCLWTYEIQFSQDGKAYTPVSRKPSTFNLFVFSPDTGAVSGSYRVRALDYWARPGPFSDPVPYLEVPVPRGPPSPGNP

SEQ ID NO: 18268 - protein, 675 aa, Homo sapiens
MRPLRPRAALLALLASLLAAPPVAPAEAPHLVHVDAARALWPLRRFWRSTGFWGSTGRGLSYNFTHLDGYLDLLRENQLLPGFELMGSASGHFTDFEDKQQVFEWKDLVSSLARRYIGRYGLAHVSKWNFETWNEPDHHDFDNVSMTMQGFLNYYDACSEGLRAASPALRLGGPGDSFHTPPRSPLSWGLLRHCHDGTNFFTGEAGVRLDYISLHRKVRPAPPSAPVFCALSRCAPGRADPGGAEAAPPAGCAQLHLHPGAGEGRRAADPAALPQVRGHPHLQRRGGPAGGLVPATAVEGGRDLRGHGGEGGPAQRPARPPATFLPRRDRRAVAAPPGPSCPGHPQVIAQHQNLLLANTTSAFPYALLSNDNAFLSYHPHPFAQRTLTARFQVNNTRPPHVQLLRKPVLTAMGLLALLDEEQLWAEVSQAGTVLDSNHTVGVLASAHRPQGPADAWRAAVLIYASDDTRAHPNRSVAVTLRLRGVPPGPGLVYVTRYLDNGLCSPDGEWRRLGRPVFPTAEQFRRMRAAEDPVAAAPRPLPAGGRLTLRPALRLPSLLLVHVCARPEKPPGQVTRLRALPLTQGQLVLVWSDEHVGSKCLWTYEIQFSQDGKAYTPVSRKPSTFNLFVFSPDTGAVSGSYRVRALDYWARPGPFSDPVPYLEVPVPRGPPSPGNP

SEQ ID NO: 18269 - protein, 168 aa, Homo sapiens
MSKRKWRGFRGAQQERAQPPAASPQPCPAPHAGLPGGSRRRAPAPAGQQQMRAESRSGAQRRRGSARRGAHREAGGCVRGRTRSSGSERSNALWQAVDAAEALALSSPLRRPWDQAQHFTNPAPFSKGPQSAPPSPPAGRRRRGADLALTPLAGEGHTRWRQPGRPGK

SEQ ID NO: 18270 - protein, 512 aa, Homo sapiens
MWRVRKRGYFGIWSFPLIIAAVCAQSVNDPSNMSLVKETVDRLLKGYDIRLRPDFGGPPVAVGMNIDIASIDMVSEVNMDYTLTMYFQQAWRDKRLSYNVIPLNLTLDNRVADQLWVPDTYFLNDKKSFVHGVTVKNRMIRLHPDGTVLYGLRITTTAACMMDLRRYPLDEQNCTLEIESYGYTTDDIEFYWRGDDNAVTGVTKIELPQFSIVDYKLITKKVVFSTGSYPRLSLSFKLKRNIGYFILQTYMPSILITILSWVSFWINYDASAARVALGITTVLTMTTINTHLRETLPKIPYVKAIDMYLMGCFVFVFMALLEYALVNYIFFGRGPQRQKKAAEKAASANNEKMRLDVNKIFYKDIKQNGTQYRSLWDPTGNLSPTRRTTNYDFSLYTMDPHENILLSTLEIKNEMATSEAVMGLGDPRSTMLAYDASSIQYRKAGLPRHSFGRNALERHVAQKKSRLRRRASQLKITIPDLTDVNAIDRWSRIFFPVVFSFFNIVYWLYYVN

SEQ ID NO: 18271 - protein, 474 aa, Homo sapiens
MWRVRKRGYFGIWSFPLIIAAVCAQSVNDPSNMSLVKETVDRLLKGYDIRLRPDFGGPPVAVGMNIDIASIDMVSEVNMDYTLTMYFQQAWRDKRLSYNVIPLNLTLDNRVADQLWVPDTYFLNDKKSFVHGVTVKNRMIRLHPDGTVLYGLRITTTAACMMDLRRYPLDEQNCTLEIESYGYTTDDIEFYWRGDDNAVTGVTKIELPQFSIVDYKLITKKVVFSTGSYPRLSLSFKLKRNIGYFILQTYMPSILITILSWVSFWINYDASAARVALGITTVLTMTTINTHLRETLPKIPYVKAIDMYLMGCFVFVFMALLEYALVNYIFFGRGPQRQKKAAEKAASANNEKMRLDVNKMDPHENILLSTLEIKNEMATSEAVMGLGDPRSTMLAYDASSIQYRKAGLPRHSFGRNALERHVAQKKSRLRRRASQLKITIPDLTDVNAIDRWSRIFFPVVFSFFNIVYWLYYVN

SEQ ID NO: 18272 - protein, 313 aa, Homo sapiens
MNIDIASIDMVSEVNMDYTLTMYFQQAWRDKRLSYNVIPLNLTLDNRVADQLWVPDTYFLNDKKSFVHGVTVKNRMIRLHPDGTVLYGLRITTTAACMMDLRRYPLDEQNCTLEIESYGYTTDDIEFYWRGDDNAVTGVTKIELPQFSIVDYKLITKKVVFSTGSYPRLSLSFKLKRNIGYFILQTYMPSILITILSWVSFWINYDASAARVALGITTVLTMTTINTHLRETLPKIPYVKAIDMYLMGCFVFVFMALLEYALVNYIFFGRGPQRQKKAAEKAASANNEKMRLDVNKVNSEGKPSLLLKLMEEC

SEQ ID NO: 18273 - protein, 372 aa, Homo sapiens
MWRVRKRGYFGIWSFPLIIAAVCAQSVNDPSNMSLVKETVDRLLKGYDIRLRPDFGGPPVAVGMNIDIASIDMVSEVNMDYTLTMYFQQAWRDKRLSYNVIPLNLTLDNRVADQLWVPDTYFLNDKKSFVHGVTVKNRMIRLHPDGTVLYGLRITTTAACMMDLRRYPLDEQNCTLEIESYGYTTDDIEFYWRGDDNAVTGVTKIELPQFSIVDYKLITKKVVFSTGSYPRLSLSFKLKRNIGYFILQTYMPSILITILSWVSFWINYDASAARVALGITTVLTMTTINTHLRETLPKIPYVKAIDMYLMGCFVFVFMALLEYALVNYIFFGRGPQRQKKAAEKAASANNEKMRLDVNKMDPHENILLSTLD

SEQ ID NO: 18274 - protein, 327 aa, Homo sapiens
MEFKLEAHRIVSISLGKIYNSRVQRGGIKLHKNLLVSLVLRSARQVYLSDPCPGLYLAGPAGTPAPPPQQQPGEPAAGPPAGWGEPPPPAARASWPETEPQPERSSVSDAPRVGDEVPVATVTGVGDVFQGGEADATEAAWSRVEGPRQAAAREAEGTAGGWGVFPEVSRAARRPCGCPLGGEDPPGTPAATPRAACCCAPQPAEDEPPAPPAVCPRKRCAAGVGGGPAGCPAPGSTPLKKPRRNLEQPPSGGEDDDAEEMETGNVANLISIFGSSFSGLLRKSPGGGREEEEGEESGPEAAEPGQICCDKPVLRDMNPWSTAIVAF

SEQ ID NO: 18275 - protein, 617 aa, Homo sapiens
MRCLAARVNYKTLIIICALFTLVTVLLWNKCSSDKAIQFPRRSSSGFRVDGFEKRAAASESNNYMNHVAKQQSEEAFPQEQQKAPPVVGGFNSNVGSKVLGLKYEEIDCLINDEHTIKGRREGNEVFLPFTWVEKYFDVYGKVVQYDGYDRFEFSHSYSKVYAQRAPYHPDGVFMSFEGYNVEVRDRVKCISGVEGVPLSTQWGPQGYFYPIQIAQYGLSHYSKNLTEKPPHIEVYETAEDRDKNKPNDWTVPKGCFMANVADKSRFTNVKQFIAPETSEGVSLQLGNTKDFIISFDLKFLTNGSVSVVLETTEKNQLFTIHYVSNAQLIAFKERDIYYGIGPRTSWSTVTRDLVTDLRKGVGLSNTKAVKPTKIMPKKVVRLIAKGKGFLDNITISTTAHMAAFFAASDWLVRNQDEKGGWPIMVTRKLGEGFKSLEPGWYSAMAQGQAISTLVRAYLLTKDHIFLNSALRATAPYKFLSEQHGVKAVFMNKHDWYEEYPTTPSSFVLNGFMYSLIGLYDLKETAGEKLGKEARSLYERGMESLKAMLPLYDTGSGTIYDLRHFMLGIAPNLARWDYHTTHINQLQLLSTIDESPVFKEFVKRWKSYLKGSRAKHN

SEQ ID NO: 18276 - protein, 419 aa, Homo sapiens
MGEKKPEPLDFVKDFQEYLTQQTHHVNMISGSVSGDKEAEALQGAGTDGDQNGLDHPSVEVSLDENSGMLVDGFERTFDGKLKCRYCNYASKGTARLIEHIRIHTGEKPHRCHLCPFASAYERHLEAHMRSHTGEKPYKCELCSFRCSDRSNLSHHRRRKHKMVPIKGTRSSLSSKKMWGVLQKKTSNLGYSRRALINLSPPSMVVQKPDYLNDFTHEIPNIQTDSYESMAKTTPTGGLPRDPQELMVDNPLNQLSTLAGQLSSLPPENQNPASPDVVPCPDEKPFMIQQPSTQAVVSAVSASIPQSSSPTSPEPRPSHSQRNYSPVAGPSSEPSAHTSTPSIGNSQPSTPAPALPVQDPQLLHHCQHCDMYFADNILYTIHMGCHGYENPFQCNICGCKCKNKYDFACHFARGQHNQH

SEQ ID NO: 18277 - protein, 484 aa, Homo sapiens
MFPNSILGRPPFTPNHQQHNNFFTLSPTVYSHQQLIDAQFNFQNADLSRAVSLQQLTYGNVSPIQTSASPLFRGRKRLSDEKNLPLDGKRQRFHSPHQEPTVVNQIVPLSGERRYSMPPLFHTHYVPDIVRCVPPFREIAFLEPREITLPEAKDKLSQQILELFETCQQQISDLKKKELCRTQLQREIQLLFPQSRLFLVGSSLNGFGTRSSDGDLCLVVKEEPCFFQVNQKTEARHILTLVHKHFCTRLSGYIERPQLIRAKVPIVKFRDKVSCVEFDLNVNNIVGIRNTFLLRTYAYLENRVRPLVLVIKKWASHHQINDASRGTLSSYSLVLMVLHYLQTLPEPILPSLQKIYPESFSPAIQLHLVHQAPCNVPPYLSKNESNLGDLLLGFLKYYATEFDWNSQMISVREAKAIPRPDGIEWRNKYICVEEPFDGTNTARAVHEKQKFDMIKDQFLKSWHRLKNKRDLNSILPVRAAVLKR

SEQ ID NO: 18278 - protein, 480 aa, Homo sapiens
MFPNSILGRPPFTPNHQQHNNFFTLSPTVYSHQQLIDAQFNFQNADLSRAVSLQQLTYGNVSPIQTSASPLFRGRKRLSDEKNLPLDGKRQRFHSPHQEPTVVNQIVPLSGERRYSMPPLFHTHYVPDIVRCVPPFREIAFLEPREITLPEAKDKLSQQILELFETCQQQISDLKKKELCRTQLQREIQLLFPQSRLFLVGSSLNGFGTRSSDGDLCLVVKEEPVNQKTEARHILTLVHKHFCTRLSGYIERPQLIRAKVPIVKFRDKVSCVEFDLNVNNIVGIRNTFLLRTYAYLENRVRPLVLVIKKWASHHQINDASRGTLSSYSLVLMVLHYLQTLPEPILPSLQKIYPESFSPAIQLHLVHQAPCNVPPYLSKNESNLGDLLLGFLKYYATEFDWNSQMISVREAKAIPRPDGIEWRNKYICVEEPFDGTNTARAVHEKQKFDMIKDQFLKSWHRLKNKRDLNSILPVRAAVLKR

SEQ ID NO: 18279 - protein, 403 aa, Homo sapiens
MQRAVSVVARLGFRLQAFPPALCRPLSCAQEVLRRTPLYDFHLAHGGKMVAFAGWSLPVQYRDSHTDSHLHTRQHCSLFDVSHMLQTKILGSDRVKLMESLVVGDIAELRPNQGTLSLFTNEAGGILDDLIVTNTSEGHLYVVSNAGCWEKDLALMQDKVRELQNQGRDVGLEVLDNALLALQGPTAAQVLQAGVADDLRKLPFMTSAVMEVFGVSGCRVTRCGYTGEDGVEISVPVAGAVHLATAILKNPEVKLAGLAARDSLRLEAGLCLYGNDIDEHTTPVEGSLSWTLGKRRRAAMDFPGAKVIVPQLKGRVQRRRVGLMCEGAPMRAHSPILNMEGTKIGTVTSGCPSPSLKKNVAMGYVPCEYSRPGTMLLVEVRRKQQMAVVSKMPFVPTNYYTLK

SEQ ID NO: 18280 - protein, 347 aa, Homo sapiens
MQRAVSVVARLGFRLQAFPPALCRPLSCAQTKILGSDRVKLMESLVVGDIAELRPNQGTLSLFTNEAGGILDDLIVTNTSEGHLYVVSNAGCWEKDLALMQDKVRELQNQGRDVGLEVLDNALLALQGPTAAQVLQAGVADDLRKLPFMTSAVMEVFGVSGCRVTRCGYTGEDGVEISVPVAGAVHLATAILKNPEVKLAGLAARDSLRLEAGLCLYGNDIDEHTTPVEGSLSWTLGKRRRAAMDFPGAKVIVPQLKGRVQRRRVGLMCEGAPMRAHSPILNMEGTKIGTVTSGCPSPSLKKNVAMGYVPCEYSRPGTMLLVEVRRKQQMAVVSKMPFVPTNYYTLK

SEQ ID NO: 18281 - protein, 359 aa, Homo sapiens
MQRAVSVVARLGFRLQAFPPALCRPLSCAQEVLRRTPLYDFHLAHGGKMVAFAGWSLPVQYRDSHTDSHLHTRQHCSLFDVSHMLQTKILGSDRVKLMESLVVGDIAELRPNQDKVRELQNQGRDVGLEVLDNALLALQGPTAAQVLQAGVADDLRKLPFMTSAVMEVFGVSGCRVTRCGYTGEDGVEISVPVAGAVHLATAILKNPEVKLAGLAARDSLRLEAGLCLYGNDIDEHTTPVEGSLSWTLGKRRRAAMDFPGAKVIVPQLKGRVQRRRVGLMCEGAPMRAHSPILNMEGTKIGTVTSGCPSPSLKKNVAMGYVPCEYSRPGTMLLVEVRRKQQMAVVSKMPFVPTNYYTLK

SEQ ID NO: 18282 - protein, 386 aa, Homo sapiens
MQRAVSVVARLGFRLQAFPPALCRPLSCAQEVLRRTPLYDFHLAHGGKMVAFAGWSLPVQYRDSHTDSHLHTRQHCSLFDVSHMLQTKILGSDRVKLMESLVVGDIAELRPNQGTLSLFTNEAGGILDDLIVTNTSEGHLYVVSNAGCWEKDLALMQDKVRELQNQGRDVGLEVLDNALLALQGPTAAQVLQAGVADDLRKLPFMTSAVMEVFGVSGCRVTRCGYTGEDGVEISVPVAGAVHLATAILKNPEVKLAGLAARDSLRLEAGLCLYGNDIDEHTTPVEGSLSWTLGKRRRAAMDFPGAKVIVPQLKGRVQRRRVGLMCEGAPMRAHSPILNMEGTKIGTVTSGCPSPSLKKNVAMGYVPCEYSRPGTMLLVELPSGPCF

SEQ ID NO: 18283 - protein, 775 aa, Homo sapiens
MEKFGMNFGGGPSKKDLLETIETQKKQLLQYQARLKDVVRAYKSLLKEKEALEASIKVLSVSHEADVGLAGVQLPGLTFPDSVDDRCSTHSEDSTGTATSLDTAASLTSTKGEFGVEDDRPARGPPPPKSEEASWSESGVSSSSGDGPFAGGEVDKRLHQLKTQLATLTSSLATVTQEKSRMEASYLADKKKMKQDLEDASNKAEEERARLEGELKGLQEQIAETKARLITQQHDRAQEQSDHALMLRELQKLLQEERTQRQDLELRLEETREALAGRAYAAEQMEGFELQTKQLTREVEELKSELQAIRDEKNQPDPRLQELQEEAARLKSHFQAQLQQEMRKTALAEDQLRQQSQVEEQRVAALENQISEVSELLGTYEKAKQKDQLAIQKLKERILQLDLENKTLALAASSRSPLDSHGEESSLDVNVLKDKMEKLKRLLQVAARKSQVTLDVEKLCDLEIMPSSEAADGEKATALYYQQELKQLKEEFERYKMRAQVVLKSKNTKDGNLGKELEAAQEQLAELKEKYISLRLSCEELEHQHQQEADDWKQELARLQQLHRQELERCQLDFRDRTLKLEEELHKQRDRALAVLTEKDLELEQLRSVALASGLPGRRSPVGGGGPGDPADTSSSDSLTQALQLAAANEPTFFLYAEQLARKEVEITSLRKQKHRLEVEVHQLQDRLLEEGERHREEVAALQSHIEKNIRDQSREGANLEYLKNIIYRFLTLPDSLGRQQTLTAILTILHFSPEEKQVIMRLPTSASWWPSGKR

SEQ ID NO: 18284 - protein, 732 aa, Homo sapiens
MSRRKISSESFSSLGSDYLETSPEEEGECPLSRLCWNGSRSPPGPLEPSPAAAAAAAAPAPTPAASAAAAAATAGARRVQRRRRVNLDSLGESISRLTAPSPQTIQQTLKRTLQYYEHQVIGYRDAEKNFHNISNRCSYADHSNKEEIEDVSGILQCTANILGLKFEEIQKRFGEEFFNICFHENERVLRAVGGTLQDFFNGFDALLEHIRTSFGKQATLESPSFLCKELPEGTLMLHYFHPHHIVGFAMLGMIKAAGKKIYRLDVEVEQVANEKLCSDVSNPGNCSCLTFLIKECENTNIMKNLPQGTSQVPADLRISINTFCRAFPFHLMFDPSMSVLQLGEGLRKQLRCDTHKVLKFEDCFEIVSPKVNATFERVLLRLSTPFVIRTKPEASGSENKDKVMEVKGQMIHVPESNSILFLGSPCVDKLDELMGRGLHLSDIPIHDATRDVILVGEQAKAQDGLKKRMDKLKATLERTHQALEEEKKKTVDLLYSIFPGDVAQQLWQGQQVQARKFDDVTMLFSDIVGFTAICAQCTPMQVISMLNELYTRFDHQCGFLDIYKVETIGDAYCVAAGLHRKSLCHAKPIALMALKMMELSEEVLTPDGRPIQMRIGIHSGSVLAGVVGVRMPRYCLFGNNVTLASKFESGSHPRRINVSPTTYQLLKREESFTFIPRSREELPDNFPKEIPGICYFLEVRTGPKPPKPSLSSSRIKKVSYNIGTMFLRETSL

SEQ ID NO: 18285 - protein, 763 aa, Homo sapiens
MSRRKISSESFSSLGSDYLETSPEEEGECPLSRLCWNGSRSPPGPLEPSPAAAAAAAAPAPTPAASAAAAAATAGARRVQRRRRVNLDSLGESISRLTAPSPQTIQQTLKRTLQYYEHQVIGYRDAEKNFHNISNRCSYADHSNKEEIEDVSGILQCTANILGLKFEEIQKRFGEEFFNICFHENERVLRAVGGTLQDFFNGFDALLEHIRTSFGKQATLESPSFLCKELPEGTLMLHYFHPHHIVGFAMLGMIKAAGKKIYRLDVEVEQVANEKLCSDVSNPGNCSCLTFLIKECENTNIMKNLPQGTSQVPADLRISINTFCRAFPFHLMFDPSMSVLQLGEGLRKQLRCDTHKVLKFEDCFEIVSPKVNATFERVLLRLSTPFVIRTKPEASGSENKDKVMEVKGQMIHVPESNSILFLGSPCVDKLDELMGRGLHLSDIPIHDATRDVILVGEQAKAQDGLKKRMDKLKATLERTHQALEEEKKKTVDLLYSIFPGDVAQQLWQGQQVQARKFDDVTMLFSDIVGFTAICAQCTPMQVISMLNELYTRFDHQCGFLDIYKVETIGDAYCVAAGLHRKSLCHAKPIALMALKMMELSEEVLTPDGRPIQPQRSELLFSFPVSIQLVPDQHQSETDLGTEKMRIGIHSGSVLAGVVGVRMPRYCLFGNNVTLASKFESGSHPRRINVSPTTYQLLKREESFTFIPRSREELPDNFPKEIPGICYFLEVRTGPKPPKPSLSSSRIKKVSYNIGTMFLRETSL

SEQ ID NO: 18286 - protein, 753 aa, Homo sapiens
MSRRKISSESFSSLGSDYLETSPEEEGECPLSRLCWNGSRSPPGPLEPSPAAAAAAAAPAPTPAASAAAAAATAGARRVQRRRRVNLDSLGESISRLTAPSPQTIQQTLKRTLQYYEHQVIGYRDAEKNFHNISNRCSYADHSNKEEIEDVSGILQCTANILGLKFEEIQKRFGEEFFNICFHENERVLRAVGGTLQDFFNGFDALLEHIRTSFGKQATLESPSFLCKELPEGTLMLHYFHPHHIVGFAMLGMIKAAGKKIYRLDVEVEQVANEKLCSDVSNPGNCSCLTFLIKECENTNIMKNLPQGTSQVPADLRISINTFCRAFPFHLMFDPSMSVLQLGEGLRKQLRCDTHKVLKFEDCFEIVSPKVNATFERVLLRLSTPFVIRTKPEASGSENKDKSKHVTEGHLTQLSVAGFNSLEVMEVKGQMIHVPESNSILFLGSPCVDKLDELMGRGLHLSDIPIHDATRDVILVGEQAKAQDGLKKRMDKLKATLERTHQALEEEKKKTVDLLYSIFPGDVAQQLWQGQQVQARKFDDVTMLFSDIVGFTAICAQCTPMQVISMLNELYTRFDHQCGFLDIYKVETIGDAYCVAAGLHRKSLCHAKPIALMALKMMELSEEVLTPDGRPIQMRIGIHSGSVLAGVVGVRMPRYCLFGNNVTLASKFESGSHPRRINVSPTTYQLLKREESFTFIPRSREELPDNFPKEIPGICYFLEVRTGPKPPKPSLSSSRIKKVSYNIGTMFLRETSL

SEQ ID NO: 18287 - protein, 349 aa, Homo sapiens
MNSTLDGNQSSHPFCLLAFGYLETVNFCLLEVLIIVFLTVLIISGNIIVIFVFHCAPLLNHHTTSYFIQTMAYADLFVGVSCVVPSLSLLHHPLPVEESLTCQIFGFVVSVLKSVSMASLACISIDRYIAITKPLTYNTLVTPWRLRLCIFLIWLYSTLVFLPSFFHWGKPGYHGDVFQWCAESWHTDSYFTLFIVMMLYAPAALIVCFTYFNIFRICQQHTKDISERQARFSSQSGETGEVQACPDKRYAMVLFRITSVFYILWLPYIIYFLLESSTGHSNRFASFLTTWLAISNSFCNCVIYSLSNSVFQRGLKRLSGAMCTSCASQTTANDPYTVRSKGPLNGCHI

SEQ ID NO: 18288 - protein, 1179 aa, Homo sapiens
MWLFHTLLCIASLALLAAFNVDVARPWLTPKGGAPFVLSSLLHQDPSTNQTWLLVTSPRTKRTPGPLHRCSLVQDEILCHPVEHVPIPKGRHRGVTVVRSHHGVLICIQVLVRRPHSLSSELTGTCSLLGPDLRPQAQANFFDLENLLDPDARVDTGDCYSNKEGGGEDDVNTARQRRALEKEEEEDKEEEEDEEEEEAGTEIAIILDGSGSIDPPDFQRAKDFISNMMRNFYEKCFECNFALVQYGGVIQTEFDLRDSQDVMASLARVQNITQVGSVTKTASAMQHVLDSIFTSSHGSRRKASKVMVVLTDGGIFEDPLNLTTVINSPKMQGVERFAIGVGEEFKSARTARELNLIASDPDETHAFKVTNYMALDGLLSKLRYNIISMEGTVGDALHYQLAQIGFSAQILDERQVLLGAVGAFDWSGGALLYDTRSRRGRFLNQTAAAAADAEAAQYSYLGYAVAVLHKTCSLSYIAGAPRYKHHGAVFELQKEGREASFLPVLEGEQMGSYFGSELCPVDIDMDGSTDFLLVAAPFYHVHGEEGRVYVYRLSEQDGSFSLARILSGHPGFTNARFGFAMAAMGDLSQDKLTDVAIGAPLEGFGADDGASFGSVYIYNGHWDGLSASPSQRIRASTVAPGLQYFGMSMAGGFDISGDGLADITVGTLGQAVVFRSRPVVRLKVSMAFTPSALPIGFNGVVNVRLCFEISSVTTASESGLREALLNFTLDVDVGKQRRRLQCSDVRSCLGCLREWSSGSQLCEDLLLMPTEGELCEEDCFSNASVKVSYQLQTPEGQTDHPQPILDRYTEPFAIFQLPYEKACKNKLFCVAELQLATTVSQQELVVGLTKELTLNINLTNSGEDSYMTSMALNYPRNLQLKRMQKPPSPNIQCDDPQPVASVLIMNCRIGHPVLKRSSAHVSVVWQLEENAFPNRTADITVTVTNSNERRSLANETHTLQFRHGFVAVLSKPSIMYVNTGQGLSHHKEFLFHVHGENLFGAEYQLQICVPTKLRGLQVVAVKKLTRTQASTVCTWSQERACAYSSVQHVEEWHSVSCVIASDKENVTVAAEISWDHSEELLKDVTELQILGEISFNKSLYEGLNAENHRTKITVVFLKDEKYHSLPIIIKGSVGGLLVLIVILVILFKCGFFKRKYQQLNLESIRKAQLKSENLLEEEN

SEQ ID NO: 18289 - protein, 336 aa, Homo sapiens
MNNNTTCIQPSMISSMALPIIYILLCIVGVFGNTLSQWIFLTKIGKKTSTHIYLSHLVTANLLVCSAMPFMSIYFLKGFQWEYQSAQCRVVNFLGTLSMHASMFVSLLILSWIAISRYATLMQKDSSQETTSCYEKIFYGHLLKKFRQPNFARKLCIYIWGVVLGIIIPVTVYYSVIEATEGEESLCYNRQMELGAMISQIAGLIGTTFIGFSFLVVLTSYYSFVSHLRKIRTCTSIMEKDLTYSSVKRHLLVIQILLIVCFLPYSIFKPIFYVLHQRDNCQQLNYLIETKNILTCLASARSSTDPIIFLLLDKTFKKTLYNLFTKSNSAHMQSYG

SEQ ID NO: 18290 - protein, 330 aa, Homo sapiens
MMWGAGSPLAWLSAGSGNVNVSSVGPAEGPTGPAAPLPSPKAWDVVLCISGTLVSCENALVVAIIVGTPAFRAPMFLLVGSLAVADLLAGLGLVLHFAAVFCIGSAEMSLVLVGVLAMAFTASIGSLLAITVDRYLSLYNALTYYSETTVTRTYVMLALVWGGALGLGLLPVLAWNCLDGLTTCGVVYPLSKNHLVVLAIAFFMVFGIMLQLYAQICRIVCRHAQQIALQRHLLPASHYVATRKGIATLAVVLGAFAACWLPFTVYCLLGDAHSPPLYTYLTLLPATYNSMINPIIYAFRNQDVQKVLWAVCCCCSSSKIPFRSRSPSDV

SEQ ID NO: 18291 - protein, 99 aa, Homo sapiens
MERISAFFSSIWDTILTKHQEGIYNTICLGVLLGLPLLVIITLLFICCHCCWSPPGKRGQQPEKNKKKKKKKKKKDEEDLWISAQPKLLQMEKRPSLPV

SEQ ID NO: 18292 - protein, 594 aa, Homo sapiens
MAVEELQSIIKRCQILEEQDFKEEDFGLFQLAGQRCIEEGHTDQLLEIIQNEKNKVIIKNMGWNLVGPVVRCLLCKDKEDSKRKVYFLIFDLLVKLCNPKELLLGLLELIEEPSGKQISQSILLLLQPLQTVIQKLHNKAYSIGLALSTLWNQLSLLPVPYSKEQIQMDDYGLCQCCKALIEFTKPFVEEVIDNKENSLENEKLKDELLKFCFKSLKCPLLTAQFFEQSEEGGNDPFRYFASEIIGFLSAIGHPFPKMIFNHGRKKRTWNYLEFEEEENKQLADSMASLAYLVFVQGIHIDQLPMVLSPLYLLQFNMGHIEVFLQRTEESVISKGLELLENSLLRIEDNSLLYQYLEIKSFLTVPQGLVKVMTLCPIETLRKKSLAMLQLYINKLDSQGKYTLFRCLLNTSNHSGVEAFIIQNIKNQIDMSLKRTRNNKWFTGPQLISLLDLVLFLPEGAETDLLQNSDRIMASLNLLRYLVIKDNENDNQTGLWTELGNIENNFLKPLHIGLNMSKAHYEAEIKNSQEAQKSKDLCSITVSGEEIPNMPPEMQLKVLHSALFTFDLIESVLARVEELIEIKTKSTSEENIGIK

SEQ ID NO: 18293 - protein, 417 aa, Homo sapiens
MAVEELQSIIKRCQILEEQDFKEEDFGLFQLAGQRCIEEGHTDQLLEIIQNEKNKVIIKNMGWNLVGPVVRCLLCKDKEDSKRKVYFLIFDLLVKLCNPKELLLGLLELIEEPSGKQISQSILLLLQPLQTVIQKLHNKAYSIGLALSTLWNQLSLLPVPYSKEQIQMDDYGLCQCCKALIEFTKPFVEEVIDNKENSLENEKLKDELLKFCFKSLKCPLLTAQFFEQSEEGGNDPFRYFASEIIGFLSAIGHPFPKMIFNHGRKKRTWNYLEFEEEENKQLADSMASLAYLVFVQGIHIDQLPMVLSPLYLLQFNMGHIEVFLQRTEESVISKGLELLENSLLRIEDNSLLYQYLEIKSFLTVPQGLVKVMTLCPIETLRKKSLAMLQLYINKLDSQGKYTLFREHVTTNGLQDHS

SEQ ID NO: 18294 - protein, 419 aa, Homo sapiens
MVFSAVLTAFHTGTSNTTFVVYENTYMNITLPPPFQHPDLSPLLRYSFETMAPTGLSSLTVNSTAVPTTPAAFKSLNLPLQITLSAIMIFILFVSFLGNLVVCLMVYQKAAMRSAINILLASLAFADMLLAVLNMPFALVTILTTRWIFGKFFCRVSAMFFWLFVIEGVAILLIISIDRFLIIVQRQDKLNPYRAKVLIAVSWATSFCVAFPLAVGNPDLQIPSRAPQCVFGYTTNPGYQAYVILISLISFFIPFLVILYSFMGILNTLRHNALRIHSYPEGICLSQASKLGLMSLQRPFQMSIDMGFKTRAFTTILILFAVFIVCWAPFTTYSLVATFSKHFYYQHNFFEISTWLLWLCYLKSALNPLIYYWRIKKFHDACLDMMPKSFKFLPQLPGHTKRRIRPSAVYVCGEHRTVV

SEQ ID NO: 18295 - protein, 1073 aa, Homo sapiens
MKTLLLDLALWSLLFQPGWLSFSSQVSQNCHNGSYEISVLMMGNSAFAEPLKNLEDAVNEGLEIVRGRLQNAGLNVTVNATFMYSDGLIHNSGDCRSSTCEGLDLLRKISNAQRMGCVLIGPSCTYSTFQMYLDTELSYPMISAGSFGLSCDYKETLTRLMSPARKLMYFLVNFWKTNDLPFKTYSWSTSYVYKNGTETEDCFWYLNALEASVSYFSHELGFKVVLRQDKEFQDILMDHNRKSNVIIMCGGPEFLYKLKGDRAVAEDIVIILVDLFNDQYFEDNVTAPDYMKNVLVLTLSPGNSLLNSSFSRNLSPTKRDFALAYLNGILLFGHMLKIFLENGENITTPKFAHAFRNLTFEGYDGPVTLDDWGDVDSTMVLLYTSVDTKKYKVLLTYDTHVNKTYPVDMSPTFTWKNSKLPNDITGRGPQILMIAVFTLTGAVVLLLLVALLMLRKYRKDYELRQKKWSHIPPENIFPLETNETNHVSLKIDDDKRRDTIQRLRQCKYDKKRVILKDLKHNDGNFTEKQKIELNKLLQIDYYNLTKFYGTVKLDTMIFGVIEYCERGSLREVLNDTISYPDGTFMDWEFKISVLYDIAKGMSYLHSSKTEVHGRLKSTNCVVDSRMVVKITDFGCNSILPPKKDLWTAPEHLRQANISQKGDVYSYGIIAQEIILRKETFYTLSCRDRNEKIFRVENSNGMKPFRPDLFLETAEEKELEVYLLVKNCWEEDPEKRPDFKKIETTLAKIFGLFHDQKNESYMDTLIRRLQLYSRNLEHLVEERTQLYKAERDRADRLNFMLLPRLVVKSLKEKGFVEPELYEEVTIYFSDIVGFTTICKYSTPMEVVDMLNDIYKSFDHIVDHHDVYKVETIGDAYMVASGLPKRNGNRHAIDIAKMALEILSFMGTFELEHLPGLPIWIRIGVHSGPCAAGVVGIKMPRYCLFGDTVNTASRMESTGLPLRIHVSGSTIAILKRTECQFLYEVRGETYLKGRGNETTYWLTGMKDQKFNLPTPPTVENQQRLQAEFSDMIANSLQKRQAAGIRSQKPRRVASYKKGTLEYLQLNTTDKESTYF

SEQ ID NO: 18296 - protein, 255 aa, Homo sapiens
MEQALTGEAQSRWPRRGGSGAMAEAPGPSGESRGHSATQLPAEKTVGGPSRGCSSSVLRVSQLVLQAISTHKGLTLAALKKELRNAGYEVRRKSGRHEAPRGQAKATLLRVSGSDAAGYFRVWKVPKPRRKPGRARQEEGTRAPWRTPAAPRSSRRRRQPLRKAARKAREVWRRNARAKAKANARARRTRRARPRAKEPPCARAKEEAGATAADEGRGQAVKEDTTPRSGKDKRRSSKPREEKQEPKKPAQRTIQ

SEQ ID NO: 18297 - protein, 346 aa, Homo sapiens
MAPGSVTSDISPSSTSTAGSSRSPESEKPGPSHGGVPPGGPSHSSLPVGRRHPPVLRMVLEALQAGEQRRGTSVAAIKLYILHKYPTVDVLRFKYLLKQALATGMRRGLLARPLNSKARGATGSFKLVPKHKKKIQPRKMAPATAPRRAGEAKGKGPKKPSEAKEDPPNVGKVKKAAKRPAKVQKPPPKPGAATEKARKQGGAAKDTRAQSGEARKVPPKPDKAMRAPSSAGGLSRKAKAKGSRSSQGDAEAYRKTKAESKSSKPTASKVKNGAASPTKKKVVAKAKAPKAGQGPNTKAAAPAKGSGSKVVPAHLSRKTEAPKGPRKAGLPIKASSSKVSSQRAEA

SEQ ID NO: 18298 - protein, 207 aa, Homo sapiens
MAPATAPRRAGEAKGKGPKKPSEAKEDPPNVGKVKKAAKRPAKVQKPPPKPGAATEKARKQGGAAKDTRAQSGEARKVPPKPDKAMRAPSSAGGLSRKAKAKGSRSSQGDAEAYRKTKAESKSSKPTASKVKNGAASPTKKKVVAKAKAPKAGQGPNTKAAAPAKGSGSKVVPAHLSRKTEAPKGPRKAGLPIKASSSKVSSQRAEA

SEQ ID NO: 18299 - protein, 447 aa, Homo sapiens
MRSVSYVQRVALEFSGSLFPHAICLGDVDNDTLNELVVGDTSGKVSVYKNDDSRPWLTCSCQGMLTCVGVGDVCNKGKNLLVAVSAEGWFHLFDLTPAKVLDASGHHETLIGEEQRPVFKQHIPANTKVMLISDIDGDGCRELVVGYTDRVVRAFRWEELGEGPEHLTGQLVSLKKWMLEGQVDSLSVTLGPLGLPELMVSQPGCAYAILLCTWKKDTGSPPASEGPTDGSRETPAARDVVLHQTSGRIHNKNVSTHLIGNIKQGHGTESSGSGLFALCTLDGTLKLMEEMEEADKLLWSVQVDHQLFALEKLDVTGNGHEEVVACAWDGQTYIIDHNRTVVRFQVDENIRAFCAGLYACKEGRNSPCLVYVTFNQKIYVYWEVQLERMESTNLVKLLETKPEYHSLLQELGVDPDDLPVTRALLHQTLYHPDQPPQCAPSSLQDPT

SEQ ID NO: 18300 - protein, 147 aa, Homo sapiens
MRSVSYVQRVALEFSGSLFPHAICLGDVDNDTLNELVVGDTSGKVSVYKNDDSRPWLTCSCQGMLTCVGVGDVCNKGKNLLVAVSAEGWFHLFDLTPAKVLDASGHHETLIGEEQRPVFKQHIPANTKVMLISDIGGHAYLCRQPGE

SEQ ID NO: 18301 - protein, 525 aa, Homo sapiens
MSCSSRASSSRAGGSSSARVSAGGSSFSSGSRCGLGGSSAQGFRGGASSCSLSGGSSGAFGGSFGGGFGSCSVGGGFGGASGSGTGFGGGSSFGGVSGFGRGSGFCGSSRFSSGATGGFYSYGGGMGGGVGDGGLFSGGEKQTMQNLNDRLANYLDKVRALEEANTDLENKIKEWYDKYGPGSGDGGSGRDYSKYYSIIEDLRNQIIAATVENAGIILHIDNARLAADDFRLKYENELCLRQSVEADINGLRKVLDDLTMTRSDLEMQIESFTEELAYLRKNHEEEMKNMQGSSGGEVTVEMNAAPGTDLTKLLNDMRAQYEELAEQNRREAEERFNKQSASLQAQISTDAGAATSAKNEITELKRTLQALEIELQSQLAMKSSLEGTLADTEAGYVAQLSEIQTQISALEEEICQIWGETKCQNAEYKQLLDIKTRLEVEIETYRRLLDGEGGGSSFAEFGGRNSGSVNMGSRDLVSGDSRSGSCSGQGRDSSKTRVTKTIVEELVDGKVVSSQVSSISEVKVK

SEQ ID NO: 18302 - protein, 930 aa, Homo sapiens
MKPPRPVRTCSKVLVLLSLLAIHQTTTAEKNGIDIYSLTVDSRVSSRFAHTVVTSRVVNRANTVQEATFQMELPKKAFITNFSMIIDGMTYPGIIKEKAEAQAQYSAAVAKGKSAGLVKATGRNMEQFQVSVSVAPNAKITFELVYEELLKRRLGVYELLLKVRPQQLVKHLQMDIHIFEPQGISFLETESTFMTNQLVDALTTWQNKTKAHIRFKPTLSQQQKSPEQQETVLDGNLIIRYDVDRAISGGSIQIENGYFVHYFAPEGLTTMPKNVVFVIDKSGSMSGRKIQQTREALIKILDDLSPRDQFNLIVFSTEATQWRPSLVPASAENVNKARSFAAGIQALGGTNINDAMLMAVQLLDSSNQEERLPEGSVSLIILLTDGDPTVGETNPRSIQNNVREAVSGRYSLFCLGFGFDVSYAFLEKLALDNGGLARRIHEDSDSALQLQDFYQEVANPLLTAVTFEYPSNAVEEVTQNNFRLLFKGSEMVVAGKLQDRGPDVLTATVSGKLPTQNITFQTESSVAEQEAEFQSPKYIFHNFMERLWAYLTIQQLLEQTVSASDADQQALRNQALNLSLAYSFVTPLTSMVVTKPDDQEQSQVAEKPMEGESRNRNVHSGSTFFKYYLQGAKIPKPEASFSPRRGWNRQAGAAGSRMNFRPGVLSSRQLGLPGPPDVPDHAAYHPFRRLAILPASAPPATSNPDPAVSRVMNMKIEETTMTTQTPAPIQAPSAILPLPGQSVERLCVDPRHRQGPVNLLSDPEQGVEVTGQYEREKAGFSWIEVTFKNPLVWVHASPEHVVVTRNRRSSAYKWKETLFSVMPGLKMTMDKTGLLLLSDPDKVTIGLLFWDGRGEGLRLLLRDTDRFSSHVGGTLGQFYQEVLWGSPAASDDGRRTLRVQGNDHSATRERRLDYQEGPPGVEISCWSVEL

SEQ ID NO: 18303 - protein, 914 aa, Homo sapiens
MKPPRPVRTCSKVLVLLSLLAIHQTTTAEKNGIDIYSLTVDSRVSSRFAHTVVTSRVVNRANTVQEATFQMELPKKAFITNFSMIIDGMTYPGIIKEKAEAQAQYSAAVAKGKSAGLVKATGRNMEQFQVSVSVAPNAKITFELVYEELLKRRLGVYELLLKVRPQQLVKHLQMDIHIFEPQGISFLETESTFMTNQLVDALTTWQNKTKAHIRFKPTLSQQQKSPEQQETVLDGNLIIRYDVDRAISGGSIQIENGYFVHYFAPEGLTTMPKNVVFVIDKSGSMSGRKIQQTREALIKILDDLSPRDQFNLIVFSTEATQWRPSLVPASAENVNKARSFAAGIQALGGTNINDAMLMAVQLLDSSNQEERLPEGSVSLIILLTDGDPTVGETNPRSIQNNVREAVSGRYSLFCLGFGFDVSYAFLEKLALDNGGLARRIHEDSDSALQLQDFYQEVANPLLTAVTFEYPSNAVEEVTQNNFRLLFKGSEMVVAGKLQDRGPDVLTATVSGKLPTQNITFQTESSVAEQEAEFQSPKYIFHNFMERLWAYLTIQQLLEQTVSASDADQQALRNQALNLSLAYSFVTPLTSMVVTKPDDQEQSQVAEKPMEGESRNRNVHSAGAAGSRMNFRPGVLSSRQLGLPGPPDVPDHAAYHPFRRLAILPASAPPATSNPDPAVSRVMNMKIEETTMTTQTPACPSCSRSRAPAVPAPIQAPSAILPLPGQSVERLCVDPRHRQGPVNLLSDPEQGVEVTGQYEREKAGFSWIEVTFKNPLVWVHASPEHVVVTRNRRSSAYKWKETLFSVMPGLKMTMDKTGLLLLSDPDKVTIGLLFWDGRGEGLRLLLRDTDRFSSHVGGTLGQFYQEVLWGSPAASDDGRRTLRVQGNDHSATRERRLDYQEGPPGVEISCWSVEL

SEQ ID NO: 18304 - protein, 900 aa, Homo sapiens
MKPPRPVRTCSKVLVLLSLLAIHQTTTAEKNGIDIYSLTVDSRVSSRFAHTVVTSRVVNRANTVQEATFQMELPKKAFITNFSMIIDGMTYPGIIKEKAEAQAQYSAAVAKGKSAGLVKATGRNMEQFQVSVSVAPNAKITFELVYEELLKRRLGVYELLLKVRPQQLVKHLQMDIHIFEPQGISFLETESTFMTNQLVDALTTWQNKTKAHIRFKPTLSQQQKSPEQQETVLDGNLIIRYDVDRAISGGSIQIENGYFVHYFAPEGLTTMPKNVVFVIDKSGSMSGRKIQQTREALIKILDDLSPRDQFNLIVFSTEATQWRPSLVPASAENVNKARSFAAGIQALGGTNINDAMLMAVQLLDSSNQEERLPEGSVSLIILLTDGDPTVGETNPRSIQNNVREAVSGRYSLFCLGFGFDVSYAFLEKLALDNGGLARRIHEDSDSALQLQDFYQEVANPLLTAVTFEYPSNAVEEVTQNNFRLLFKGSEMVVAGKLQDRGPDVLTATVSGKLPTQNITFQTESSVAEQEAEFQSPKYIFHNFMERLWAYLTIQQLLEQTVSASDADQQALRNQALNLSLAYSFVTPLTSMVVTKPDDQEQSQVAEKPMEGESRNRNVHSAGAAGSRMNFRPGVLSSRQLGLPGPPDVPDHAAYHPFRRLAILPASAPPATSNPDPAVSRVMNMKIEETTMTTQTPAPIQAPSAILPLPGQSVERLCVDPRHRQGPVNLLSDPEQGVEVTGQYEREKAGFSWIEVTFKNPLVWVHASPEHVVVTRNRRSSAYKWKETLFSVMPGLKMTMDKTGLLLLSDPDKVTIGLLFWDGRGEGLRLLLRDTDRFSSHVGGTLGQFYQEVLWGSPAASDDGRRTLRVQGNDHSATRERRLDYQEGPPGVEISCWSVEL

SEQ ID NO: 18305 - protein, 845 aa, Homo sapiens
MKPPRPVRTCSKVLVLLSLLAIHQTTTAEKNGIDIYSLTVDSRVSSRFAHTVVTSRVVNRANTVQEATFQMELPKKAFITNFSMIIDGMTYPGIIKEKAEAQAQYSAAVAKGKSAGLVKATGRNMEQFQVSVSVAPNAKITFELVYEELLKRRLGVYELLLKVRPQQLVKHLQMDIHIFEPQGISFLETESTFMTNQLVDALTTWQNKTKAHIRFKPTLSQQQKSPEQQETVLDGNLIIRYDVDRAISGGSIQIENGYFVHYFAPEGLTTMPKNVVFVIDKSGSMSGRKIQQTREALIKILDDLSPRDQFNLIVFSTEATQWRPSLVPASAENVNKARSFAAGIQALGGTNINDAMLMAVQLLDSSNQEERLPEGSVSLIILLTDGDPTVGETNPRSIQNNVREAVSGRYSLFCLGFGFDVSYAFLEKLALDNGGLARRIHEDSDSALQLQDFYQEVANPLLTAVTFEYPSNAVEEVTQNNFRLLFKGSEMVVAGKLQDRGPDVLTATVSGKLPTQNITFQTESSVAEQEAEFQSPKYIFHNFMERLWAYLTIQQLLEQTVSASDADQQALRNQALNLSLAYSFVTPLTSMVVTKPDDQEQSQVAEKPMEGESRNRNVHSAGAAGSRMNFRPGVLSSRQLGLPGPPDVPDHAAYHPFRRLAILPASAPPATSNPDPAVSRVMNMKIEETTMTTQTPGVEVTGQYEREKAGFSWIEVTFKNPLVWVHASPEHVVVTRNRRSSAYKWKETLFSVMPGLKMTMDKTGLLLLSDPDKVTIGLLFWFSSHVGGTLGQFYQEVLWGSPAASDDGRRTLRVQGNDHSATRERRLDYQEGPPGVEISCWSVEL

SEQ ID NO: 18306 - protein, 450 aa, Homo sapiens
MSLRLSSASRRSCPRPTTGSLRLYGGGTSFGTGNSCGISGIGSGFSSAFGGSSSGGNTGGGNPCAGFTVNERGLLSGNEKVTMQNLNDRLASYLDSVHALEEANADLEQKIKGWYEKFGPGSCRGLDHDYSRYFPIIDDLKNQIIASTTSNANAVLQIDNARLTADDFRLKYENELALHQSVEADVNGLRRVLDEITLCRTDLEIQYETLSEEMTYLKKNHKEEMQVLQCAAGGNVNVEMNAAPGVDLTVLLNNMRAEYEALAEQNRRDAEAWFNEKSASLQQQISEDVGATTSARNELTEMKRTLQTLEIELQSLLATKHSLECSLTETESNYCAQLAQIQAQIGALEEQLHQVRTETEGQKLEYEQLLDIKLHLEKEIETYCLLIGGDDGACKSGGYKSKDYGSGNVGSQVKDPAKAIVVKKVLEEVDQRSKILTTRLHSLEEKSQSN

SEQ ID NO: 18307 - protein, 942 aa, Homo sapiens
MLLLLGLCLGLSLCVGSQEEAQSWGHSSEQDGLRVPRQVRLLQRLKTKPLMTEFSVKSTIISRYAFTTVSCRMLNRASEDQDIEFQMQIPAAAFITNFTMLIGDKVYQGEITEREKKSGDRVKEKRNKTTEENGEKGTEIFRASAVIPSKDKAAFFLSYEELLQRRLGKYEHSISVRPQQLSGRLSVDVNILESAGIASLEVLPLHNSRQRGSGRGEDDSGPPPSTVINQNETFANIIFKPTVVQQARIAQNGILGDFIIRYDVNREQSIGDIQVLNGYFVHYFAPKDLPPLPKNVVFVLDSSASMVGTKLRQTKDALFTILHDLRPQDRFSIIGFSNRIKVWKDHLISVTPDSIRDGKVYIHHMSPTGGTDINGALQRAIRLLNKYVAHSGIGDRSVSLIVFLTDGKPTVGETHTLKILNNTREAARGQVCIFTIGIGNDVDFRLLEKLSLENCGLTRRVHEEEDAGSQLIGFYDEIRTPLLSDIRIDYPPSSVVQATKTLFPNYFNGSEIIIAGKLVDRKLDHLHVEVTASNSKKFIILKTDVPVRPQKAGKDVTGSPRPGGDGEGDTNHIERLWSYLTTKELLSSWLQSDDEPEKERLRQRAQALAVSYRFLTPFTSMKLRGPVPRMDGLEEAHGMSAAMGPEPVVQSVRGAGTQPGPLLKKPYQPRIKISKTSVDGDPHFVVDFPLSRLTVCFNIDGQPGDILRLVSDHRDSGVTVNGELIGAPAPPNGHKKQRTYLRTITILINKPERSYLEITPSRVILDGGDRLVLPCNQSVVVGSWGLEVSVSANANVTVTIQGSIAFVILIHLYKKPAPFQRHHLGFYIANSEGLSSNCHGLLGQFLNQDARLTEDPAGPSQNLTHPLLLQVGEGPEAVLTVKGHQVPVVWKQRKIYNGEEQIDCWFARNNAAKLIDGEYKDYLAFHPFDTGMTLGQGMSREL

SEQ ID NO: 18308 - protein, 694 aa, Homo sapiens
MLLLLGLCLGLSLCVGSQEEAQSWGHSSEQDGLRVPRQVRLLQRLKTKPLMTEFSVKSTIISRYAFTTVSCRMLNRASEDQDIEFQMQIPAAAFITNFTMLIGDKVYQGEITEREKKSGDRVKEKRNKTTEENGEKGTEIFRASAVIPSKDKAAFFLSYEELLQRRLGKYEHSISVRPQQLSGRLSVDVNILESAGIASLEVLPLHNSRQRGSGRGEDDSGPPPSTVINQNETFANIIFKPTVVQQARIAQNGILGDFIIRYDVNREQSIGDIQVLNGYFVHYFAPKDLPPLPKNVVFVLDSSASMVGTKLRQTKDALFTILHDLRPQDRFSIIGFSNRIKVWKDHLISVTPDSIRDGKVYIHHMSPTGGTDINGALQRAIRLLNKYVAHSGIGDRSVSLIVFLTDGKPTVGETHTLKILNNTREAARGQVCIFTIGIGNDVDFRLLEKLSLENCGLTRRVHEEEDAGSQLIGFYDEIRTPLLSDIRIDYPPSSVVQATKTLFPNYFNGSEIIIAGKLVDRKLDHLHVEVTASNSKKFIILKTDVPVRPQKAGKDVTGSPRPGGDGEGDTNHIERLWSYLTTKELLSSWLQSDDEPEKERLRQRAQALAVSYRFLTPFTSMKLRGPVPRMDGLEEAHGMSAAMGPEPVVQSVRGAGTQPGPLLKKPNSVKKKQNKTKKRHGRDGVFPLHHLGIR

SEQ ID NO: 18309 - protein, 728 aa, Homo sapiens
MRNYDSGPPPSTVINQNETFANIIFKPTVVQQARIAQNGILGDFIIRYDVNREQSIGDIQVLNGYFVHYFAPKDLPPLPKNVVFVLDSSASMVGTKLRQTKDALFTILHDLRPQDRFSIIGFSNRIKVWKDHLISVTPDSIRDGKVYIHHMSPTGGTDINGALQRAIRLLNKYVAHSGIGDRSVSLIVFLTDGKPTVGETHTLKILNNTREAARGQVCIFTIGIGNDVDFRLLEKLSLENCGLTRRVHEEEDAGSQLIGFYDEIRTPLLSDIRIDYPPSSVVQATKTLFPNYFNGSEIIIAGKLVDRKLDHLHVEVTASNSKKFIILKTDVPVRPQKAGKDVTGSPRPGGDGEGDTNHIERLWSYLTTKELLSSWLQSDDEPEKERLRQRAQALAVSYRFLTPFTSMKLRGPVPRMDGLEEAHGMSAAMGPEPVVQSVRGAGTQPGPLLKKPYQPRIKISKTSVDGDPHFVVDFPLSRLTVCFNIDGQPGDILRLVSDHRDSGVTVNGELIGAPAPPNGHKKQRTYLRTITILINKPERSYLEITPSRVILDGGDRLVLPCNQSVVVGSWGLEVSVSANANVTVTIQGSIAFVILIHLYKKPAPFQRHHLGFYIANSEGLSSNCHGLLGQFLNQDARLTEDPAGPSQNLTHPLLLQVGEGPEAVLTVKGHQVPVVWKQRKIYNGEEQIDCWFARNNAAKLIDGEYKDYLAFHPFDTGMTLGQGMSREL

SEQ ID NO: 18310 - protein, 244 aa, Homo sapiens
MRTYDTPGTSMCIIPDDPHRNPRRFYDEIRTPLLSDIRIDYPPSSVVQATKTLFPNYFNGSEIIIAGKLVDRKLDHLHVEVTASNSKKFIILKTDVPVRPQKAGKDVTGSPRPGGDGEGDTNHIERLWSYLTTKELLSSWLQSDDEPEKERLRQRAQALAVSYRFLTPFTSMKLRGPVPRMDGLEEAHGMSAAMGPEPVVQSVRGAGTQPGPLLKKPYQPRIKISKTSGKAKDAVVCGLRVRDV

SEQ ID NO: 18311 - protein, 468 aa, Homo sapiens
MSFRLSGGSRRICSRTGSGRLSGGGTGFVAGNVCVGSGARSSFSCTLEGISSGGSFCNSGGGLGSGACAGFLGNEHSLLSGNEKVTMQNLNDRLASYLDHVHALEEANADLEQKIKGWYEKCEPGSSREHDHDYSRYFSVIEDLKRQIISATICNASIVLQNDNARLTADDFRLKYENELALHHSVEADTSGLRRVLDELTLCTTDLEIQCETLSEELTYLKKSHEEEMEVLQYTAGGNVNVEMNATPGVDLTVLLNNMRAEYEDLAEQNRKDAEAWFNERSATLQQQISDHEGAATAARNELTELKRNLQTLEIELQSLMAVKHSYECSLAETEGNYCNQLQQIQDQIGVMEEQLQQIRTETEGQKLEYEQLLDVKIFLEKEIDIYCNLLDGEERKSKSTCYKSKGYRPVNSGNQAKDSTEETIVKTVVEELDQIGNLLSLRVHSVEEKSSKISNITVEQRVPSKAP

SEQ ID NO: 18312 - protein, 585 aa, Homo sapiens
MSQQHTLPVTLSPALSQELLKTVPPPVNTHQEQMKQPTPLPPPCQKVPVELPVEVPSKQEEKHMTAVKGLPEQECEQQQKEPQEQELQQQHWEQHEEYQKAENPEQQLKQEKTQRDQQLNKQLEEEKKLLDQQLDQELVKRDEQLGMKKEQLLELPEQQEGHLKHLEQQEGQLKHPEQQEGQLELPEQQEGQLELPEQQEGQLELPEQQEGQLELPEQQEGQLELPEQQEGQLELPQQQEGQLELSEQQEGQLELSEQQEGQLKHLEHQEGQLEVPEEQMGQLKYLEQQEGQLKHLDQQEKQPELPEQQMGQLKHLEQQEGQPKHLEQQEGQLEQLEEQEGQLKHLEQQEGQLEHLEHQEGQLGLPEQQVLQLKQLEKQQGQPKHLEEEEGQLKHLVQQEGQLKHLVQQEGQLEQQERQVEHLEQQVGQLKHLEEQEGQLKHLEQQQGQLEVPEQQVGQPKNLEQEEKQLELPEQQEGQVKHLEKQEAQLELPEQQVGQPKHLEQQEKHLEHPEQQDGQLKHLEQQEGQLKDLEQQKGQLEQPVFAPAPGQVQDIQPALPTKGEVLLPVEHQQQKQEVQWPPKHK

SEQ ID NO: 18313 - protein, 313 aa, Homo sapiens
MNQLSFLLFLIATTRGWSTDEANTYFKEWTCSSSPSLPRSCKEIKDECPSAFDGLYFLRTENGVIYQTFCDMTSGGGGWTLVASVHENDMRGKCTVGDRWSSQQGSKAVYPEGDGNWANYNTFGSAEAATSDDYKNPGYYDIQAKDLGIWHVPNKSPMQHWRNSSLLRYRTDTGFLQTLGHNLFGIYQKYPVKYGEGKCWTDNGPVIPVVYDFGDAQKTASYYSPYGQREFTAGFVQFRVFNNERAANALCAGMRVTGCNTEHHCIGGGGYFPEASPQQCGDFSGFDWSGYGTHVGYSSSREITEAAVLLFYR

SEQ ID NO: 18314 - protein, 325 aa, Homo sapiens
MLSMLRTMTRLCFLLFFSVATSGCSAAAASSLEMLSREFETCAFSFSSLPRSCKEIKERCHSAGDGLYFLRTKNGVVYQTFCDMTSGGGGWTLVASVHENDMRGKCTVGDRWSSQQGNKADYPEGDGNWANYNTFGSAEAATSDDYKNPGYYDIQAKDLGIWHVPNKSPMQHWRNSALLRYRTNTGFLQRLGHNLFGIYQKYPVKYRSGKCWNDNGPAIPVVYDFGDAKKTASYYSPYGQREFVAGFVQFRVFNNERAANALCAGIKVTGCNTEHHCIGGGGFFPQGKPRQCGDFSAFDWDGYGTHVKSSCSREITEAAVLLFYR

SEQ ID NO: 18315 - protein, 324 aa, Homo sapiens
MLSMLRTMTRLCFLLFFSVATSGCSAAASSLEMLSREFETCAFSFSSLPRSCKEIKERCHSAGDGLYFLRTKNGVVYQTFCDMTSGGGGWTLVASVHENDMRGKCTVGDRWSSQQGNKADYPEGDGNWANYNTFGSAEAATSDDYKNPGYYDIQAKDLGIWHVPNKSPMQHWRNSALLRYRTNTGFLQRLGHNLFGIYQKYPVKYRSGKCWNDNGPAIPVVYDFGDAKKTASYYSPYGQREFVAGFVQFRVFNNERAANALCAGIKVTGCNTEHHCIGGGGFFPQGKPRQCGDFSAFDWDGYGTHVKSSCSREITEAAVLLFYR

SEQ ID NO: 18316 - protein, 263 aa, Homo sapiens
MVKIAFNTPTAVQKEEARQDVEALLSRTVRTQILTGKELRVATQEKEGSSGRCMLTLLGLSFILAGLIVGGACIYKYFMPKSTIYRGEMCFFDSEDPANSLRGGEPNFLPVTEEADIREDDNIAIIDVPVPSFSDSDPAAIIHDFEKGMTAYLDLLLGNCYLMPLNTSIVMPPKNLVELFGKLASGRYLPQTYVVREDLVAVEEIRDVSNLGIFIYQLCNNRKSFRLRRRDLLLGFNKRAIDKCWKIRHFPNEFIVETKICQE

SEQ ID NO: 18317 - protein, 219 aa, Homo sapiens
MVKIAFNTPTAVQKEEARQDVEALLSRTVRTQILTGKSTIYRGEMCFFDSEDPANSLRGGEPNFLPVTEEADIREDDNIAIIDVPVPSFSDSDPAAIIHDFEKGMTAYLDLLLGNCYLMPLNTSIVMPPKNLVELFGKLASGRYLPQTYVVREDLVAVEEIRDVSNLGIFIYQLCNNRKSFRLRRRDLLLGFNKRAIDKCWKIRHFPNEFIVETKICQE

SEQ ID NO: 18318 - protein, 267 aa, Homo sapiens
MVKISFQPAVAGIKGDKADKASASAPAPASATEILLTPAREEQPPQHRSKRGGSVGGVCYLSMGMVVLLMGLVFASVYIYRYFFLAQLARDNFFRCGVLYEDSLSSQVRTQMELEEDVKIYLDENYERINVPVPQFGGGDPADIIHDFQRGLTAYHDISLDKCYVIELNTTIVLPPRNFWELLMNVKRGTYLPQTYIIQEEMVVTEHVSDKEALGSFIYHLCNGKDTYRLRRRATRRRINKRGAKNCNAIRHFENTFVVETLICGVV

SEQ ID NO: 18319 - protein, 220 aa, Homo sapiens
MVKISFQPAVAGIKGDKADKASASAPAPASATEILLTPARLARDNFFRCGVLYEDSLSSQVRTQMELEEDVKIYLDENYERINVPVPQFGGGDPADIIHDFQRGLTAYHDISLDKCYVIELNTTIVLPPRNFWELLMNVKRGTYLPQTYIIQEEMVVTEHVSDKEALGSFIYHLCNGKDTYRLRRRATRRRINKRGAKNCNAIRHFENTFVVETLICGVV

SEQ ID NO: 18320 - protein, 230 aa, Homo sapiens
MVKISFQPAVAGIKGDKADKASASAPAPASATEILLTPAREEQPPQHRSKRGGSVGGVCYLSMGMVVLLMGLVFASVYIYRYFFLAQLARDNFFRCGVLYEDSLSSQVRTQMELEEDVKIYLDENYERINVPVPQFGGGDPADIIHDFQRRGTYLPQTYIIQEEMVVTEHVSDKEALGSFIYHLCNGKDTYRLRRRATRRRINKRGAKNCNAIRHFENTFVVETLICGVV

SEQ ID NO: 18321 - protein, 381 aa, Homo sapiens
MPFSNSHNALKLRFPAEDEFPDLSAHNNHMAKVLTPELYAELRAKSTPSGFTLDDVIQTGVDNPGHPYIMTVGCVAGDEESYEVFKDLFDPIIEDRHGGYKPSDEHKTDLNPDNLQGGDDLDPNYVLSSRVRTGRSIRGFCLPPHCSRGERRAIEKLAVEALSSLDGDLAGRYYALKSMTEAEQQQLIDDHFLFDKPVSPLLLASGMARDWPDARGIWHNDNKTFLVWVNEEDHLRVISMQKGGNMKEVFTRFCTGLTQIETLFKSKDYEFMWNPHLGYILTCPSNLGTGLRAGVHIKLPNLGKHEKFSEVLKRLRLQKRGTGGVDTAAVGGVFDVSNADRLGFSEVELVQMVVDGVKLLIEMEQRLEQGQAIDDLMPAQK

SEQ ID NO: 18322 - protein, 486 aa, Homo sapiens
MDSSVIQRKKVAVIGGGLVGSLQACFLAKRNFQIDVYEAREDTRVATFTRGRSINLALSHRGRQALKAVGLEDQIVSQGIPMRARMIHSLSGKKSAIPYGTKSQYILSVSRENLNKDLLTAAEKYPNVKMHFNHRLLKCNPEEGMITVLGSDKVPKDVTCDLIVGCDGAYSTVRSHLMKKPRFDYSQQYIPHGYMELTIPPKNGDYAMEPNYLHIWPRNTFMMIALPNMNKSFTCTLFMPFEEFEKLLTSNDVVDFFQKYFPDAIPLIGEKLLVQDFFLLPAQPMISVKCSSFHFKSHCVLLGDAAHAIVPFFGQGMNAGFEDCLVFDELMDKFSNDLSLCLPVFSRLRIPDDHAISDLSMYNYIEMRAHVNSSWFIFQKNMERFLHAIMPSTFIPLYTMVTFSRIRYHEAVQRWHWQKKVINKGLFFLGSLIAISSTYLLIHYMSPRSFLRLRRPWNWIAHFRNTTCFPAKAVDSLEQISNLISR

SEQ ID NO: 18323 - protein, 473 aa, Homo sapiens
MDSSVIQRKKVAVIGGGLVGSLQACFLAKRNFQIDVYEAREDTRVATFTRGRSINLALSHRGRQALKAVGLEDQIVSQGIPMRARMIHSLSGKKSAIPYGTKSQYILSVSRENLNKDLLTAAEKYPNVKMHFNHRLLKCNPEEGMITVLGSDKVPKDVTCDLIVGCDGAYSTVRSHLMKKPRFDYSQQYIPHGYMELTIPPKNGDYAMEPNYLHIWPRNTFMMIALPNMNKSFTCTLFMPFEEFEKLLTSNDVVDFFQKYFPDAIPLIGEKLLVQDFFLLPAQPMISVKCSSFHFKSHCVLLGDAAHAIVPFFGQGMNAGFEDCLVFDELMDKFSNDLSLCLPVFSRLRIPDDHAISDLSMYNYIEKNMERFLHAIMPSTFIPLYTMVTFSRIRYHEAVQRWHWQKKVINKGLFFLGSLIAISSTYLLIHYMSPRSFLRLRRPWNWIAHFRNTTCFPAKAVDSLEQISNLISR

SEQ ID NO: 18324 - protein, 452 aa, Homo sapiens
MDSSVIQRKKVAVIGGGLVGSLQACFLAKRNFQIDVYEAREDTRVATFTRGRSINLALSHRGRQALKAVGLEDQIVSQGIPMRARMIHSLSGKKSAIPYGTKSQYILSVSRENLNKDLLTAAEKYPNVKMHFNHRLLKCNPEEGMITVLGSDKVPKDVTCDLIVGCDGAYSTVRSHLMKKPRFDYSQQYIPHGYMELTIPPKNGDYAMEPNYLHIWPRNTFMMIALPNMNKSFTCTLFMPFEEFEKLLTSNDVVDFFQKYFPDAIPLIGEKLLVQDFFLLPAQPMISVKCSSFHFKSHCVLLGDAAHAIVPFFGQGMNAGFEDCLVFDELMDKFSNDLSLCLPVFSRLRIPDDHAISDLSMYNYIEVTFSRIRYHEAVQRWHWQKKVINKGLFFLGSLIAISSTYLLIHYMSPRSFLRLRRPWNWIAHFRNTTCFPAKAVDSLEQISNLISR

SEQ ID NO: 18325 - protein, 197 aa, Homo sapiens
MSGPRPVVLSGPSGAGKSTLLKRLLQEHSGIFGFSVSHTTRNPRPGEENGKDYYFVTREVMQRDIAAGDFIEHAEFSGNLYGTSKVAVQAVQAMNRICVLDVDLQGVRNIKATDLRPIYISVQPPSLHVLEQRLRQRNTETEESLVKRLAAAQADMESSKEPGLFDVVIINDSLDQAYAELKEALSEEIKKAQRTGA

SEQ ID NO: 18326 - protein, 218 aa, Homo sapiens
MLRRPLAGLAAAALGRAPPDGMSGPRPVVLSGPSGAGKSTLLKRLLQEHSGIFGFSVSHTTRNPRPGEENGKDYYFVTREVMQRDIAAGDFIEHAEFSGNLYGTSKVAVQAVQAMNRICVLDVDLQGVRNIKATDLRPIYISVQPPSLHVLEQRLRQRNTETEESLVKRLAAAQADMESSKEPGLFDVVIINDSLDQAYAELKEALSEEIKKAQRTGA

SEQ ID NO: 18327 - protein, 241 aa, Homo sapiens
MLRRPLAGLAAAALGRAPPDGMSGPRPVVLSGPSGAGKSTLLKRLLQEHSGIFGFSVSHTTRNPRPGEENGKDYYFVTREVMQRDIAAGDFIEHAEFSGNLYGTSKVAVQAVQAMNRICVLDVDLQGVRNIKATDLRPIYISVQPPSLHVLEQRLRQRNTETEESLVKRLAAAQADMESRNQESSKDRRLRLAVCSRHPGPIQDQGSSIEPPPWQAIRQLCALGQHVEWRRCCPCGWNILG

SEQ ID NO: 18328 - protein, 381 aa, Homo sapiens
MPFGNTHNKFKLNYKPEEEYPDLSKHNNHMAKVLTLELYKKLRDKETPSGFTVDDVIQTGVDNPGHPFIMTVGCVAGDEESYEVFKELFDPIISDRHGGYKPTDKHKTDLNHENLKGGDDLDPNYVLSSRVRTGRSIKGYTLPPHCSRGERRAVEKLSVEALNSLTGEFKGKYYPLKSMTEKEQQQLIDDHFLFDKPVSPLLLASGMARDWPDARGIWHNDNKSFLVWVNEEDHLRVISMEKGGNMKEVFRRFCVGLQKIEEIFKKAGHPFMWNQHLGYVLTCPSNLGTGLRGGVHVKLAHLSKHPKFEEILTRLRLQKRGTGGVDTAAVGSVFDVSNADRLGSSEVEQVQLVVDGVKLMVEMEKKLEKGQSIDDMIPAQK

SEQ ID NO: 18329 - protein, 419 aa, Homo sapiens
MASIFSKLLTGRNASLLFATMGTSVLTTGYLLNRQKVCAEVREQPRLFPPSADYPDLRKHNNCMAECLTPAIYAKLRNKVTPNGYTLDQCIQTGVDNPGHPFIKTVGMVAGDEESYEVFADLFDPVIKLRHNGYDPRVMKHTTDLDASKITQGQFDEHYVLSSRVRTGRSIRGLSLPPACTRAERREVENVAITALEGLKGDLAGRYYKLSEMTEQDQQRLIDDHFLFDKPVSPLLTCAGMARDWPDARGIWHNYDKTFLIWINEEDHTRVISMEKGGNMKRVFERFCRGLKEVERLIQERGWEFMWNERLGYILTCPSNLGTGLRAGVHVRIPKLSKDPRFSKILENLRLQKRGTGGVDTAAVADVYDISNIDRIGRSEVELVQIVIDGVNYLVDCEKKLERGQDIKVPPPLPQFGKK

SEQ ID NO: 18330 - protein, 531 aa, Homo sapiens
MSKPHSEAGTAFIQTQQLHAAMADTFLEHMCRLDIDSPPITARNTGIICTIGPASRSVETLKEMIKSGMNVARLNFSHGTHEYHAETIKNVRTATESFASDPILYRPVAVALDTKGPEIRTGLIKGSGTAEVELKKGATLKITLDNAYMEKCDENILWLDYKNICKVVEVGSKIYVDDGLISLQVKQKGADFLVTEVENGGSLGSKKGVNLPGAAVDLPAVSEKDIQDLKFGVEQDVDMVFASFIRKASDVHEVRKVLGEKGKNIKIISKIENHEGVRRFDEILEASDGIMVARGDLGIEIPAEKVFLAQKMMIGRCNRAGKPVICATQMLESMIKKPRPTRAEGSDVANAVLDGADCIMLSGETAKGDYPLEAVRMQHLIAREAEAAIYHLQLFEELRRLAPITSDPTEATAVGAVEASFKCCSGAIIVLTKSGRSAHQVARYRPRAPIIAVTRNPQTARQAHLYRGIFPVLCKDPVQEAWAEDVDLRVNFAMNVGKARGFFKKGDVVIVLTGWRPGSGFTNTMRVVPVP

SEQ ID NO: 18331 - protein, 531 aa, Homo sapiens
MSKPHSEAGTAFIQTQQLHAAMADTFLEHMCRLDIDSPPITARNTGIICTIGPASRSVETLKEMIKSGMNVARLNFSHGTHEYHAETIKNVRTATESFASDPILYRPVAVALDTKGPEIRTGLIKGSGTAEVELKKGATLKITLDNAYMEKCDENILWLDYKNICKVVEVGSKIYVDDGLISLQVKQKGADFLVTEVENGGSLGSKKGVNLPGAAVDLPAVSEKDIQDLKFGVEQDVDMVFASFIRKASDVHEVRKVLGEKGKNIKIISKIENHEGVRRFDEILEASDGIMVARGDLGIEIPAEKVFLAQKMMIGRCNRAGKPVICATQMLESMIKKPRPTRAEGSDVANAVLDGADCIMLSGETAKGDYPLEAVRMQHLIAREAEAAMFHRKLFEELVRASSHSTDLMEAMAMGSVEASYKCLAAALIVLTESGRSAHQVARYRPRAPIIAVTRNPQTARQAHLYRGIFPVLCKDPVQEAWAEDVDLRVNFAMNVGKARGFFKKGDVVIVLTGWRPGSGFTNTMRVVPVP

SEQ ID NO: 18332 - protein, 516 aa, Homo sapiens
MSPEAQPQRTKGPQQPCRSPIVKPGLPSFRPSSCTQPWLTHSWSTCAAWTLIHHPSQPGTLASSVPLYHAETIKNVRTATESFASDPILYRPVAVALDTKGPEIRTGLIKGSGTAEVELKKGATLKITLDNAYMEKCDENILWLDYKNICKVVEVGSKIYVDDGLISLQVKQKGADFLVTEVENGGSLGSKKGVNLPGAAVDLPAVSEKDIQDLKFGVEQDVDMVFASFIRKASDVHEVRKVLGEKGKNIKIISKIENHEGVRRFDEILEASDGIMVARGDLGIEIPAEKVFLAQKMMIGRCNRAGKPVICATQMLESMIKKPRPTRAEGSDVANAVLDGADCIMLSGETAKGDYPLEAVRMQHLIAREAEAAIYHLQLFEELRRLAPITSDPTEATAVGAVEASFKCCSGAIIVLTKSGRSAHQVARYRPRAPIIAVTRNPQTARQAHLYRGIFPVLCKDPVQEAWAEDVDLRVNFAMNVGKARGFFKKGDVVIVLTGWRPGSGFTNTMRVVPVP

SEQ ID NO: 18333 - protein, 265 aa, Homo sapiens
MLLWPLRGWAARALRCFGPGSRGSPASGPGPRRVQRRAWPPDKEQEKEKKSVICVEGNIASGKTTCLEFFSNATDVEVLTEPVSKWRNVRGHNPLGLMYHDASRWGLTLQTYVQLTMLDRHTRPQVSSVRLMERSIHSARYIFVENLYRSGKMPEVDYVVLSEWFDWILRNMDVSVDLIVYLRTNPETCYQRLKKRCREEEKVIPLEYLEAIHHLHEEWLIKGSLFPMAAPVLVIEADHHMERMLELFEQNRDRILTPENRKHCP

SEQ ID NO: 18334 - protein, 234 aa, Homo sapiens
MGAFCQRPSSDKEQEKEKKSVICVEGNIASGKTTCLEFFSNATDVEVLTEPVSKWRNVRGHNPLGLMYHDASRWGLTLQTYVQLTMLDRHTRPQVSSVRLMERSIHSARYIFVENLYRSGKMPEVDYVVLSEWFDWILRNMDVSVDLIVYLRTNPETCYQRLKKRCREEEKVIPLEYLEAIHHLHEEWLIKGSLFPMAAPVLVIEADHHMERMLELFEQNRDRILTPENRKHCP

SEQ ID NO: 18335 - protein, 240 aa, Homo sapiens
MLLWPLRGWAARALRCFGPGSRGSPASGPGPRRVQRRAWPPDKEQEKEKKSVVLTEPVSKWRNVRGHNPLGLMYHDASRWGLTLQTYVQLTMLDRHTRPQVSSVRLMERSIHSARYIFVENLYRSGKMPEVDYVVLSEWFDWILRNMDVSVDLIVYLRTNPETCYQRLKKRCREEEKVIPLEYLEAIHHLHEEWLIKGSLFPMAAPVLVIEADHHMERMLELFEQNRDRILTPENRKHCP

SEQ ID NO: 18336 - protein, 247 aa, Homo sapiens
MLLWPLRGWAARALRCFGPGSRGSPASGPGPRRVQRRAWPPDKEQEKEKKSVICVEGNIASGKTTCLEFFSNATDVEGLMYHDASRWGLTLQTYVQLTMLDRHTRPQVSSVRLMERSIHSARYIFVENLYRSGKMPEVDYVVLSEWFDWILRNMDVSVDLIVYLRTNPETCYQRLKKRCREEEKVIPLEYLEAIHHLHEEWLIKGSLFPMAAPVLVIEADHHMERMLELFEQNRDRILTPENRKHCP

SEQ ID NO: 18337 - protein, 168 aa, Homo sapiens
MYHDASRWGLTLQTYVQLTMLDRHTRPQVSSVRLMERSIHSARYIFVENLYRSGKMPEVDYVVLSEWFDWILRNMDVSVDLIVYLRTNPETCYQRLKKRCREEEKVIPLEYLEAIHHLHEEWLIKGSLFPMAAPVLVIEADHHMERMLELFEQNRDRILTPENRKHCP

SEQ ID NO: 18338 - protein, 307 aa, Homo sapiens
MRPGLFKGQAPGSRRRPTAGLAVVRADSHKKEPRASGSARPAMLLWPLRGWAARALRCFGPGSRGSPASGPGPRRVQRRAWPPDKEQEKEKKSVICVEGNIASGKTTCLEFFSNATDVEVLTEPVSKWRNVRGHNPLGLMYHDASRWGLTLQTYVQLTMLDRHTRPQVSSVRLMERSIHSARYIFVENLYRSGKMPEVDYVVLSEWFDWILRNMDVSVDLIVYLRTNPETCYQRLKKRCREEEKVIPLEYLEAIHHLHEEWLIKGSLFPMAAPVLVIEADHHMERMLELFEQNRDRILTPENRKHCP

SEQ ID NO: 18339 - protein, 1223 aa, Homo sapiens
MRSRSNSGVRLDGYARLVQQTILCHQNPVTGLLPASYDQKDAWVRDNVYSILAVWGLGLAYRKNADRDEDKAKAYELEQSVVKLMRGLLHCMIRQVDKVESFKYSQSTKDSLHAKYNTKTCATVVGDDQWGHLQLDATSVYLLFLAQMTASGLHIIHSLDEVNFIQNLVFYIEAAYKTADFGIWERGDKTNQGISELNASSVGMAKAALEALDELDLFGVKGGPQSVIHVLADEVQHCQSILNSLLPRASTSKEVDASLLSVVSFPAFAVEDSQLVELTKQEIITKLQGRYGCCRFLRDGYKTPKEDPNRLYYEPAELKLFENIECEWPLFWTYFILDGVFSGNAEQVQEYKEALEAVLIKGKNGVPLLPELYSVPPDRVDEEYQNPHTVDRVPMGKLPHMWGQSLYILGSLMAEGFLAPGEIDPLNRRFSTVPKPDVVVQVSILAETEEIKTILKDKGIYVETIAEVYPIRVQPARILSHIYSSLGCNNRMKLSGRPYRHMGVLGTSKLYDIRKTIFTFTPQFIDQQQFYLALDNKMIVEMLRTDLSYLCSRWRMTGQPTITFPISHSMLDEDGTSLNSSILAALRKMQDGYFGGARVQTGKLSEFLTTSCCTHLSFMDPGPEGKLYSEDYDDNYDYLESGNWMNDYDSTSHARCGDEVARYLDHLLAHTAPHPKLAPTSQKGGLDRFQAAVQTTCDLMSLVTKAKELHVQNVHMYLPTKLFQASRPSFNLLDSPHPRQENQVPSVRVEIHLPRDQSGEVDFKALVLQLKETSSLQEQADILYMLYTMKGPDWNTELYNERSATVRELLTELYGKVGEIRHWGLIRYISGILRKKVEALDEACTDLLSHQKHLTVGLPPEPREKTISAPLPYEALTQLIDEASEGDMSISILTQEIMVYLAMYMRTQPGLFAEMFRLRIGLIIQVMATELAHSLRCSAEEATEGLMNLSPSAMKNLLHHILSGKEFGVERSVRPTDSNVSPAISIHEIGAVGATKTERTGIMQLKSEIKQVEFRRLSISAESQSPGTSMTPSSGSFPSAYDQQSSKDSRQGQWQRRRRLDGALNRVPVGFYQKVWKVLQKCHGLSVEGFVLPSSTTREMTPGEIKFSVHVESVLNRVPQPEYRQLLVEAILVLTMLADIEIHSIGSIIAVEKIVHIANDLFLQEQKTLGADDTMLAKDPASGICTLLYDSAPSGRFGTMTYLSKAAATYVQEFLPHSICAMQ

SEQ ID NO: 18340 - protein, 1210 aa, Homo sapiens
MRSRSNSGVRLDGYARLVQQTILCHQNPVTGLLPASYDQKDAWVRDNVYSILAVWGLGLAYRKNADRDEDKAKAYELEQSVVKLMRGLLHCMIRQVDKVESFKYSQSTKDSLHAKYNTKTCATVVGDDQWGHLQLDATSVYLLFLAQMTASGLHIIHSLDEVNFIQNLVFYIEAAYKTADFGIWERGDKTNQGISELNASSVGMAKAALEALDELDLFGVKGGPQSVIHVLADEVQHCQSILNSLLPRASTSKEVDASLLSVVSFPAFAVEDSQLVELTKQEIITKLQGRYGCCRFLRDGYKTPKEDPNRLYYEPAELKLFENIECEWPLFWTYFILDGVFSGNAEQVQEYKEALEAVLIKGKNGVPLLPELYSVPPDRVDEEYQNPHTVDRVPMGKLPHMWGQSLYILGSLMAEGFLAPGEIDPLNRRFSTVPKPDVVVQVSILAETEEIKTILKDKGIYVETIAEVYPIRVQPARILSHIYSSLGCNNRMKLSGRPYRHMGVLGTSKLYDIRKTIFTFTPQFIDQQQFYLALDNKMIVEMLRTDLSYLCSRWRMTGQPTITFPISHSMLDEDGTSLNSSILAALRKMQDGYFGGARVQTGKLSEFLTTSCCTHLSFMDPGPEGKLYSEDYDDNYDYLESGNWMNDYDSTSHARCGDEVARYLDHLLAHTAPHPKLAPTSQKGGLDRFQAAVQTTCDLMSLVTKAKELHVQNVHMYLPTKLFQASRPSFNLLDSPHPRQENQVPSVRVEIHLPRDQSGEVDFKALVLQLKETSSLQEQADILYMLYTMKGPDWNTELYNERSATVRELLTELYGKVGEIRHWGLIRYISGILRKKVEALDEACTDLLSHQKHLTVGLPPEPREKTISAPLPYEALTQLIDEASEGDMSISILTQEIMVYLAMYMRTQPGLFAEMFRLRIGLIIQVMATELAHSLRCSAEEATEGLMNLSPSAMKNLLHHILSGKEFGVERSVRPTDSNVSPAISIHEIGAVGATKTERTGIMQLKSEIKQSPGTSMTPSSGSFPSAYDQQSSKDSRQGQWQRRRRLDGALNRVPVGFYQKVWKVLQKCHGLSVEGFVLPSSTTREMTPGEIKFSVHVESVLNRVPQPEYRQLLVEAILVLTMLADIEIHSIGSIIAVEKIVHIANDLFLQEQKTLGADDTMLAKDPASGICTLLYDSAPSGRFGTMTYLSKAAATYVQEFLPHSICAMQ

SEQ ID NO: 18341 - protein, 1151 aa, Homo sapiens
MRSRSNSGVRLDGYARLVQQTILCHQNPVTGLLPASYDQKDAWVRDNVYSILAVWGLGLAYRKNADRDEDKAKAYELEQSVVKLMRGLLHCMIRQVDKVESFKYSQSTKDSLHAKYNTKTCATVVGDDQWGHLQLDATSVYLLFLAQMTASGLHIIHSLDEVNFIQNLVFYIEAAYKTADFGIWERGDKTNQGISELNASSVGMAKAALEALDELDLFGVKGGPQSVIHVLADEVQHCQSILNSLLPRASTSKEVDASLLSVVSFPAFAVEDSQLVELTKQEIITKLQGRYGCCRFLRDGYKTPKEDPNRLYYEPAELKLFENIECEWPLFWTYFILDGVFSGNAEQVQEYKEALEAVLIKGKNGVPLLPELYSVPPDRVDEEYQNPHTVDRVPMGKLPHMWGQSLYILGSLMAEGFLAPGEIDPLNRRFSTVPKPDVVVQVSILAETEEIKTILKDKGIYVETIAEVYPIRVQPARILSHIYSSLGCNNRMKLSGRPYRHMGVLGTSKLYDIRKTIFTFTPQFIDQQQFYLALDNKMIVEMLRTDLSYLCSRWRMTGQPTITFPISHSMLDEDGTSLNSSILAALRKMQDGYFGGARVQTGKLSEFLTTSCCTHLSFMDPGPEGKLYSEDYDDNYDYLESGNWMNDYDSTSHDVHMYLPTKLFQASRPSFNLLDSPHPRQENQVPSVRVEIHLPRDQSGEVDFKALVLQLKETSSLQEQADILYMLYTMKGPDWNTELYNERSATVRELLTELYGKVGEIRHWGLIRYISGILRKKVEALDEACTDLLSHQKHLTVGLPPEPREKTISAPLPYEALTQLIDEASEGDMSISILTQEIMVYLAMYMRTQPGLFAEMFRLRIGLIIQVMATELAHSLRCSAEEATEGLMNLSPSAMKNLLHHILSGKEFGVERSVRPTDSNVSPAISIHEIGAVGATKTERTGIMQLKSEIKQSPGTSMTPSSGSFPSAYDQQSSKDSRQGQWQRRRRLDGALNRVPVGFYQKVWKVLQKCHGLSVEGFVLPSSTTREMTPGEIKFSVHVESVLNRVPQPEYRQLLVEAILVLTMLADIEIHSIGSIIAVEKIVHIANDLFLQEQKTLGADDTMLAKDPASGICTLLYDSAPSGRFGTMTYLSKAAATYVQEFLPHSICAMQ

SEQ ID NO: 18342 - protein, 130 aa, Homo sapiens
MSGRGKQGGKARAKAKSRSSRAGLQFPVGRVHRLLRKGNYAERVGAGAPVYLAAVLEYLTAEILELAGNAARDNKKTRIIPRHLQLAIRNDEELNKLLGRVTIAQGGVLPNIQAVLLPKKTESHHKAKGK

SEQ ID NO: 18343 - protein, 142 aa, Homo sapiens
MALSAEDRALVRALWKKLGSNVGVYTTEALERTFLAFPATKTYFSHLDLSPGSSQVRAHGQKVADALSLAVERLDDLPHALSALSHLHACQLRVDPASFQLLGHCLLVTLARHYPGDFSPALQASLDKFLSHVISALVSEYR

SEQ ID NO: 18344 - protein, 128 aa, Homo sapiens
MSGRGKQGGKARAKAKTRSSRAGLQFPVGRVHRLLRKGNYAERVGAGAPVYLAAVLEYLTAEILELAGNAARDNKKTRIIPRHLQLAIRNDEELNKLLGKVTIAQGGVLPNIQAVLLPKKTESHHKTK

SEQ ID NO: 18345 - protein, 129 aa, Homo sapiens
MSGRGKQGGKARAKAKSRSSRAGLQFPVGRVHRLLRKGNYAERVGAGAPVYMAAVLEYLTAEILELAGNAARDNKKTRIIPRHLQLAIRNDEELNKLLGKVTIAQGGVLPNIQAVLLPKKTESHKAKSK

SEQ ID NO: 18346 - protein, 731 aa, Homo sapiens
MDTSGHFHDSGVGDLDEDPKCPCPSSGDEQQQQQQQQQQQQPPPPAPPAAPQQPLGPSLQPQPPQLQQQQQQQQQQQQQQPPHPLSQLAQLQSQPVHPGLLHSSPTAFRAPPSSNSTAILHPSSRQGSQLNLNDHLLGHSPSSTATSGPGGGSRHRQASPLVHRRDSNPFTEIAMSSCKYSGGVMKPLSRLSASRRNLIEAETEGQPLQLFSPSNPPEIVISSREDNHAHQTLLHHPNATHNHQHAGTTASSTTFPKANKRKNQNIGYKLGHRRALFEKRKRLSDYALIFGMFGIVVMVIETELSWGLYSKDSMFSLALKCLISLSTIILLGLIIAYHTREVQLFVIDNGADDWRIAMTYERILYISLEMLVCAIHPIPGEYKFFWTARLAFSYTPSRAEADVDIILSIPMFLRLYLIARVMLLHSKLFTDASSRSIGALNKINFNTRFVMKTLMTICPGTVLLVFSISLWIIAAWTVRVCERYHDQQDVTSNFLGAMWLISITFLSIGYGDMVPHTYCGKGVCLLTGIMGAGCTALVVAVVARKLELTKAEKHVHNFMMDTQLTKRIKNAAANVLRETWLIYKHTKLLKKIDHAKVRKHQRKFLQAIHQLRSVKMEQRKLSDQANTLVDLSKMQNVMYDLITELNDRSEDLEKQIGSLESKLEHLTASFNSLPLLIADTLRQQQQQLLSAIIEARGVSVAVGTTHTPISDSPIGVSSTSFPTPYTSSSSC

SEQ ID NO: 18347 - protein, 426 aa, Homo sapiens
MERPIKDSMFSLALKCLISLSTIILLGLIIAYHTREVQLFVIDNGADDWRIAMTYERILYISLEMLVCAIHPIPGEYKFFWTARLAFSYTPSRAEADVDIILSIPMFLRLYLIARVMLLHSKLFTDASSRSIGALNKINFNTRFVMKTLMTICPGTVLLVFSISLWIIAAWTVRVCERYHDQQDVTSNFLGAMWLISITFLSIGYGDMVPHTYCGKGVCLLTGIMGAGCTALVVAVVARKLELTKAEKHVHNFMMDTQLTKRIKNAAANVLRETWLIYKHTKLLKKIDHAKVRKHQRKFLQAIHQLRSVKMEQRKLSDQANTLVDLSKMQNVMYDLITELNDRSEDLEKQIGSLESKLEHLTASFNSLPLLIADTLRQQQQQLLSAIIEARGVSVAVGTTHTPISDSPIGVSSTSFPTPYTSSSSC

SEQ ID NO: 18348 - protein, 418 aa, Homo sapiens
MFSLALKCLISLSTIILLGLIIAYHTREVQLFVIDNGADDWRIAMTYERILYISLEMLVCAIHPIPGEYKFFWTARLAFSYTPSRAEADVDIILSIPMFLRLYLIARVMLLHSKLFTDASSRSIGALNKINFNTRFVMKTLMTICPGTVLLVFSISLWIIAAWTVRVCERYHDQQDVTSNFLGAMWLISITFLSIGYGDMVPHTYCGKGVCLLTGIMGAGCTALVVAVVARKLELTKAEKHVHNFMMDTQLTKRIKNAAANVLRETWLIYKHTKLLKKIDHAKVRKHQRKFLQAIHQLRSVKMEQRKLSDQANTLVDLSKMQNVMYDLITELNDRSEDLEKQIGSLESKLEHLTASFNSLPLLIADTLRQQQQQLLSAIIEARGVSVAVGTTHTPISDSPIGVSSTSFPTPYTSSSSC

SEQ ID NO: 18349 - protein, 142 aa, Homo sapiens
MVLSPADKTNVKAAWGKVGAHAGEYGAEALERMFLSFPTTKTYFPHFDLSHGSAQVKGHGKKVADALTNAVAHVDDMPNALSALSDLHAHKLRVDPVNFKLLSHCLLVTLAAHLPAEFTPAVHASLDKFLASVSTVLTSKYR

SEQ ID NO: 18350 - protein, 671 aa, Homo sapiens
MRPKRLGRCCAGSRLGPGDPAALTCAPSPSASPAPEPSAQPQARGTGQRVGSRATSGSQFLSEARTGARPASEAGAKAGARRPSAFSAIQGDVRSMPDNSDAPWTRFVFQGPFGSRATGRGTGKAAGIWKTPAAYVGRRPGVSGPERAAFIRELEEALCPNLPPPVKKITQEDVKVMLYLLEELLPPVWESVTYGMVLQRERDLNTAARIGQSLVKQNSVLMEENSKLEALLGSAKEEILYLRHQVNLRDELLQLYSDSDEEDEDEEEEEEEKEAEEEQEEEEAEEDLQCAHPCDAPKLISQEALLHQHHCPQLEALQEKLRLLEEENHQLREEASQLDTLEDEEQMLILECVEQFSEASQQMAELSEVLVLRLENYERQQQEVARLQAQVLKLQQRCRMYGAETEKLQKQLASEKEIQMQLQEESVWVGSQLQDLREKYMDCGGMLIEMQEEVKTLRQQPPVSTGSATHYPYSVPLETLPGFQETLAEELRTSLRRMISDPVYFMERNYEMPRGDTSSLRYDFRYSEDREQVRGFEAEEGLMLAADIMRGEDFTPAEEFVPQEELGAAKKVPAEEGVMEEAELVSEETEGWEEVELELDEATRMNVVTSALEASGLGPSHLDMNYVLQQLANWQDAHYRRQLRWKMLQKGECPHGALPAASRTSCRSSCR

SEQ ID NO: 18351 - protein, 619 aa, Homo sapiens
MRPKRLGRCCAGSRLGPGDPAALTCAPSPSASPAPEPSAQPQARGTGQRVGSRATSGSQFLSEARTGARPASEAGAKAGARRPSAFSAIQGDVRSMPDNSDAPWTRFVFQGPFGSRATGRGTGKAAGIWKTPAAYVGRRPGVSGPERAAFIRELEEALCPNLPPPVKKITQEDVKVMLYLLEELLPPVWESVTYGMVLQRERDLNTAARIGQSLVKQNSVLMEENSKLEALLGSAKEEILYLRHQVNLRDELLQLYSDSDEEDEDEEEEEEEKEAEEEQEEEEAEEDLQCAHPCDAPKLISQEALLHQHHCPQLEALQEKLRLLEEENHQLREEASQLDTLEDEEQMLILECVEQFSEASQQMAELSEVLVLRLENYERQQQEVARLQAQVLKLQQRCRMYGAETEKLQKQLASEKEIQMQLQEEETLPGFQETLAEELRTSLRRMISDPVYFMERNYEMPRGDTSSLRYDFRYSEDREQVRGFEAEEGLMLAADIMRGEDFTPAEEFVPQEELGAAKKVPAEEGVMEEAELVSEETEGWEEVELELDEATRMNVVTSALEASGLGPSHLDMNYVLQQLANWQDAHYRRQLRWKMLQKGECPHGALPAASRTSCRSSCR

SEQ ID NO: 18352 - protein, 594 aa, Homo sapiens
MRPKRLGRCCAGSRLGPGDPAALTCAPSPSASPAPEPSAQPQARGTGQRVGSRATSGSQFLSEARTGARPASEAGAKAGARRPSAFSAIQGDVRSMPDNSDAPWTRFVFQGPFGSRATGRGTGKAAGIWKTPAAYVGRRPGVSGPERAAFIRELEEALCPNLPPPVKKITQEDVKVMLYLLEELLPPVWESVTYGMVLQRERDLNTAARIGQSLVKQNSVLMEENSKLEALLGSAKEEILYLRHQVNLRDELLQLYSDSDEEDEDEEEEEEEKEAEEEQEEEEAEEDLQCAHPCDAPKLISQEALLHQHHCPQLEALQEKLRLLEEENHQLREEASQLDTLEDEEQMLILECVEQFSEASQQMAELSEVLVLRLENYERQQQEVARLQAQVLKLQQRCRMETLPGFQETLAEELRTSLRRMISDPVYFMERNYEMPRGDTSSLRYDFRYSEDREQVRGFEAEEGLMLAADIMRGEDFTPAEEFVPQEELGAAKKVPAEEGVMEEAELVSEETEGWEEVELELDEATRMNVVTSALEASGLGPSHLDMNYVLQQLANWQDAHYRRQLRWKMLQKGECPHGALPAASRTSCRSSCR

SEQ ID NO: 18353 - protein, 602 aa, Homo sapiens
MRPKRLGRCCAGSRLGPGDPAALTCAPSPSASPAPEPSAQPQARGTGQRVGSRATSGSQFLSEARTGARPASEAGAKAGARRPSAFSAIQGDVRSMPDNSDAPWTRFVFQGPFGSRATGRGTGKAAGIWKTPAAYVGRRPGVSGPERAAFIRELEEALCPNLPPPVKKITQEDVKVMLYLLEEVCTAFLIQLLPPVWESVTYGMVLQRERDLNTAARIGQSLVKQNSVLMEENSKLEALLGSAKEEILYLRHQVNLRDELLQLYSDSDEEDEDEEEEEEEKEAEEEQEEEEAEEDLQCAHPCDAPKLISQEALLHQHHCPQLEALQEKLRLLEEENHQLREEASQLDTLEDEEQMLILECVEQFSEASQQMAELSEVLVLRLENYERQQQEVARLQAQVLKLQQRCRMETLPGFQETLAEELRTSLRRMISDPVYFMERNYEMPRGDTSSLRYDFRYSEDREQVRGFEAEEGLMLAADIMRGEDFTPAEEFVPQEELGAAKKVPAEEGVMEEAELVSEETEGWEEVELELDEATRMNVVTSALEASGLGPSHLDMNYVLQQLANWQDAHYRRQLRWKMLQKGECPHGALPAASRTSCRSSCR

SEQ ID NO: 18354 - protein, 222 aa, Homo sapiens
MAEKPKLHYSNIRGRMESIRWLLAAAGVEFEEKFIKSAEDLDKLRNDGYLMFQQVPMVEIDGMKLVQTRAILNYIASKYNLYGKDIKEKALIDMYIEGIADLGEMILLLPFSQPEEQDAKLALIQEKTKNRYFPAFEKVLKSHGQDYLVGNKLSRADIHLVELLYYVEELDSSLISSFPLLKALKTRISNLPTVKKFLQPGSPRKPPMDEKSLEESRKIFRF

SEQ ID NO: 18355 - protein, 877 aa, Homo sapiens
MARPRRAREPLLVALLPLAWLAQAGLARAAGSVRLAGGLTLGGLFPVHARGAAGRACGQLKKEQGVHRLEAMLYALDRVNADPELLPGVRLGARLLDTCSRDTYALEQALSFVQALIRGRGDGDEVGVRCPGGVPPLRPAPPERVVAVVGASASSVSIMVANVLRLFAIPQISYASTAPELSDSTRYDFFSRVVPPDSYQAQAMVDIVRALGWNYVSTLASEGNYGESGVEAFVQISREAGGVCIAQSIKIPREPKPGEFSKVIRRLMETPNARGIIIFANEDDIRRVLEAARQANLTGHFLWVGSDSWGAKTSPILSLEDVAVGAITILPKRASIDGFDQYFMTRSLENNRRNIWFAEFWEENFNCKLTSSGTQSDDSTRKCTGEERIGRDSTYEQEGKVQFVIDAVYAIAHALHSMHQALCPGHTGLCPAMEPTDGRMLLQYIRAVRFNGSAGTPVMFNENGDAPGRYDIFQYQATNGSASSGGYQAVGQWAETLRLDVEALQWSGDPHEVPSSLCSLPCGPGERKKMVKGVPCCWHCEACDGYRFQVDEFTCEACPGDMRPTPNHTGCRPTPVVRLSWSSPWAAPPLLLAVLGIVATTTVVATFVRYNNTPIVRASGRELSYVLLTGIFLIYAITFLMVAEPGAAVCAARRLFLGLGTTLSYSALLTKTNRIYRIFEQGKRSVTPPPFISPTSQLVITFSLTSLQVVGMIAWLGARPPHSVIDYEEQRTVDPEQARGVLKCDMSDLSLIGCLGYSLLLMVTCTVYAIKARGVPETFNEAKPIGFTMYTTCIIWLAFVPIFFGTAQSAEKIYIQTTTLTVSLSLSASVSLGMLYVPKTYVILFHPEQNVQKRKRSLKATSTVAAPPKGEDAEAHK

SEQ ID NO: 18356 - protein, 217 aa, Homo sapiens [sequence omitted]

SEQ ID NO: 18357 - protein, 176 aa, Homo sapiens
MEAIAKYDFKATADDELSFKRGDILKVLNEECDQNWYKAELNGKDGFIPKNYIEMKPHPFGNDVQHFKVLRDGAGKYFLWVVKFNSLNELVDYHRSTSVSRNQQIFLRDIEQVPQQPTYVQALFDFDPQEDGELGFRRGDFIHVMDNSDPNWWKGACHGQTGMFPRNYVTPVNRNV

SEQ ID NO: 18358 - protein, 679 aa, Homo sapiens
MISASRAAAARLVGAAASRGPTAARHQDSWNGLSHEAFRLVSRRDYASEAIKGAVVGIDLGTTNSCVAVMEGKQAKVLENAEGARTTPSVVAFTADGERLVGMPAKRQAVTNPNNTFYATKRLIGRRYDDPEVQKDIKNVPFKIVRASNGDAWVEAHGKLYSPSQIGAFVLMKMKETAENYLGHTAKNAVITVPAYFNDSQRQATKDAGQISGLNVLRVINEPTAAALAYGLDKSEDKVIAVYDLGGGTFDISILEIQKGVFEVKSTNGDTFLGGEDFDQALLRHIVKEFKRETGVDLTKDNMALQRVREAAEKAKCELSSSVQTDINLPYLTMDSSGPKHLNMKLTRAQFEGIVTDLIRRTIAPCQKAMQDAEVSKSDIGEVILVGGMTRMPKVQQTVQDLFGRAPSKAVNPDEAVAIGAAIQGGVLAGDVTDVLLLDVTPLSLGIETLGGVFTKLINRNTTIPTKKSQVFSTAADGQTQVEIKVCQGEREMAGDNKLLGQFTLIGIPPAPRGVPQIEVTFDIDANGIVHVSAKDKGTGREQQIVIQSSGGLSKDDIENMVKNAEKYAEEDRRKKERVEAVNMAEGIIHDTETKMEEFKDQLPADECNKLKEEISKMRELLARKDSETGENIRQAASSLQQASLKLFEMAYKKMASEREGSGSSGTGEQKEDQKEEKQ

SEQ ID NO: 18359 - protein, 626 aa, Homo sapiens
MSNELDFRSVRLLKNDPVNLQKFSYTSEDEAWKTYLENPLTAATKAMMRVNGDDDSVAALSFLYDYYMGPKEKRILSSSTGGRNDQGKRYYHGMEYETDLTPLESPTHLMKFLTENVSGTPEYPDLLKKNNLMSLEGALPTPGKAAPLPAGPSKLEAGSVDSYLLPTTDMYDNGSLNSLFESIHGVPPTQRWQPDSTFKDDPQESMLFPDILKTSPEPPCPEDYPSLKSDFEYTLGSPKAIHIKSGESPMAYLNKGQFYPVTLRTPAGGKGLALSSNKVKSVVMVVFDNEKVPVEQLRFWKHWHSRQPTAKQRVIDVADCKENFNTVEHIEEVAYNALSFVWNVNEEAKVFIGVNCLSTDFSSQKGVKGVPLNLQIDTYDCGLGTERLVHRAVCQIKIFCDKGAERKMRDDERKQFRRKVKCPDSSNSGVKGCLLSGFRGNETTYLRPETDLETPPVLFIPNVHFSSLQRSGGAAPSAGPSSSNRLPLKRTCSPFTEEFEPLPSKQAKEGDLQRVLLYVRRETEEVFDALMLKTPDLKGLRNAISEKYGFPEENIYKVYKKCKRGETSLLHPRLSRHPPPDCLECSHPVTQVRNMGFGDGFWRQRDLDSNPSPTTVNSLHFTVNSE

SEQ ID NO: 18360 - protein, 607 aa, Homo sapiens
MWMNSILPIFLFRSVRLLKNDPVNLQKFSYTSEDEAWKTYLENPLTAATKAMMRVNGDDDSVAALSFLYDYYMGPKEKRILSSSTGGRNDQGKRYYHGMEYETDLTPLESPTHLMKFLTENVSGTPEYPDLLKKNNLMSLEGALPTPGKAAPLPAGPSKLEAGSVDSYLLPTTDMYDNGSLNSLFESIHGVPPTQRWQPDSTFKDDPQESMLFPDILKTSPEPPCPEDYPSLKSDFEYTLGSPKAIHIKSGESPMAYLNKGQFYPVTLRTPAGGKGLALSSNKVKSVVMVVFDNEKVPVEQLRFWKHWHSRQPTAKQRVIDVADCKENFNTVEHIEEVAYNALSFVWNVNEEAKVFIGVNCLSTDFSSQKGVKGVPLNLQIDTYDCGLGTERLVHRAVCQIKIFCDKGAERKMRDDERKQFRRKVKCPDSSNSGVKGCLLSGFRGNETTYLRPETDLETPPVLFIPNVHFSSLQRSGGAAPSAGPSSSNRLPLKRTCSPFTEEFEPLPSKQAKEGDLQRVLLYVRRETEEVFDALMLKTPDLKGLRNAISEKYGFPEENIYKVYKKCKRGILVNMDNNIIQHYSNHVAFLLDMGELDGKIQIILKEL

SEQ ID NO: 18361 - protein, 556 aa, Homo sapiens
MMRVNGDDDSVAALSFLYDYYMGPKEKRILSSSTGGRNDQGKRYYHGMEYETDLTPLESPTHLMKFLTENVSGTPEYPDLLKKNNLMSLEGALPTPGKAAPLPAGPSKLEAGSVDSYLLPTTDMYDNGSLNSLFESIHGVPPTQRWQPDSTFKDDPQESMLFPDILKTSPEPPCPEDYPSLKSDFEYTLGSPKAIHIKSGESPMAYLNKGQFYPVTLRTPAGGKGLALSSNKVKSVVMVVFDNEKVPVEQLRFWKHWHSRQPTAKQRVIDVADCKENFNTVEHIEEVAYNALSFVWNVNEEAKVFIGVNCLSTDFSSQKGVKGVPLNLQIDTYDCGLGTERLVHRAVCQIKIFCDKGAERKMRDDERKQFRRKVKCPDSSNSGVKGCLLSGFRGNETTYLRPETDLETPPVLFIPNVHFSSLQRSGGAAPSAGPSSSNRLPLKRTCSPFTEEFEPLPSKQAKEGDLQRVLLYVRRETEEVFDALMLKTPDLKGLRNAISEKYGFPEENIYKVYKKCKRGILVNMDNNIIQHYSNHVAFLLDMGELDGKIQIILKEL

SEQ ID NO: 18362 - protein, 509 aa, Homo sapiens
MEYETDLTPLESPTHLMKFLTENVSGTPEYPDLLKKNNLMSLEGALPTPGKAAPLPAGPSKLEAGSVDSYLLPTTDMYDNGSLNSLFESIHGVPPTQRWQPDSTFKDDPQESMLFPDILKTSPEPPCPEDYPSLKSDFEYTLGSPKAIHIKSGESPMAYLNKGQFYPVTLRTPAGGKGLALSSNKVKSVVMVVFDNEKVPVEQLRFWKHWHSRQPTAKQRVIDVADCKENFNTVEHIEEVAYNALSFVWNVNEEAKVFIGVNCLSTDFSSQKGVKGVPLNLQIDTYDCGLGTERLVHRAVCQIKIFCDKGAERKMRDDERKQFRRKVKCPDSSNSGVKGCLLSGFRGNETTYLRPETDLETPPVLFIPNVHFSSLQRSGGAAPSAGPSSSNRLPLKRTCSPFTEEFEPLPSKQAKEGDLQRVLLYVRRETEEVFDALMLKTPDLKGLRNAISEKYGFPEENIYKVYKKCKRGILVNMDNNIIQHYSNHVAFLLDMGELDGKIQIILKEL

SEQ ID NO: 18363 - protein, 602 aa, Homo sapiens
MSNELDFRSVRLLKNDPVNLQKFSYTSEDEAWKTYLENPLTAATKAMMRVNGDDDSVAALSFLYDYYMGPKEKRILSSSTGGRNDQGKRYYHGMEYETDLTPLESPTHLMKFLTENVSGTPEYPDLLKKNNLMSLEGALPTPGKAAPLPAGPSKLEAGSVDSYLLPTTDMYDNGSLNSLFESIHGVPPTQRWQPDSTFKDDPQESMLFPDILKTSPEPPCPEDYPSLKSDFEYTLGSPKAIHIKSGESPMAYLNKGQFYPVTLRTPAGGKGLALSSNKVKSVVMVVFDNEKVPVEQLRFWKHWHSRQPTAKQRVIDVADCKENFNTVEHIEEVAYNALSFVWNVNEEAKVFIGVNCLSTDFSSQKGVKGVPLNLQIDTYDCGLGTERLVHRAVCQIKIFCDKGAERKMRDDERKQFRRKVKCPDSSNSGVKGCLLSGFRGNETTYLRPETDLETPPVLFIPNVHFSSLQRSGGAAPSAGPSSSNRLPLKRTCSPFTEEFEPLPSKQAKEGDLQRVLLYVRRETEEVFDALMLKTPDLKGLRNAISEKYGFPEENIYKVYKKCKRGILVNMDNNIIQHYSNHVAFLLDMGELDGKIQIILKEL

SEQ ID NO: 18364 - protein, 227 aa, Homo sapiens
MGASARLLRAVIMGAPGSGKGTVSSRITTHFELKHLSSGDLLRDNMLRGTEIGVLAKAFIDQGKLIPDDVMTRLALHELKNLTQYSWLLDGFPRTLPQAEALDRAYQIDTVINLNVPFEVIKQRLTARWIHPASGRVYNIEFNPPKTVGIDDLTGEPLIQREDDKPETVIKRLKAYEDQTKPVLEYYQKKGVLETFSGTETNKIWPYVYAFLQTKVPQRSQKASVTP

SEQ ID NO: 18365 - protein, 157 aa, Homo sapiens
MTRLALHELKNLTQYSWLLDGFPRTLPQAEALDRAYQIDTVINLNVPFEVIKQRLTARWIHPASGRVYNIEFNPPKTVGIDDLTGEPLIQREDDKPETVIKRLKAYEDQTKPVLEYYQKKGVLETFSGTETNKIWPYVYAFLQTKVPQRSQKASVTP

SEQ ID NO: 18366 - protein, 187 aa, Homo sapiens
MGASARLLRAVIMGAPGSGKGTVSSRITTHFELKHLSSGDLLRDNMLRGTGFPRTLPQAEALDRAYQIDTVINLNVPFEVIKQRLTARWIHPASGRVYNIEFNPPKTVGIDDLTGEPLIQREDDKPETVIKRLKAYEDQTKPVLEYYQKKGVLETFSGTETNKIWPYVYAFLQTKVPQRSQKASVTP

SEQ ID NO: 18367 - protein, 1942 aa, Homo sapiens
MEDRRAEKSCEQACESLKRQDYEMALKHCTEALLSLGQYSMADFTGPCPLEIERIKIESLLYRIASFLQLKNYVQADEDCRHVLGEGLAKGEDAFRAVLCCMQLKGKLQPVSTILAKSLTGESLNGMVTKDLTRLKTLLSETETATSNALSGYHVEDLDEGSCNGWHFRPPPRGITSSEEYTLCKRFLEQGICRYGAQCTSAHSQEELAEWQKRYASRLIKLKQQNENKQLSGSYMETLIEKWMNSLSPEKVLSECIEGVKVEHNPDLSVTVSTKKSHQTWTFALTCKPARMLYRVALLYDAHRPHFSIIAISAGDSTTQVSQEVPENCQEWIGGKMAQNGLDHYVYKVGIAFNTEIFGTFRQTIVFDFGLEPVLMQRVMIDAASTEDLEYLMHAKQQLVTTAKRWDSSSKTIIDFEPNETTDLEKSLLIRYQIPLSADQLFTQSVLDKSLTKSNYQSRLHDLLYIEEIAQYKEISKFNLKVQLQILASFMLTGVSGGAKYAQNGQLFGRFKLTETLSEDTLAGRLVMTKVNAVYLLPVPKQKLVQTQGTKEKVYEATIEEKTKEYIFLRLSRECCEELNLRPDCDTQVELQFQLNRLPLCEMHYALDRIKDNGVLFPDISMTPTIPWSPNRQWDEQLDPRLNAKQKEAVLAITTPLAIQLPPVLIIGPYGTGKTFTLAQAVKHILQQQETRILICTHSNSAADLYIKDYLHPYVEAGNPQARPLRVYFRNRWVKTVHPVVHQYCLISSAHSTFQMPQKEDILKHRVVVVTLNTSQYLCQLDLEPGFFTHILLDEAAQAMECETIMPLALATQNTRIVLAGDHMQLSPFVYSEFARERNLHVSLLDRLYEHYPAEFPCRILLCENYRSHEAIINYTSELFYEGKLMASGKQPAHKDFYPLTFFTARGEDVQEKNSTAFYNNAEVFEVVERVEELRRKWPVAWGKLDDGSIGVVTPYADQVFRIRAELRKKRLSDVNVERVLNVQGKQFRVLFLSTVRTRHTCKHKQTPIKKKEQLLEDSTEDLDYGFLSNYKLLNTAITRAQSLVAVVGDPIALCSIGRCRKFWERFIALCHENSSLHGITFEQIKAQLEALELKKTYVLNPLAPEFIPRALRLQHSGSTNKQQQSPPKGKSLHHTQNDHFQNDGIVQPNPSVLIGNPIRAYTPPPPLGPHPNLGKSPSPVQRIDPHTGTSILYVPAVYGGNVVMSVPLPVPWTGYQGRFAVDPRIITHQAAMAYNMNLLQTHGRGSPIPYGLGHHPPVTIGQPQNQHQEKDQHEQNRNGKSDTNNSGPEINKIRTPEKKPTEPKQVDLESNPQNRSPESRPSVVYPSTKFPRKDNLNPRHINLPLPAPHAQYAIPNRHFHPLPQLPRPPFPIPQQHTLLNQQQNNLPEQPNQIPPQPNQVVQQQSQLNQQPQQPPPQLSPAYQAGPNNAFFNSAVAHRPQSPPAEAVIPEQQPPPMLQEGHSPLRAIAQPGPILPSHLNSFIDENPSGLPIGEALDRIHGSVALETLRQQQARFQQWSEHHAFLSQGSAPYPHHHHPHLQHLPQPPLGLHQPPVRADWKLTSSAEDEVETTYSRFQDLIRELSHRDQSETRELAEMPPPQSRLLQYRQVQSRSPPAVPSPPSSTDHSSHFSNFNDNSRDIEVASNPAFPQRLPPQIFNSPFSLPSEHLAPPPLKYLAPDGAWTFANLQQNHLMGPGFPYGLPPLPHRPPQNPFVQIQNHQHAIGQEPFHPLSSRTVSSSSLPSLEEYEPRGPGRPLYQRRISSSSVQPCSEEVSTPQDSLAQCKELQDHSNQSSFNFSSPESWVNTTSSTPYQNIPCNGSSRTAQPRELIAPPKTVKPPEDQLKSENLEVSSSFNYSVLQHLGQFPPLMPNKQIAESANSSSPQSSAGGKPAMSYASALRAPPKPRPPPEQAKKSSDPLSLFQELSLGSSSGSNGFYSYFK

SEQ ID NO: 18368 - protein, 1163 aa, Homo sapiens
MEDRRAEKSCEQACESLKRQDYEMALKHCTEALLSLGQYSMADFTGPCPLEIERIKIESLLYRIASFLQLKNYVQADEDCRHVLGEGLAKGEDAFRAVLCCMQLKGKLQPVSTILAKSLTGESLNGMVTKDLTRLKTLLSETETATSNALSGYHVEDLDEGSCNGWHFRPPPRGITSSEEYTLCKRFLEQGICRYGAQCTSAHSQEELAEWQKRYASRLIKLKQQNENKQLSGSYMETLIEKWMNSLSPEKVLSECIEGVKVEHNPDLSVTVSTKKSHQTWTFALTCKPARMLYRVALLYDAHRPHFSIIAISAGDSTTQVSQEVPENCQEWIGGKMAQNGLDHYVYKVGIAFNTEIFGTFRQTIVFDFGLEPVLMQRVMIDAASTEDLEYLMHAKQQLVTTAKRWDSSSKTIIDFEPNETTDLEKSLLIRYQIPLSADQLFTQSVLDKSLTKSNYQSRLHDLLYIEEIAQYKEISKFNLKVQLQILASFMLTGVSGGAKYAQNGQLFGRFKLTETLSEDTLAGRLVMTKVNAVYLLPVPKQKLVQTQGTKEKVYEATIEEKTKEYIFLRLSRECCEELNLRPDCDTQVELQFQLNRLPLCEMHYALDRIKDNGVLFPDISMTPTIPWSPNRQWDEQLDPRLNAKQKEAVLAITTPLAIQLPPVLIIGPYGTGKTFTLAQAVKHILQQQETSRILICTHSNSAADLYIKDYLHPYVEAGNPQARPLRVYFRNRWVKTVHPVVHQYCLISSAHSTFQMPQKEDILKHRVVVVTLNTSQYLCQLDLEPGFFTHILLDEAAQAMECETIMPLALATQNTRIVLAGDHMQLSPFVYSEFARERNLHVSLLDRLYEHYPAEFPCRILLCENYRSHEAIINYTSELFYEGKLMASGKQPAHKDFYPLTFFTARGEDVQEKNSTAFYNNAEVFEVVERVEELRRKWPVAWGKLDDGSIGVVTPYADQVFRIRAELRKKRLSDVNVERVLNVQGKQFRVLFLSTVRTRHTCKHKQTPIKKKEQLLEDSTEDLDYGFLSNYKLLNTAITRAQSLVAVVGDPIALCSIGRCRKFWERFIALCHENSSLHGITFEQIKAQLEALELKKTYVLNPLAPEFIPRALRLQHSGSTNKQQQSPPKVKPLLMKLKRLKGENFAEVPKVYWDASYFKCWN

SEQ ID NO: 18369 - protein, 2040 aa, Homo sapiens
MELAHSLLLNEEAYNQLGEVQKAEFIFEWLRYLEKLLLATSRNDVREKQKTLVEQLLSLLNSSPGPPTRKLLAKNLAILYSIGDTFSVHEAIDKCNDLIRSKDDSPSYLPTKLAAVVCLGSLYKKLGRILGNTFTDTVGNILKAMKSAESQGRYEIMLSLQNILNGLGAAAAPCHRDVYKAARSCLTDRSMAVRCAAAKNEAIFMWSTDLDSVATLCFKSFEGSNYDVRISVSKLLGIILAKAVISKHPGTAASRQSIRRVSLEEVLELLGTGFLRGSSGFLRASGDMLKGTSSVSRDVRVGVTQAYVVFVSTLGGAWLEKNFAAFFSHILSLASPSHPKATQTQIDAVCCRRCVSFILRTTIGGLLGEKAQLAAVKDICQAIWKLKKVMDAVMSDGNLETRLGSTDVAASQHMLVCALQELGNLIHNLGTTAAPLLQDSSTGLLDSILSVILHPSISVRLAAAWCLHCIAVALPSYLTPLLDRCLERLTGHKSSPEAVTGFSFAVAALLGAVKHCPLGIPHGKGKIIMTLAEDLLCSAAQNSRLSAQRTQAGWLLISALMTLGPAVVSHHLARVLLLWKCVFPASPKDLETEKSRGDSFTWQVTLEGRAGALCAIKSFVSHCGDLLTEEVTQRLLPPLPCAVDLLTQLSSILKMYGSPLKTPSVVYRQRLYELLILLPPETYEGNLCAILRELAADLTAPDIQVAASTFLLPPLCHQDDLLILSPFLQETDHRFIEEQLLLGNGVACGSLEYDPYSIYEKDVEGDSVPKPLPPALSVISSASKLFGVVCAHVGETQRLLILEQLLDSIKHTKGARQQVVQLHVVSSVSSFLKYVAGSKGCLGPEEMKRFALTLVMGALESPNPLLRCAAAESWARLAQVVDDGAFTAGLAQVSFDKLKSARDVVTRTGHSLALGSLHRYLGGISSSQHLNSCIGILYTLAQDSTSPDVQTWALHSLSLIIDSAGPLYYVHVEPTLSLIIMLLLNVPPTHAEVHQSLGRCLNALITTLGPELQGNSTSISTLRTSCLLGCAVMQDNPDCLVQAQAISCLQQLHMFAPRHVNLSSLVSCLCVNLCSPYLLLRRAVLACLRQLVQREAAEVSEHAVMLAKDSREELTPDANIREVGLEGALLILLDKETDERLCHDIKETLNYMLTSMAVEKLSLWLKLCKDVLAASADFTAVTCVDTMQEEEGDKGDDASVLTTRRDEKSHPFTNPRWATRVFAAECVCRIINQCENANSAHFDIALAQEMKKRDSRNDFLVLHLADLIRMAFMAATDHSDQLRLSGLEMLLVVIRRFATVPEPEFPGHVILEQYQANVGAALRPAFTSETPPDVTAKACQVCSAWIASGVVSDLNDLRRVHQLLVSSLTKIQAGKEALSHLYNESASTMEILAVLKAWAEVYIIAVQRHKNHRQPLKTTTCLEDGIRNGSCSSDGLLDLVYADLGTLSRLWLAALQDFALLTLPSEFASQLPAEGGAFYTAETSENAKLHYYNSWALILHATALWLTSTGFVVADPDEGASNLSRPVTPTSMCQGSSSGATIKSPEDVYTDRFHLILGISVEFLCSLRSDATMESITACLHALQALLDVPWPRSKIGSDQDLGIELLNVLHRVILTRESPSIQLASLEVVRQIICAAQEHVKEKRRSAEVDDGAAEKETLPEFGEGKDTGGLVPGKSLVFATLELCVCILVRQLPELNPKLTGSPGVKATKPQILLEDGSRLVSAALVILSELPAVCSPEGSISILPTILYLTIGVLRETAVKLPGGQLSSTVAASLQALKGILSSPMARAEKSRTAWTDLLRSALTTILDCWDPVDETHQELDEVSLLTAITVFILSTSPEVTTIPCLQKRCIDKFKATLEIKDPVVQIKTYQLLHSIFQYPNPAVSYPYIYSLASCIMEKLQEIDKRKPENTAELEIFQEGIKVLETLVTVAEEHHRAQLVACLLPILISFLLDENSLGSATSIMRNLHDFALQNLMQIGPQYSSVFKSLVASSPALKARLEAAIKGNQESVKVKIPTSKYTKSPGKNSSIQLKTSFL

SEQ ID NO: 18370 - protein, 1965 aa, Homo sapiens
MELAHSLLLNEEAYNQLGEVQKAEFIFEWLRYLEKLLLATSRNDVREKQKTLVEQLLSLLNSSPGPPTRKLLAKNLAILYSIGDTFSVHEAIDKCNDLIRSKDDSPSYLPTKLAAVVCLGSLYKKLGRILGNTFTDTVGNILKAMKSAESQGRYEIMLSLQNILNGLGAAAAPCHRDVYKAARSCLTDRSMAVRCAAAKNEAIFMWSTDLDSVATLCFKSFEGSNYDVRISVSKLLGIILAKAVISKHPGTAASRQSIRRVSLEEVLELLGTGFLRGSSGFLRASGDMLKGTSSVSRDVRVGVTQAYVVFVSTLGGAWLEKNFAAFFSHILSLASPSHPKATQTQIDAVCCRRCVSFILRTTIGGLLGEKAQLAAVKDICQAIWKLKKVMDAVMSDGNLETRLGSTDVAASQHMLVCALQELGNLIHNLGTTAAPLLQDSSTGLLDSILSVILHPSISVRLAAAWCLHCIAVALPSYLTPLLDRCLERLTGHKSSPEAVTGFSFAVAALLGAVKHCPLGIPHGKGKIIMTLAEDLLCSAAQNSRLSAQRTQAGWLLISALMTLGPAVVSHHLARVLLLWKCVFPASPKDLETEKSRGDSFTWQVTLEGRAGALCAIKSFVSHCGDLLTEEVTQRLLPPLPCAVDLLTQLSSILKMYGSPLKTPSVVYRQRLYELLILLPPETYEGNLCAILRELAADLTAPDIQVAASTFLLPPLCHQDDLLILSPFLQETDHRFIEEQLLLGNGVACGSLEYDPYSIYEKDVEGDSVPKPLPPALSVISSASKLFGVVCAHVGETQRLLILEQLLDSIKHTKGARQQVVQLHVVSSVSSFLKYVAGSKGCLGPEEMKRFALTLVMGALESPNPLLRCAAAESWARLAQVVDDGAFTAGLAQVSFDKLKSARDVVTRTGHSLALGSLHRYLGGISSSQHLNSCIGILYTLAQDSTSPDVQTWALHSLSLIIDSAGPLYYVHVEPTLSLIIMLLLNVPPTHAEVHQSLGRCLNALITTLGPELQGNSTSISTLRTSCLLGCAVMQDNPDCLVQAQAISCLQQLHMFAPRHVNLSSLVSCLCVNLCSPYLLLRRAVLACLRQLVQREAAEVSEHAVMLAKDSREELTPDANIREVGLEGALLILLDKETDERLCHDIKETLNYMLTSMAVEKLSLWLKLCKDVLAASADFTAVTCVDTMQEEEGDKGDDASVLTTRRDEKSHPFTNPRWATRVFAAECVCRIINQCENANSAHFDIALAQEMKKRDSRNDFLVLHLADLIRMAFMAATDHSDQLRLSGLEMLLVVIRRFATVPEPEFPGHVILEQYQANVGAALRPAFTSETPPDVTAKACQVCSAWIASGVVSDLNDLRRVHQLLVSSLTKIQAGKEALSHLYNESASTMEILAVLKAWAEVYIIAVQRHKNHRQPLKTTTCLEDGIRNGSCSSDGLLDLVYADLGTLSRLWLAALQDFALLTLPSEFASQLPAEGGAFYTAETSENAKLHYYNSWALILHATALWLTSTGFVVADPDEGASNLSRPVTPTSMCQGSSSGATIKSPEDVYTDRFHLILGISVEFLCSLRSDATMESITACLHALQALLDVPWPRSKIGSDQDLGIELLNVLHRVILTRESPSIQLASLEVVRQIICAAQEHVKEKRRSAEVDDGAAEKETLPEFGEGKDTGGLVPGKSLVFATLELCVCILVRQLPELNPKLTGSPGVKATKPQILLEDGSRLVSAALVILSELPAVCSPEVDETHQELDEVSLLTAITVFILSTSPEVTTIPCLQKRCIDKFKATLEIKDPVVQIKTYQLLHSIFQYPNPAVSYPYIYSLASCIMEKLQEIDKRKPENTAELEIFQEGIKVLETLVTVAEEHHRAQLVACLLPILISFLLDENSLGSATSIMRNLHDFALQNLMQIGPQYSSVFKSLVASSPALKARLEAAIKGNQESVKVKIPTSKYTKSPGKNSSIQLKTSFL

SEQ ID NO: 18371 - protein, 113 aa, Homo sapiens
MELAHSLLLNEEAYNQLGEVQKAEFIFEWLRYLEKLLLATSRNDVREKQKTLVEQLLSLLNSSPGPPTRKLLAKNLAILYSIGDTFSVHEAIDKCNDLIRSKDDSPSYLPTKL

SEQ ID NO: 18372 - protein, 186 aa, Homo sapiens
MEKKRRARINVSLEQLKSLLEKHYSHQIRKRKLEKADILELSVKYMRSLQNSLQGLWPVPRGAEQPSGFRSCLPGVSQLLRRGDEVGSGLRCPLVPESAAGSTMDSAGLGQEAPALFRPCTPAVWAPAPAAGGPRSPPPLLLLPESLPGSSASVPPPQPASSRCAESPGLGLRVWRPWGSPGDDLN

SEQ ID NO: 18373 - protein, 166 aa, Homo sapiens
MAPSTVAVELLSPKEKNRLRKPVVEKMRRDRINSSIEQLKLLLEQEFARHQPNSKLEKADILEMAVSYLKHSKAFVAAAGPKSLHQDYSEGYSWCLQEAVQFLTLHAASDTQMKLLYHFQRPPAAPAAPAKEPKAPGAAPPPALSAKATAAAAAAHQPACGLWRPW

SEQ ID NO: 18374 - protein, 408 aa, Homo sapiens
MAENGDNEKMAALEAKICHQIEYYFGDFNLPRDKFLKEQIKLDEGWVPLEIMIKFNRLNRLTTDFNVIVEALSKSKAELMEISEDKTKIRRSPSKPLPEVTDEYKNDVKNRSVYIKGFPTDATLDDIKEWLEDKGQVLNIQMRRTLHKAFKGSIFVVFDSIESAKKFVETPGQKYKETDLLILFKDDYFAKKNEERKQNKVEAKLRAKQEQEAKQKLEEDAEMKSLEEKIGCLLKFSGDLDDQTCREDLHILFSNHGEIKWIDFVRGAKEGIILFKEKAKEALGKAKDANNGNLQLRNKEVTWEVLEGEVEKEALKKIIEDQQESLNKWKSKGRRFKGKGKGNKAAQPGSGKGKVQFQGKKTKFASDDEHDEHDENGATGPVKRAREETDKEEPASKQQKTENGAGDQ

SEQ ID NO: 18375 - protein, 185 aa, Homo sapiens
MSPSLQEGAQLGENKPSTCSFSIERILGLDQKKDCVPLMKPHRPWADTCSSSGKDGNLCLHVPNPPSGISFPSVVDHPMPEERASKYENYFSASERLSLKRELSWYRGRRPRTAFTQNQIEVLENVFRVNCYPGIDIREDLAQKLNLEEDRIQIWFQNRRAKLKRSHRESQFLMAKKNFNTNLLE

SEQ ID NO: 18376 - protein, 317 aa, Homo sapiens
MMLSLNNLQNIIYNPVIPFVGTIPDQLDPGTLIVIRGHVPSDADRFQVDLQNGSSMKPRADVAFHFNPRFKRAGCIVCNTLINEKWGREEITYDTPFKREKSFEIVIMVLKDKFQVAVNGKHTLLYGHRIGPEKIDTLGIYGKVNIHSIGFSFSSDLQSTQASSLELTEISRENVPKSGTPQLRLPFAARLNTPMGPGRTVVVKGEVNANAKSFNVDLLAGKSKDIALHLNPRLNIKAFVRNSFLQESWGEEERNITSFPFSPGMYFEMIIYCDVREFKVAVNGVHSLEYKHRFKELSSIDTLEINGDIHLLEVRSW

SEQ ID NO: 18377 - protein, 359 aa, Homo sapiens
MMLSLNNLQNIIYNPVIPFVGTIPDQLDPGTLIVIRGHVPSDADRFQVDLQNGSSMKPRADVAFHFNPRFKRAGCIVCNTLINEKWGREEITYDTPFKREKSFEIVIMVLKDKFQVAVNGKHTLLYGHRIGPEKIDTLGIYGKVNIHSIGFSFSSDLQSTQASSLELTEISRENVPKSGTPQLPSNRGGDISKIAPRTVYTKSKDSTVNHTLTCTKIPPMNYVSKRLPFAARLNTPMGPGRTVVVKGEVNANAKSFNVDLLAGKSKDIALHLNPRLNIKAFVRNSFLQESWGEEERNITSFPFSPGMYFEMIIYCDVREFKVAVNGVHSLEYKHRFKELSSIDTLEINGDIHLLEVRSW

SEQ ID NO: 18378 - protein, 356 aa, Homo sapiens
MAFSGSQAPYLSPAVPFSGTIQGGLQDGFQITVNGAVLSSSGTRFAVDFQTGFSGNDIAFHFNPRFEDGGYVVCNTRQKGRWGPEERKMHMPFQKGMPFDLCFLVQSSDFKVMVNGSLFVQYFHRVPFHRVDTISVNGSVQLSYISFQNPRTVPVQPAFSTVPFSQPVCFPPRPRGRRQKPPSVRPANPAPITQTVIHTVQSASGQMFSQTPAIPPMMYPHPAYPMPFITTIPGGLYPSKSIILSGTVLPSAQRFHINLCSGSHIAFHMNPRFDENAVVRNTQINNSWGSEERSLPRKMPFVRGQSFSVWILCEAHCLKVAVDGQHVFEYYHRLRNLPTINKLEVGGDIQLTHVQT

SEQ ID NO: 18379 - protein, 355 aa, Homo sapiens
MAFSGSQAPYLSPAVPFSGTIQGGLQDGFQITVNGAVLSSSGTRFAVDFQTGFSGNDIAFHFNPRFEDGGYVVCNTRQKGRWGPEERKMHMPFQKGMPFDLCFLVQSSDFKVMVNGSLFVQYFHRVPFHRVDTISVNGSVQLSYISFQNPRTVPVQPAFSTVPFSQPVCFPPRPRGRRQKPPSVRPANPAPITQTVIHTVQSASGQMFSTPAIPPMMYPHPAYPMPFITTIPGGLYPSKSIILSGTVLPSAQRFHINLCSGSHIAFHMNPRFDENAVVRNTQINNSWGSEERSLPRKMPFVRGQSFSVWILCEAHCLKVAVDGQHVFEYYHRLRNLPTINKLEVGGDIQLTHVQT

SEQ ID NO: 18380 - protein, 423 aa, Homo sapiens
MAAWGCVAALGAARGLCWRAARAAAGLQGRPARRCYAVGPAQSPPTFGFLLDIDGVLVRGHRVIPAALKAFRRLVNSQGQLRVPVVFVTNAGNILQHSKAQELSALLGCEVDADQVILSHSPMKLFSEYHEKRMLVSGQGPVMENAQGLGFRNVVTVDELRMAFPLLDMVDLERRLKTTPLPRNDFPRIEGVLLLGEPVRWETSLQLIMDVLLSNGSPGAGLATPPYPHLPVLASNMDLLWMAEAKMPRFGHGTFLLCLETIYQKVTGKELRYEGLMGKPSILTYQYAEDLIRRQAERRGWAAPIRKLYAVGDNPMSDVYGANLFHQYLQKATHDGAPELGAGGTRQQQPSASQSCISILVCTGVYNPRNPQSTEPVLGGGEPPFHGHRDLCFSPGLMEASHVVNDVNEAVQLVFRKEGWALE

SEQ ID NO: 18381 - protein, 393 aa, Homo sapiens
MYAWFFLPSFSQSPPTFGFLLDIDGVLVRGHRVIPAALKAFRRLVNSQGQLRVPVVFVTNAGNILQHSKAQELSALLGCEVDADQVILSHSPMKLFSEYHEKRMLVSGQGPVMENAQGLGFRNVVTVDELRMAFPLLDMVDLERRLKTTPLPRNDFPRIEGVLLLGEPVRWETSLQLIMDVLLSNGSPGAGLATPPYPHLPVLASNMDLLWMAEAKMPRFGHGTFLLCLETIYQKVTGKELRYEGLMGKPSILTYQYAEDLIRRQAERRGWAAPIRKLYAVGDNPMSDVYGANLFHQYLQKATHDGAPELGAGGTRQQQPSASQSCISILVCTGVYNPRNPQSTEPVLGGGEPPFHGHRDLCFSPGLMEASHVVNDVNEAVQLVFRKEGWALE

SEQ ID NO: 18382 - protein, 364 aa, Homo sapiens
MPYQYPALTPEQKKELSDIAHRIVAPGKGILAADESTGSIAKRLQSIGTENTEENRRFYRQLLLTADDRVNPCIGGVILFHETLYQKADDGRPFPQVIKSKGGVVGIKVDKGVVPLAGTNGETTTQGLDGLSERCAQYKKDGADFAKWRCVLKIGEHTPSALAIMENANVLARYASICQQNGIVPIVEPEILPDGDHDLKRCQYVTEKVLAAVYKALSDHHIYLEGTLLKPNMVTPGHACTQKFSHEEIAMATVTALRRTVPPAVTGITFLSGGQSEEEASINLNAINKCPLLKPWALTFSYGRALQASALKAWGGKKENLKAAQEEYVKRALANSLACQGKYTPSGQAGAAASESLFVSNHAY

SEQ ID NO: 18383 - protein, 418 aa, Homo sapiens
MARRKPEGSSFNMTHLSMAMAFSFPPVASGQLHPQLGNTQHQTELGKELATTSTMPYQYPALTPEQKKELSDIAHRIVAPGKGILAADESTGSIAKRLQSIGTENTEENRRFYRQLLLTADDRVNPCIGGVILFHETLYQKADDGRPFPQVIKSKGGVVGIKVDKGVVPLAGTNGETTTQGLDGLSERCAQYKKDGADFAKWRCVLKIGEHTPSALAIMENANVLARYASICQQNGIVPIVEPEILPDGDHDLKRCQYVTEKVLAAVYKALSDHHIYLEGTLLKPNMVTPGHACTQKFSHEEIAMATVTALRRTVPPAVTGITFLSGGQSEEEASINLNAINKCPLLKPWALTFSYGRALQASALKAWGGKKENLKAAQEEYVKRALANSLACQGKYTPSGQAGAAASESLFVSNHAY

SEQ ID NO: 18384 - protein, 147 aa, Homo sapiens
MSQTRDLQGGKAFGLLKAQQEERLDEINKQFLDDPKYSSDEDLPSKLEGFKEKYMEFDLNGNGDIDIMSLKRMLEKLGVPKTHLELKKLIGEVSSGSGETFSYPDFLRMMLGKRSAILKMILMYEEKAREKEKPTGPPAKKAISELP

SEQ ID NO: 18385 - protein, 93 aa, Homo sapiens
MEFDLNGNGDIDIMSLKRMLEKLGVPKTHLELKKLIGEVSSGSGETFSYPDFLRMMLGKRSAILKMILMYEEKAREKEKPTGPPAKKAISELP

SEQ ID NO: 18386 - protein, 132 aa, Homo sapiens
MEFDLNGNGDIGEKRVICGGRVVCRPKKTEVSPTCSIPHDLGGGPPTTVGGRRMGMRKWERRERVSPPSPHPHPLPPDIMSLKRMLEKLGVPKTHLELKKLIGEVSSGSGETFSYPDFLRMMLGKRSAILKM

SEQ ID NO: 18387 - protein, 797 aa, Homo sapiens
MASCRAWNLRVLVAVVCGLLTGIILGLGIWRIVIRIQRGKSTSSSSTPTEFCRNGGTWENGRCICTEEWKGLRCTIANFCENSTYMGFTFARIPVGRYGPSLQTCGKDTPNAGNPMAVRLCSLSLYGEIELQKVTIGNCNENLETLEKQVKDVTAPLNNISSEVQILTSDANKLTAENITSATRVVGQIFNTSRNASPEAKKVAIVTVSQLLDASEDAFQRVAATANDDALTTLIEQMETYSLSLGNQSVVEPNIAIQSANFSSENAVGPSNVRFSVQKGASSSLVSSSTFIHTNVDGLNPDAQTELQVLLNMTKNYTKTCGFVVYQNDKLFQSKTFTAKSDFSQKIISSKTDENEQDQSASVDMVFSPKYNQKEFQLYSYACVYWNLSAKDWDTYGCQKDKGTDGFLRCRCNHTTNFAVLMTFKKDYQYPKSLDILSNVGCALSVTGLALTVIFQIVTRKVRKTSVTWVLVNLCISMLIFNLLFVFGIENSNKNLQTSDGDINNIDFDNNDIPRTDTINIPNPMCTAIAALLHYFLLVTFTWNALSAAQLYYLLIRTMKPLPRHFILFISLIGWGVPAIVVAITVGVIYSQNGNNPQWELDYRQEKICWLAIPEPNGVIKSPLLWSFIVPVTIILISNVVMFITISIKVLWKNNQNLTSTKKVSSMKKIVSTLSVAVVFGITWILAYLMLVNDDSIRIVFSYIFCLFNTTQGLQIFILYTVRTKVFQSEASKVLMLLSSIGRRKSLPSVTRPRLRVKMYNFLRSLPTLHERFRLLETSPSTEEITLSESDNAKESI

SEQ ID NO: 18388 - protein, 902 aa, Homo sapiens
MKIAVIGQSLFGQEVYCHLRKEGHEVVGVFTVPDKDGKADPLGLEAEKDGVPVFKYSRWRAKGQALPDVVAKYQALGAELNVLPFCSQFIPMEIISAPRHGSIIYHPSLLPRHRGASAINWTLIHGDKKGGFSIFWADDGLDTGDLLLQKECEVLPDDTVSTLYNRFLFPEGIKGMVQAVRLIAEGKAPRLPQPEEGATYEGIQKKETAKINWDQPAEAIHNWIRGNDKVPGAWTEACEQKLTFFNSTLNTSGLVPEGDALPIPGAHRPGVVTKAGLILFGNDDKMLLVKNIQLEDGKMILASNFFKGAASSVLELTEAELVTAEAVRSVWQRILPKVLEVEDSTDFFKSGAASVDVVRLVEEVKELCDGLELENEDVYMASTFGDFIQLLVRKLRGDDEEGECSIDYVEMAVNKRTVRMPHQLFIGGEFVDAEGAKTSETINPTDGSVICQVSLAQVTDVDKAVAAAKDAFENGRWGKISARDRGRLMYRLADLMEQHQEELATIEALDAGAVYTLALKTHVGMSIQTFRYFAGWCDKIQGSTIPINQARPNRNLTLTRKEPVGVCGIIIPWNYPLMMLSWKTAACLAAGNTVVIKPAQVTPLTALKFAELTLKAGIPKGVVNVLPGSGSLVGQRLSDHPDVRKIGFTGSTEVGKHIMKSCAISNVKKVSLELGGKSPLIIFADCDLNKAVQMGMSSVFFNKGENCIAAGRLFVEDSIHDEFVRRVVEEVRKMKVGNPLDRDTDHGPQNHHAHLVKLMEYCQHGVKEGATLVCGGNQVPRPGFFFEPTVFTDVEDHMFIAKEESFGPVMIISRFADGDLDAVLSRANATEFGLASGVFTRDINKALYVSDKLQAGTVFVNTYNKTDVAAPFGGFKQSGFGKDLGEAALNEYLRVKTVTFEY

SEQ ID NO: 18389 - protein, 801 aa, Homo sapiens
MKIAVIGQSLFGQEVYCHLRKEGHEVVGVFTVPDKDGKADPLGLEAEKDGVPVFKYSRWRAKGQALPDVVAKYQALGAELNVLPFCSQFIPMEIISAPRHGSIIYHPSLLPRHRGASAIHNWIRGNDKVPGAWTEACEQKLTFFNSTLNTSGLVPEGDALPIPGAHRPGVVTKAGLILFGNDDKMLLVKNIQLEDGKMILASNFFKGAASSVLELTEAELVTAEAVRSVWQRILPKVLEVEDSTDFFKSGAASVDVVRLVEEVKELCDGLELENEDVYMASTFGDFIQLLVRKLRGDDEEGECSIDYVEMAVNKRTVRMPHQLFIGGEFVDAEGAKTSETINPTDGSVICQVSLAQVTDVDKAVAAAKDAFENGRWGKISARDRGRLMYRLADLMEQHQEELATIEALDAGAVYTLALKTHVGMSIQTFRYFAGWCDKIQGSTIPINQARPNRNLTLTRKEPVGVCGIIIPWNYPLMMLSWKTAACLAAGNTVVIKPAQVTPLTALKFAELTLKAGIPKGVVNVLPGSGSLVGQRLSDHPDVRKIGFTGSTEVGKHIMKSCAISNVKKVSLELGGKSPLIIFADCDLNKAVQMGMSSVFFNKGENCIAAGRLFVEDSIHDEFVRRVVEEVRKMKVGNPLDRDTDHGPQNHHAHLVKLMEYCQHGVKEGATLVCGGNQVPRPGFFFEPTVFTDVEDHMFIAKEESFGPVMIISRFADGDLDAVLSRANATEFGLASGVFTRDINKALYVSDKLQAGTVFVNTYNKTDVAAPFGGFKQSGFGKDLGEAALNEYLRVKTVTFEY

SEQ ID NO: 18390 - protein, 912 aa, Homo sapiens
MAGPSNPPATMKIAVIGQSLFGQEVYCHLRKEGHEVVGVFTVPDKDGKADPLGLEAEKDGVPVFKYSRWRAKGQALPDVVAKYQALGAELNVLPFCSQFIPMEIISAPRHGSIIYHPSLLPRHRGASAINWTLIHGDKKGGFSIFWADDGLDTGDLLLQKECEVLPDDTVSTLYNRFLFPEGIKGMVQAVRLIAEGKAPRLPQPEEGATYEGIQKKETAKINWDQPAEAIHNWIRGNDKVPGAWTEACEQKLTFFNSTLNTSGLVPEGDALPIPGAHRPGVVTKAGLILFGNDDKMLLVKNIQLEDGKMILASNFFKGAASSVLELTEAELVTAEAVRSVWQRILPKVLEVEDSTDFFKSGAASVDVVRLVEEVKELCDGLELENEDVYMASTFGDFIQLLVRKLRGDDEEGECSIDYVEMAVNKRTVRMPHQLFIGGEFVDAEGAKTSETINPTDGSVICQVSLAQVTDVDKAVAAAKDAFENGRWGKISARDRGRLMYRLADLMEQHQEELATIEALDAGAVYTLALKTHVGMSIQTFRYFAGWCDKIQGSTIPINQARPNRNLTLTRKEPVGVCGIIIPWNYPLMMLSWKTAACLAAGNTVVIKPAQVTPLTALKFAELTLKAGIPKGVVNVLPGSGSLVGQRLSDHPDVRKIGFTGSTEVGKHIMKSCAISNVKKVSLELGGKSPLIIFADCDLNKAVQMGMSSVFFNKGENCIAAGRLFVEDSIHDEFVRRVVEEVRKMKVGNPLDRDTDHGPQNHHAHLVKLMEYCQHGVKEGATLVCGGNQVPRPGFFFEPTVFTDVEDHMFIAKEESFGPVMIISRFADGDLDAVLSRANATEFGLASGVFTRDINKALYVSDKLQAGTVFVNTYNKTDVAAPFGGFKQSGFGKDLGEAALNEYLRVKTVTFEY

SEQ ID NO: 18391 - protein, 505 aa, Homo sapiens
MKIAVIGQSLFGQEVYCHLRKEGHEVVGVFTVPDKDGKADPLGLEAEKDGVPVFKYSRWRAKGQALPDVVAKYQALGAELNVLPFCSQFIPMEIISAPRHGSIIYHPSLLPRHRGASAINWTLIHGDKKGGFSIFWADDGLDTGDLLLQKECEVLPDDTVSTLYNRFLFPEGIKGMVQAVRLIAEGKAPRLPQPEEGATYEGIQKKETAKINWDQPAEAIHNWIRGNDKVPGAWTEACEQKLTFFNSTLNTSGLVPEGDALPIPGAHRPGVVTKAGLILFGNDDKMLLVKNIQLEDGKMILASNFFKGAASSVLELTEAELVTAEAVRSVWQRILPKVLEVEDSTDFFKSGAASVDVVRLVEEVKELCDGLELENEDVYMASTFGDFIQLLVRKLRGDDEEGECSIDYVEMAVNKRTVRMPHQLFIGGEFVDAEGAKTSETINPTDGSVICQVSLAQVTDVDKAVAAAKDAFENGRWGKISARDRGRLMYRAPPSPSTRPDPTAT

SEQ ID NO: 18392 - protein, 2068 aa, Homo sapiens
MAGRSHPGPLRPLLPLLVVAACVLPGAGGTCPERALERREEEANVVLTGTVEEILNVDPVQHTYSCKVRVWRYLKGKDLVARESLLDGGNKVVISGFGDPLICDNQVSTGDTRIFFVNPAPPYLWPAHKNELMLNSSLMRITLRNLEEVEFCVEDKPGTHFTPVPPTPPDACRGMLCGFGAVCEPNAEGPGRASCVCKKSPCPSVVAPVCGSDASTYSNECELQRAQCSQQRRIRLLSRGPCGSRDPCSNVTCSFGSTCARSADGLTASCLCPATCRGAPEGTVCGSDGADYPGECQLLRRACARQENVFKKFDGPCDPCQGALPDPSRSCRVNPRTRRPEMLLRPESCPARQAPVCGDDGVTYENDCVMGRSGAARGLLLQKVRSGQCQGRDQCPEPCRFNAVCLSRRGRPRCSCDRVTCDGAYRPVCAQDGRTYDSDCWRQQAECRQQRAIPSKHQGPCDQAPSPCLGVQCAFGATCAVKNGQAACECLQACSSLYDPVCGSDGVTYGSACELEATACTLGREIQVARKGPCDRCGQCRFGALCEAETGRCVCPSECVALAQPVCGSDGHTYPSECMLHVHACTHQISLHVASAGPCETCGDAVCAFGAVCSAGQCVCPRCEHPPPGPVCGSDGVTYGSACELREAACLQQTQIEEARAGPCEQAECGSGGSGSGEDGDCEQELCRQRGGIWDEDSEDGPCVCDFSCQSVPGSPVCGSDGVTYSTECELKKARCESQRGLYVAAQGACRGPTFAPLPPVAPLHCAQTPYGCCQDNITAARGVGLAGCPSACQCNPHGSYGGTCDPATGQCSCRPGVGGLRCDRCEPGFWNFRGIVTDGRSGCTPCSCDPQGAVRDDCEQMTGLCSCKPGVAGPKCGQCPDGRALGPAGCEADASAPATCAEMRCEFGARCVEESGSAHCVCPMLTCPEANATKVCGSDGVTYGNECQLKTIACRQGLQISIQSLGPCQEAVAPSTHPTSASVTVTTPGLLLSQALPAPPGALPLAPSSTAHSQTTPPPSSRPRTTASVPRTTVWPVLTVPPTAPSPAPSLVASAFGESGSTDGSSDEELSGDQEASGGGSGGLEPLEGSSVATPGPPVERASCYNSALGCCSDGKTPSLDAEGSNCPATKVFQGVLELEGVEGQELFYTPEMADPKSELFGETARSIESTLDDLFRNSDVKKDFRSVRLRDLGPGKSVRAIVDVHFDPTTAFRAPDVARALLRQIQVSRRRSLGVRRPLQEHVRFMDFDWFPAFITGATSGAIAAGATARATTASRLPSSAVTPRAPHPSHTSQPVAKTTAAPTTRRPPTTAPSRVPGRRPPAPQQPPKPCDSQPCFHGGTCQDWALGGGFTCSCPAGRGGAVCEKVLGAPVPAFEGRSFLAFPTLRAYHTLRLALEFRALEPQGLLLYNGNARGKDFLALALLDGRVQLRFDTGSGPAVLTSAVPVEPGQWHRLELSRHWRRGTLSVDGETPVLGESPSGTDGLNLDTDLFVGGVPEDQAAVALERTFVGAGLRGCIRLLDVNNQRLELGIGPGAATRGSGVGECGDHPCLPNPCHGGAPCQNLEAGRFHCQCPPGRVGPTCADEKSPCQPNPCHGAAPCRVLPEGGAQCECPLGREGTFCQTASGQDGSGPFLADFNGFSHLELRGLHTFARDLGEKMALEVVFLARGPSGLLLYNGQKTDGKGDFVSLALRDRRLEFRYDLGKGAAVIRSREPVTLGAWTRVSLERNGRKGALRVGDGPRVLGESPKSRKVPHTVLNLKEPLYVGGAPDFSKLARAAAVSSGFDGAIQLVSLGGRQLLTPEHVLRQVDVTSFAGHPCTRASGHPCLNGASCVPREAAYVCLCPGGFSGPHCEKGLVEKSAGDVDTLAFDGRTFVEYLNAVTESELANEIPVPETLDSGALHSEKALQSNHFELSLRTEATQGLVLWSGKATERADYVALAIVDGHLQLSYNLGSQPVVLRSTVPVNTNRWLRVVAHREQREGSLQVGNEAPVTGSSPLGATQLDTDGALWLGGLPELPVGPALPKAYGTGFVGCLRDVVVGRHPLHLLEDAVTKPELRPCPTP

SEQ ID NO: 18393 - protein, 1964 aa, Homo sapiens
  MOD_RES (3)..(3): Any amino acid
MPXLAVARDTRQPAGASLLVRGFMVPCNACLILLATATLGFAVLLFLNNYDKPGTHFTPVPPTPPDACRGMLCGFGAVCEPNAEGPGRASCVCKKSPCPSVVAPVCGSDASTYSNECELQRAQCSQQRRIRLLSRGPCGSRDPCSNVTCSFGSTCARSADGLTASCLCPATCRGAPEGTVCGSDGADYPGECQLLRRACARQENVFKKFDGPCDPCQGALPDPSRSCRVNPRTRRPEMLLRPESCPARQAPVCGDDGVTYENDCVMGRSGAARGLLLQKVRSGQCQGRDQCPEPCRFNAVCLSRRGRPRCSCDRVTCDGAYRPVCAQDGRTYDSDCWRQQAECRQQRAIPSKHQGPCDQAPSPCLGVQCAFGATCAVKNGQAACECLQACSSLYDPVCGSDGVTYGSACELEATACTLGREIQVARKGPCDRCGQCRFGALCEAETGRCVCPSECVALAQPVCGSDGHTYPSECMLHVHACTHQISLHVASAGPCETCGDAVCAFGAVCSAGQCVCPRCEHPPPGPVCGSDGVTYGSACELREAACLQQTQIEEARAGPCEQAECGSGGSGSGEDGDCEQELCRQRGGIWDEDSEDGPCVCDFSCQSVPGSPVCGSDGVTYSTECELKKARCESQRGLYVAAQGACRGPTFAPLPPVAPLHCAQTPYGCCQDNITAARGVGLAGCPSACQCNPHGSYGGTCDPATGQCSCRPGVGGLRCDRCEPGFWNFRGIVTDGRSGCTPCSCDPQGAVRDDCEQMTGLCSCKPGVAGPKCGQCPDGRALGPAGCEADASAPATCAEMRCEFGARCVEESGSAHCVCPMLTCPEANATKVCGSDGVTYGNECQLKTIACRQGLQISIQSLGPCQEAVAPSTHPTSASVTVTTPGLLLSQALPAPPGALPLAPSSTAHSQTTPPPSSRPRTTASVPRTTVWPVLTVPPTAPSPAPSLVASAFGESGSTDGSSDEELSGDQEASGGGSGGLEPLEGSSVATPGPPVERASCYNSALGCCSDGKTPSLDAEGSNCPATKVFQGVLELEGVEGQELFYTPEMADPKSELFGETARSIESTLDDLFRNSDVKKDFRSVRLRDLGPGKSVRAIVDVHFDPTTAFRAPDVARALLRQIQVSRRRSLGVRRPLQEHVRFMDFDWFPAFITGATSGAIAAGATARATTASRLPSSAVTPRAPHPSHTSQPVAKTTAAPTTRRPPTTAPSRVPGRRPPAPQQPPKPCDSQPCFHGGTCQDWALGGGFTCSCPAGRGGAVCEKVLGAPVPAFEGRSFLAFPTLRAYHTLRLALEFRALEPQGLLLYNGNARGKDFLALALLDGRVQLRFDTGSGPAVLTSAVPVEPGQWHRLELSRHWRRGTLSVDGETPVLGESPSGTDGLNLDTDLFVGGVPEDQAAVALERTFVGAGLRGCIRLLDVNNQRLELGIGPGAATRGSGVGECGDHPCLPNPCHGGAPCQNLEAGRFHCQCPPGRVGPTCADEKSPCQPNPCHGAAPCRVLPEGGAQCECPLGREGTFCQTASGQDGSGPFLADFNGFSHLELRGLHTFARDLGEKMALEVVFLARGPSGLLLYNGQKTDGKGDFVSLALRDRRLEFRYDLGKGAAVIRSREPVTLGAWTRVSLERNGRKGALRVGDGPRVLGESPKSRKVPHTVLNLKEPLYVGGAPDFSKLARAAAVSSGFDGAIQLVSLGGRQLLTPEHVLRQVDVTSFAGHPCTRASGHPCLNGASCVPREAAYVCLCPGGFSGPHCEKGLVEKSAGDVDTLAFDGRTFVEYLNAVTESELANEIPVPETLDSGALHSEKALQSNHFELSLRTEATQGLVLWSGKATERADYVALAIVDGHLQLSYNLGSQPVVLRSTVPVNTNRWLRVVAHREQREGSLQVGNEAPVTGSSPLGATQLDTDGALWLGGLPELPVGPALPKAYGTGFVGCLRDVVVGRHPLHLLEDAVTKPELRPCPTP

SEQ ID NO: 18394 - protein, 2049 aa, Homo sapiens
MAGRSHPGPLRPLLPLLVVAACVLPGAGGTCPERALERREEEANVVLTGTVEEILNVDPVQHTYSCKVRVWRYLKGKDLVARESLLDGGNKVVISGFGDPLICDNQVSTGDTRIFFVNPAPPYLWPAHKNELMLNSSLMRITLRNLEEVEFCVEDKPGTHFTPVPPTPPDACRGMLCGFGAVCEPNAEGPGRASCVCKKSPCPSVVAPVCGSDASTYSNECELQRAQCSQQRRIRLLSRGPCGSRDPCSNVTCSFGSTCARSADGLTASCLCPATCRGAPEGTVCGSDGADYPGECQLLRRACARQENVFKKFDGPCDPCQGALPDPSRSCRVNPRTRRPEMLLRPESCPARQAPVCGDDGVTYENDCVMGRSGAARGLLLQKVRSGQCQGRDQCPEPCRFNAVCLSRRGRPRCSCDRVTCDGAYRPVCAQDGRTYDSDCWRQQAECRQQRAIPSKHQGPCDQAPSPCLGVQCAFGATCAVKNGQAACECLQACSSLYDPVCGSDGVTYGSACELEATACTLGREIQVARKGPCDRCGQCRFGALCEAETGRCVCPSECVALAQPVCGSDGHTYPSECMLHVHACTHQISLHVASAGPCETCGDAVCAFGAVCSAGQCVCPRCEHPPPGPVCGSDGVTYGSACELREAACLQQTQIEEARAGPCEQAECGSGGSGSGEDGDCEQELCRQRGGIWDEDSEDGPCVCDFSCQSVPGSPVCGSDGVTYSTECELKKARCESQRGLYVAAQGACRGPTFAPLPPVAPLHCAQTPYGCCQDNITAARGVGLAGCPSACQCNPHGSYGGTCDPATGQCSCRPGVGGLRCDRCEPGFWNFRGIVTDGRSGCTPCSCDPQGAVRDDCEQMTGLCSCKPGVAGPKCGQCPDGRALGPAGCEADASAPATCAEMRCEFGARCVEESGSAHCVCPMLTCPEANATKVCGSDGVTYGNECQLKTIACRQGLQISIQSLGPCQEAVAPSTHPTSASVTVTTPGLLLSQALPAPPGALPLAPSSTAHSQTTPPPSSRPRTTASVPRTTVWPVLTVPPTAPSPAPSLVASAFGESGSTDGSSDEELSGDQEASGGGSGGLEPLEGSSVATPGPPVERASCYNSALGCCSDGKTPSLDAEGSNCPATKVFQGVLELEGVEGQELFYTPEMADPKSELFGETARSIESTLDDLFRNSDVKKDFRSVRLRDLGPGKSVRAIVDVHFDPTTAFRAPDVARALLRQIQVSRRRSLGVRRPLQEHVRFMDFDWFPAFITGATSGAIAAGATARATTASRLPSSAVTPRAPHPSHTSQPVAKTTAAPTTRRPPTTAPSRVPGRRPPAPQQPPKPCDSQPCFHGGTCQDWALGGGFTCSCPAGRGGAVCEKVLGAPVPAFEGRSFLAFPTLRAYHTLRLALEFRALEPQGLLLYNGNARGKDFLALALLDGRVQLRFDTGSGPAVLTSAVPVEPGQWHRLELSRHWRRGTLSVDGETPVLGESPSGTDGLNLDTDLFVGGVPEDQAAVALERTFVGAGLRGCIRLLDVNNQRLELGIGPGAATRGSGVGECGDHPCLPNPCHGGAPCQNLEAGRFHCQCPPGRVGPTCADEKSPCQPNPCHGAAPCRVLPEGGAQCECPLGREGTFCQTASGQDGSGPFLADFNGFSHLELRGLHTFARDLGEKMALEVVFLARGPSGLLLYNGQKTDGKGDFVSLALRDRRLEFRYDLGKGAAVIRSREPVTLGAWTRVSLERNGRKGALRVGDGPRVLGESPKSRKVPHTVLNLKEPLYVGGAPDFSKLARAAAVSSGFDGAIQLVSLGGRQLLTPEHVLRQVDVTSFAGHPCTRASGHPCLNGASCVPREAAYVCLCPGGFSGPHCEKGLVEKSAGDVDTLAFDGRTFVEYLNAVTESEKALQSNHFELSLRTEATQGLVLWSGKATERADYVALAIVDGHLQLSYNLGSQPVVLRSTVPVNTNRWLRVVAHREQREGSLQVGNEAPVTGSSPLGATQLDTDGALWLGGLPELPVGPALPKAYGTGFVGCLRDVVVGRHPLHLLEDAVTKPELRPCPTP

SEQ ID NO: 18395 - protein, 2060 aa, Homo sapiens
MAGRSHPGPLRPLLPLLVVAACVLPGAGGTCPERALERREEEANVVLTGTVEEILNVDPVQHTYSCKVRVWRYLKGKDLVARESLLDGGNKVVISGFGDPLICDNQVSTGDTRIFFVNPAPPYLWPAHKNELMLNSSLMRITLRNLEEVEFCVEDKPGTHFTPVPPTPPDACRGMLCGFGAVCEPNAEGPGRASCVCKKSPCPSVVAPVCGSDASTYSNECELQRAQCSQQRRIRLLSRGPCGSRDPCSNVTCSFGSTCARSADGLTASCLCPATCRGAPEGTVCGSDGADYPGECQLLRRACARQENVFKKFDGPCDPCQGALPDPSRSCRVNPRTRRPEMLLRPESCPARQAPVCGDDGVTYENDCVMGRSGAARGLLLQKVRSGQCQGRDQCPEPCRFNAVCLSRRGRPRCSCDRVTCDGAYRPVCAQDGRTYDSDCWRQQAECRQQRAIPSKHQGPCDQAPSPCLGVQCAFGATCAVKNGQAACECLQACSSLYDPVCGSDGVTYGSACELEATACTLGREIQVARKGPCDRCGQCRFGALCEAETGRCVCPSECVALAQPVCGSDGHTYPSECMLHVHACTHQISLHVASAGPCETCGDAVCAFGAVCSAGQCVCPRCEHPPPGPVCGSDGVTYGSACELREAACLQQTQIEEARAGPCEQAECGSGGSGSGEDGDCEQELCRQRGGIWDEDSEDGPCVCDFSCQSVPGSPVCGSDGVTYSTECELKKARCESQRGLYVAAQGACRGPTFAPLPPVAPLHCAQTPYGCCQDNITAARGVGLAGCPSACQCNPHGSYGGTCDPATGQCSCRPGVGGLRCDRCEPGFWNFRGIVTDGRSGCTPCSCDPQGAVRDDCEQMTGLCSCKPGVAGPKCGQCPDGRALGPAGCEADASAPATCAEMRCEFGARCVEESGSAHCVCPMLTCPEANATKVCGSDGVTYGNECQLKTIACRQGLQISIQSLGPCQEAVAPSTHPTSASVTVTTPGLLLSQALPAPPGALPLAPSSTAHSQTTPPPSSRPRTTASVPRTTVWPVLTVPPTAPSPAPSLVASAFGESGSTDGSSDEELSGDQEASGGGSGGLEPLEGSSVATPGPPVERASCYNSALGCCSDGKTPSLDAEGSNCPATKVFQGVLELEGVEGQELFYTPEMADPKSELFGETARSIESTLDDLFRNSDVKKDFRSVRLRDLGPGKSVRAIVDVHFDPTTAFRAPDVARALLRQIQVSRRRSLGVRRPLQEHVRFMDFDWFPAFITGATSGAIAAGATARATTASRLPSSAVTPRAPHPSHTSQPVAKTTAAPTTRRPPTTAPSRVPGRRPPAPQQPPKPCDSQPCFHGGTCQDWALGGGFTCSCPAGRGGAVCEKVLGAPVPAFEGRSFLAFPTLRAYHTLRLALEFRALEPQGLLLYNGNARGKDFLALALLDGRVQLRFDTGSGPAVLTSAVPVEPGQWHRLELSRHWRRGTLSVDGETPVLGESPSGTDGLNLDTDLFVGGVPEDQAAVALERTFVGAGLRGCIRLLDVNNQRLELGIGPGAATRGSGVGECGDHPCLPNPCHGGAPCQNLEAGRFHCQCPPGRVGPTCADEKSPCQPNPCHGAAPCRVLPEGGAQCECPLGREGTFCQTASGQDGSGPFLADFNGFSHLELRGLHTFARDLGEKMALEVVFLARGPSGLLLYNGQKTDGKGDFVSLALRDRRLEFRYDLGKGAAVIRSREPVTLGAWTRVSLERNGRKGALRVGDGPRVLGESPKSRKVPHTVLNLKEPLYVGGAPDFSKLARAAAVSSGFDGAIQLVSLGGRQLLTPEHVLRQVDVTSFAGHPCTRASGHPCLNGASCVPREAAYVCLCPGGFSGPHCEKGLVEKSAGDVDTLAFDGRTFVEYLNAVTESPETLDSGALHSEKALQSNHFELSLRTEATQGLVLWSGKATERADYVALAIVDGHLQLSYNLGSQPVVLRSTVPVNTNRWLRVVAHREQREGSLQVGNEAPVTGSSPLGATQLDTDGALWLGGLPELPVGPALPKAYGTGFVGCLRDVVVGRHPLHLLEDAVTKPELRPCPTP

SEQ ID NO: 18396 - protein, 2057 aa, Homo sapiens
MAGRSHPGPLRPLLPLLVVAACVLPGAGGTCPERALERREEEANVVLTGTVEEILNVDPVQHTYSCKVRVWRYLKGKDLVARESLLDGGNKVVISGFGDPLICDNQVSTGDTRIFFVNPAPPYLWPAHKNELMLNSSLMRITLRNLEEVEFCVEDKPGTHFTPVPPTPPDACRGMLCGFGAVCEPNAEGPGRASCVCKKSPCPSVVAPVCGSDASTYSNECELQRAQCSQQRRIRLLSRGPCGSRDPCSNVTCSFGSTCARSADGLTASCLCPATCRGAPEGTVCGSDGADYPGECQLLRRACARQENVFKKFDGPCDPCQGALPDPSRSCRVNPRTRRPEMLLRPESCPARQAPVCGDDGVTYENDCVMGRSGAARGLLLQKVRSGQCQGRDQCPEPCRFNAVCLSRRGRPRCSCDRVTCDGAYRPVCAQDGRTYDSDCWRQQAECRQQRAIPSKHQGPCDQAPSPCLGVQCAFGATCAVKNGQAACECLQACSSLYDPVCGSDGVTYGSACELEATACTLGREIQVARKGPCDRCGQCRFGALCEAETGRCVCPSECVALAQPVCGSDGHTYPSECMLHVHACTHQISLHVASAGPCETCGDAVCAFGAVCSAGQCVCPRCEHPPPGPVCGSDGVTYGSACELREAACLQQTQIEEARAGPCEQAECGSGGSGSGEDGDCEQELCRQRGGIWDEDSEDGPCVCDFSCQSVPGSPVCGSDGVTYSTECELKKARCESQRGLYVAAQGACRGPTFAPLPPVAPLHCAQTPYGCCQDNITAARGVGLAGCPSACQCNPHGSYGGTCDPATGQCSCRPGVGGLRCDRCEPGFWNFRGIVTDGRSGCTPCSCDPQGAVRDDCEQMTGLCSCKPGVAGPKCGQCPDGRALGPAGCEADASAPATCAEMRCEFGARCVEESGSAHCVCPMLTCPEANATKVCGSDGVTYGNECQLKTIACRQGLQISIQSLGPCQEAVAPSTHPTSASVTVTTPGLLLSQALPAPPGALPLAPSSTAHSQTTPPPSSRPRTTASVPRTTVWPVLTVPPTAPSPAPSLVASAFGESGSTDGSSDEELSGDQEASGGGSGGLEPLEGSSVATPGPPVERASCYNSALGCCSDGKTPSLDAEGSNCPATKVFQGVLELEGVEGQELFYTPEMADPKSELFGETARSIESTLDDLFRNSDVKKDFRSVRLRDLGPGKSVRAIVDVHFDPTTAFRAPDVARALLRQIQVSRRRSLGVRRPLQEHVRFMDFDWFPAFITGATSGAIAAGATARATTASRLPSSAVTPRAPHPSHTSQPVAKTTAAPTTRRPPTTAPSRVPGRRPPAPQQPPKPCDSQPCFHGGTCQDWALGGGFTCSCPAGRGGAVCEKVLGAPVPAFEGRSFLAFPTLRAYHTLRLALEFRALEPQGLLLYNGNARGKDFLALALLDGRVQLRFDTGSGPAVLTSAVPVEPGQWHRLELSRHWRRGTLSVDGETPVLGESPSGTDGLNLDTDLFVGGVPEDQAAVALERTFVGAGLRGCIRLLDVNNQRLELGIGPGAATRGSGVGECGDHPCLPNPCHGGAPCQNLEAGRFHCQCPPGRVGPTCADEKSPCQPNPCHGAAPCRVLPEGGAQCECPLGREGTFCQTASGQDGSGPFLADFNGFSHLELRGLHTFARDLGEKMALEVVFLARGPSGLLLYNGQKTDGKGDFVSLALRDRRLEFRYDLGKGAAVIRSREPVTLGAWTRVSLERNGRKGALRVGDGPRVLGESPKSRKVPHTVLNLKEPLYVGGAPDFSKLARAAAVSSGFDGAIQLVSLGGRQLLTPEHVLRQVDVTSFAGHPCTRASGHPCLNGASCVPREAAYVCLCPGGFSGPHCEKGLVEKSAGDVDTLAFDGRTFVEYLNAVTESELANEIPVEKALQSNHFELSLRTEATQGLVLWSGKATERADYVALAIVDGHLQLSYNLGSQPVVLRSTVPVNTNRWLRVVAHREQREGSLQVGNEAPVTGSSPLGATQLDTDGALWLGGLPELPVGPALPKAYGTGFVGCLRDVVVGRHPLHLLEDAVTKPELRPCPTP

SEQ ID NO: 18397 - protein, 2045 aa, Homo sapiens
MAGRSHPGPLRPLLPLLVVAACVLPGAGGTCPERALERREEEANVVLTGTVEEILNVDPVQHTYSCKVRVWRYLKGKDLVARESLLDGGNKVVISGFGDPLICDNQVSTGDTRIFFVNPAPPYLWPAHKNELMLNSSLMRITLRNLEEVEFCVEDKPGTHFTPVPPTPPDACRGMLCGFGAVCEPNAEGPGRASCVCKKSPCPSVVAPVCGSDASTYSNECELQRAQCSQQRRIRLLSRGPCGSRDPCSNVTCSFGSTCARSADGLTASCLCPATCRGAPEGTVCGSDGADYPGECQLLRRACARQENVFKKFDGPCDPCQGALPDPSRSCRVNPRTRRPEMLLRPESCPARQAPVCGDDGVTYENDCVMGRSGAARGLLLQKVRSGQCQGRDQCPEPCRFNAVCLSRRGRPRCSCDRVTCDGAYRPVCAQDGRTYDSDCWRQQAECRQQRAIPSKHQGPCDQAPSPCLGVQCAFGATCAVKNGQAACECLQACSSLYDPVCGSDGVTYGSACELEATACTLGREIQVARKGPCDRCGQCRFGALCEAETGRCVCPSECVALAQPVCGSDGHTYPSECMLHVHACTHQISLHVASAGPCETCGDAVCAFGAVCSAGQCVCPRCEHPPPGPVCGSDGVTYGSACELREAACLQQTQIEEARAGPCEQAECGSGGSGSGEDGDCEQELCRQRGGIWDEDSEDGPCVCDFSCQSVPGSPVCGSDGVTYSTECELKKARCESQRGLYVAAQGACRGPTFAPLPPVAPLHCAQTPYGCCQDNITAARGVGLAGCPSACQCNPHGSYGGTCDPATGQCSCRPGVGGLRCDRCEPGFWNFRGIVTDGRSGCTPCSCDPQGAVRDDCEQMTGLCSCKPGVAGPKCGQCPDGRALGPAGCEADASAPATCAEMRCEFGARCVEESGSAHCVCPMLTCPEANATKVCGSDGVTYGNECQLKTIACRQGLQISIQSLGPCQEAVAPSTHPTSASVTVTTPGLLLSQALPAPPGALPLAPSSTAHSQTTPPPSSRPRTTASVPRTTVWPVLTVPPTAPSPAPSLVASAFGESGSTDGSSDEELSGDQEASGGGSGGLEPLEGSSVATPGPPVERASCYNSALGCCSDGKTPSLDAEGSNCPATKVFQGVLELEGVEGQELFYTPEMADPKSELFGETARSIESTLDDLFRNSDVKKDFRSVRLRDLGPGKSVRAIVDVHFDPTTAFRAPDVARALLRQIQVSRRRSLGVRRPLQEHVRFMDFDWFPAFITGATSGAIAAGATARATTASRLPSSAVTPRAPHPSHTSQPVAKTTAAPTTRRPPTTAPSRVPGRRPPAPQQPPKPCDSQPCFHGGTCQDWALGGGFTCSCPAGRGGAVCEKVLGAPVPAFEGRSFLAFPTLRAYHTLRLALEFRALEPQGLLLYNGNARGKDFLALALLDGRVQLRFDTGSGPAVLTSAVPVEPGQWHRLELSRHWRRGTLSVDGETPVLGESPSGTDGLNLDTDLFVGGVPEDQAAVALERTFVGAGLRGCIRLLDVNNQRLELGIGPGAATRGSGVGECGDHPCLPNPCHGGAPCQNLEAGRFHCQCPPGRVGPTCADEKSPCQPNPCHGAAPCRVLPEGGAQCECPLGREGTFCQTASGQDGSGPFLADFNGFSHLELRGLHTFARDLGEKMALEVVFLARGPSGLLLYNGQKTDGKGDFVSLALRDRRLEFRYDLGKGAAVIRSREPVTLGAWTRVSLERNGRKGALRVGDGPRVLGESPVPHTVLNLKEPLYVGGAPDFSKLARAAAVSSGFDGAIQLVSLGGRQLLTPEHVLRQVDVTSFAGHPCTRASGHPCLNGASCVPREAAYVCLCPGGFSGPHCEKGLVEKSAGDVDTLAFDGRTFVEYLNAVTESEKALQSNHFELSLRTEATQGLVLWSGKATERADYVALAIVDGHLQLSYNLGSQPVVLRSTVPVNTNRWLRVVAHREQREGSLQVGNEAPVTGSSPLGATQLDTDGALWLGGLPELPVGPALPKAYGTGFVGCLRDVVVGRHPLHLLEDAVTKPELRPCPTP

SEQ ID NO: 18398 - protein, 2064 aa, Homo sapiens
MAGRSHPGPLRPLLPLLVVAACVLPGAGGTCPERALERREEEANVVLTGTVEEILNVDPVQHTYSCKVRVWRYLKGKDLVARESLLDGGNKVVISGFGDPLICDNQVSTGDTRIFFVNPAPPYLWPAHKNELMLNSSLMRITLRNLEEVEFCVEDKPGTHFTPVPPTPPDACRGMLCGFGAVCEPNAEGPGRASCVCKKSPCPSVVAPVCGSDASTYSNECELQRAQCSQQRRIRLLSRGPCGSRDPCSNVTCSFGSTCARSADGLTASCLCPATCRGAPEGTVCGSDGADYPGECQLLRRACARQENVFKKFDGPCDPCQGALPDPSRSCRVNPRTRRPEMLLRPESCPARQAPVCGDDGVTYENDCVMGRSGAARGLLLQKVRSGQCQGRDQCPEPCRFNAVCLSRRGRPRCSCDRVTCDGAYRPVCAQDGRTYDSDCWRQQAECRQQRAIPSKHQGPCDQAPSPCLGVQCAFGATCAVKNGQAACECLQACSSLYDPVCGSDGVTYGSACELEATACTLGREIQVARKGPCDRCGQCRFGALCEAETGRCVCPSECVALAQPVCGSDGHTYPSECMLHVHACTHQISLHVASAGPCETCGDAVCAFGAVCSAGQCVCPRCEHPPPGPVCGSDGVTYGSACELREAACLQQTQIEEARAGPCEQAECGSGGSGSGEDGDCEQELCRQRGGIWDEDSEDGPCVCDFSCQSVPGSPVCGSDGVTYSTECELKKARCESQRGLYVAAQGACRGPTFAPLPPVAPLHCAQTPYGCCQDNITAARGVGLAGCPSACQCNPHGSYGGTCDPATGQCSCRPGVGGLRCDRCEPGFWNFRGIVTDGRSGCTPCSCDPQGAVRDDCEQMTGLCSCKPGVAGPKCGQCPDGRALGPAGCEADASAPATCAEMRCEFGARCVEESGSAHCVCPMLTCPEANATKVCGSDGVTYGNECQLKTIACRQGLQISIQSLGPCQEAVAPSTHPTSASVTVTTPGLLLSQALPAPPGALPLAPSSTAHSQTTPPPSSRPRTTASVPRTTVWPVLTVPPTAPSPAPSLVASAFGESGSTDGSSDEELSGDQEASGGGSGGLEPLEGSSVATPGPPVERASCYNSALGCCSDGKTPSLDAEGSNCPATKVFQGVLELEGVEGQELFYTPEMADPKSELFGETARSIESTLDDLFRNSDVKKDFRSVRLRDLGPGKSVRAIVDVHFDPTTAFRAPDVARALLRQIQVSRRRSLGVRRPLQEHVRFMDFDWFPAFITGATSGAIAAGATARATTASRLPSSAVTPRAPHPSHTSQPVAKTTAAPTTRRPPTTAPSRVPGRRPPAPQQPPKPCDSQPCFHGGTCQDWALGGGFTCSCPAGRGGAVCEKVLGAPVPAFEGRSFLAFPTLRAYHTLRLALEFRALEPQGLLLYNGNARGKDFLALALLDGRVQLRFDTGSGPAVLTSAVPVEPGQWHRLELSRHWRRGTLSVDGETPVLGESPSGTDGLNLDTDLFVGGVPEDQAAVALERTFVGAGLRGCIRLLDVNNQRLELGIGPGAATRGSGVGECGDHPCLPNPCHGGAPCQNLEAGRFHCQCPPGRVGPTCADEKSPCQPNPCHGAAPCRVLPEGGAQCECPLGREGTFCQTASGQDGSGPFLADFNGFSHLELRGLHTFARDLGEKMALEVVFLARGPSGLLLYNGQKTDGKGDFVSLALRDRRLEFRYDLGKGAAVIRSREPVTLGAWTRVSLERNGRKGALRVGDGPRVLGESPVPHTVLNLKEPLYVGGAPDFSKLARAAAVSSGFDGAIQLVSLGGRQLLTPEHVLRQVDVTSFAGHPCTRASGHPCLNGASCVPREAAYVCLCPGGFSGPHCEKGLVEKSAGDVDTLAFDGRTFVEYLNAVTESELANEIPVPETLDSGALHSEKALQSNHFELSLRTEATQGLVLWSGKATERADYVALAIVDGHLQLSYNLGSQPVVLRSTVPVNTNRWLRVVAHREQREGSLQVGNEAPVTGSSPLGATQLDTDGALWLGGLPELPVGPALPKAYGTGFVGCLRDVVVGRHPLHLLEDAVTKPELRPCPTP

SEQ ID NO: 18399 - protein, 563 aa, Homo sapiens
MLLPAPALRRALLSRPWTGAGLRWKHTSSLKVANEPVLAFTQGSPERDALQKALKDLKGRMEAIPCVVGDEEVWTSDVQYQVSPFNHGHKVAKFCYADKSLLNKAIEAALAARKEWDLKPIADRAQIFLKAADMLSGPRRAEILAKTMVGQGKTVIQAEIDAAAELIDFFRFNAKYAVELEGQQPISVPPSTNSTVYRGLEGFVAAISPFNFTAIGGNLAGAPALMGNVVLWKPSDTAMLASYAVYRILREAGLPPNIIQFVPADGPLFGDTVTSSEHLCGINFTGSVPTFKHLWKQVAQNLDRFHTFPRLAGECGGKNFHFVHRSADVESVVSGTLRSAFEYGGQKCSACSRLYVPHSLWPQIKGRLLEEHSRIKVGDPAEDFGTFFSAVIDAKSFARIKKWLEHARSSPSLTILAGGKCDDSVGYFVEPCIVESKDPQEPIMKEEIFGPVLSVYVYPDDKYKETLQLVDSTTSYGLTGAVFSQDKDVVQEATKVLRNAAGNFYINDKSTGSIVGQQPFGGARASGTNDKPGGPHYILRWTSPQVIKETHKPLGDWSYAYMQ

SEQ ID NO: 18400 - protein, 503 aa, Homo sapiens
MEAIPCVVGDEEVWTSDVQYQVSPFNHGHKVAKFCYADKSLLNKAIEAALAARKEWDLKPIADRAQIFLKAADMLSGPRRAEILAKTMVGQGKTVIQAEIDAAAELIDFFRFNAKYAVELEGQQPISVPPSTNSTVYRGLEGFVAAISPFNFTAIGGNLAGAPALMGNVVLWKPSDTAMLASYAVYRILREAGLPPNIIQFVPADGPLFGDTVTSSEHLCGINFTGSVPTFKHLWKQVAQNLDRFHTFPRLAGECGGKNFHFVHRSADVESVVSGTLRSAFEYGGQKCSACSRLYVPHSLWPQIKGRLLEEHSRIKVGDPAEDFGTFFSAVIDAKSFARIKKWLEHARSSPSLTILAGGKCDDSVGYFVEPCIVESKDPQEPIMKEEIFGPVLSVYVYPDDKYKETLQLVDSTTSYGLTGAVFSQDKDVVQEATKVLRNAAGNFYINDKSTGSIVGQQPFGGARASGTNDKPGGPHYILRWTSPQVIKETHKPLGDWSYAYMQ

SEQ ID NO: 18401 - protein, 512 aa, Homo sapiens
MLLPAPALRRALLSRPWTGAGLRWKHTSSLKVANEPVLAFTQGSPERDALQKALKDLKGRMEAIPCVVGDEEVWTSDVQYQVSPFNHGHKVAKFCYADKSLLNKAIEAALAARKEWDLKPIADRAQIFLKAADMLSGPRRAEILAKTMVGQGKTVIQAEIDAAAELIDFFRFNAKYAVELEGQQPISVPPSTNSTVYRGLEGFVAAISPFNFTAIGGNLAGAPALMGNVVLWKPSDTAMLASYAVYRILREAGLPPNIIQFVPADGPLFGDTVTSSEHLCGINFTGSVPTFKHLWKQVAQNLDRFHTFPRLAGECGGKNFHFVHRSADVESVVSGTLRSAFEYGGQKCSACSRLYVPHSLWPQIKGRLLEEHSRIKVGDPAEDFGTFFSAVIDAKEIFGPVLSVYVYPDDKYKETLQLVDSTTSYGLTGAVFSQDKDVVQEATKVLRNAAGNFYINDKSTGSIVGQQPFGGARASGTNDKPGGPHYILRWTSPQVIKETHKPLGDWSYAYMQ

SEQ ID NO: 18402 - protein, 363 aa, Homo sapiens
MKGNSTLATTSKNITSGLHFGLVNISGNNESTLNCSQKPSDKHLDAIPILYYIIFVIGFLVNIVVVTLFCCQKGPKKVSSIYIFNLAVADLLLLATLPLWATYYSYRYDWLFGPVMCKVFGSFLTLNMFASIFFITCMSVDRYQSVIYPFLSQRRNPWQASYIVPLVWCMACLSSLPTFYFRDVRTIEYLGVNACIMAFPPEKYAQWSAGIALMKNILGFIIPLIFIATCYFGIRKHLLKTNSYGKNRITRDQVLKMAAAVVLAFIICWLPFHVLTFLDALAWMGVINSCEVIAVIDLALPFAILLGFTNSCVNPFLYCFVGNRFQQKLRSVFRVPITWLQGKRESMSCRKSSSLREMETFVS

SEQ ID NO: 18403 - protein, 1353 aa, Homo sapiens
MASPPHQQLLHHHSTEVSCDSSGDSNSVRVKINPKQLSSNSHPKHCKYSISSSCSSSGDSGGVPRRVGGGGRLRRQKKLPQLFERASSRWWDPKFDSVNLEEACLERCFPQTQRRFRYALFYIGFACLLWSIYFAVHMRSRLIVMVAPALCFLLVCVGFFLFTFTKLYARHYAWTSLALTLLVFALTLAAQFQVLTPVSGRGDSSNLTATARPTDTCLSQVGSFSMCIEVLFLLYTVMHLPLYLSLCLGVAYSVLFETFGYHFRDEACFPSPGAGALHWELLSRGLLHGCIHAIGVHLFVMSQVRSRSTFLKVGQSIMHGKDLEVEKALKERMIHSVMPRIIADDLMKQGDEESENSVKRHATSSPKNRKKKSSIQKAPIAFRPFKMQQIEEVSILFADIVGFTKMSANKSAHALVGLLNDLFGRFDRLCEETKCEKISTLGDCYYCVAGCPEPRADHAYCCIEMGLGMIKAIEQFCQEKKEMVNMRVGVHTGTVLCGILGMRRFKFDVWSNDVNLANLMEQLGVAGKVHISEATAKYLDDRYEMEDGKVIERLGQSVVADQLKGLKTYLISGQRAKESRCSCAEALLSGFEVIDGSQVSSGPRGQGTASSGNVSDLAQTVKTFDNLKTCPSCGITFAPKSEAGAEGGAPQNGCQDEHKNSTKASGGPNPKTQNGLLSPPQEEKLTNSQTSLCEILQEKGRWAGVSLDQSALLPLRFKNIREKTDAHFVDVIKEDSLMKDYFFKPPINQFSLNFLDQELERSYRTSYQEEVIKNSPVKTFASPTFSSLLDVFLSTTVFLTLSTTCFLKYEAATVPPPPAALAVFSAALLLEVLSLAVSIRMVFFLEDVMACTKRLLEWIAGWLPRHCIGAILVSLPALAVYSHVTSEYETNIHFPVFTGSAALIAVVHYCNFCQLSSWMRSSLATVVGAGPLLLLYVSLCPDSSVLTSPLDAVQNFSSERNPCNSSVPRDLRRPASLIGQEVVLVFFLLLLLVWFLNREFEVSYRLHYHGDVEADLHRTKIQSMRDQADWLLRNIIPYHVAEQLKVSQTYSKNHDSGGVIFASIVNFSEFYEENYEGGKECYRVLNELIGDFDELLSKPDYSSIEKIKTIGATYMAASGLNTAQAQDGSHPQEHLQILFEFAKEMMRVVDDFNNNMLWFNFKLRVGFNHGPLTAGVIGTTKLLYDIWGDTVNIASRMDTTGVECRIQVSEESYRVLSKMGYDFDYRGTVNVKGKGQMKTYLYPKCTDHRVIPQHQLSISPDIRVQVDGSIGRSPTDEIANLVPSVQYVDKTSLGSDSSTQAKDAHLSPKRPWKEPVKAEERGRFGKAIEKDDCDETGIEEANELTKLNVSKSV

SEQ ID NO: 18404 - protein, 355 aa, Homo sapiens
MIEAEEQQPCKTDFYSELPKVELHAHLNGSISSHTMKKLIAQKPDLKIHDQMTVIDKGKKRTLEECFQMFQTIHQLTSSPEDILMVTKDVIKEFADDGVKYLELRSTPRRENATGMTKKTYVESILEGIKQSKQENLDIDVRYLIAVDRRGGPLVAKETVKLAEEFFLSTEGTVLGLDLSGDPTVGQAKDFLEPLLEAKKAGLKLALHLSEIPNQKKETQILLDLLPDRIGHGTFLNSGEGGSLDLVDFVRQHRIPLELCLTSNVKSQTVPSYDQHHFGFWYSIAHPSVICTDDKGVFATHLSQEYQLAAETFNLTQSQVWDLSYESINYIFASDSTRSELRKKWNHLKPRVLHI

SEQ ID NO: 18405 - protein, 267 aa, Homo sapiens
MIEAEEQQPCKTDFYSELPKVELHAHLNGSISSHTMKKLIAQKPDLKIHDQMTVIDKGKKRTLEECFQMFQTIHQLTSSPEDILMVTKDVIKEFADDGVKYLELRSTPRRENATGMTKKTYVESILEGIKQSKQENLDIDVRYLIAVDRRGGPLVAKETVKLAEEFFLSTEGTVLGLDLSGDPTVGQAKDFLEPLLEAKKAGLKLALHLSEIPNQKKETQILLDLLPDRIGHGTFLNSGEGGSLDLVDFVRQHRIPLGKAWSFRSSR

SEQ ID NO: 18406 - protein, 328 aa, Homo sapiens
MIEAEEQQPCKTDFYSELPKVELHAHLNGSISSHTMKKLIAQKPDLKIHDQMTVIDKGKKRTLEECFQMFQTIHQLTSSPEDILMVTKDVIKEFADDGVKYLELRSTPRRENATGMTKKTYVESILEGIKQSKQENLDIDVRYLIAVDRRGGPLVAKETVKLAEEFFLSTEGTVLGLDLSGDPTIPNQKKETQILLDLLPDRIGHGTFLNSGEGGSLDLVDFVRQHRIPLELCLTSNVKSQTVPSYDQHHFGFWYSIAHPSVICTDDKGVFATHLSQEYQLAAETFNLTQSQVWDLSYESINYIFASDSTRSELRKKWNHLKPRVLHI

SEQ ID NO: 18407 - protein, 1620 aa, Homo sapiens
MGAIGLLWLLPLLLSTAAVGSGMGTGQRAGSPAAGPPLQPREPLSYSRLQRKSLAVDFVVPSLFRVYARDLLLPPSSSELKAGRPEARGSLALDCAPLLRLLGPAPGVSWTAGSPAPAEARTLSRVLKGGSVRKLRRAKQLVLELGEEAILEGCVGPPGEAAVGLLQFNLSELFSWWIRQGEGRLRIRLMPEKKASEVGREGRLSAAIRASQPRLLFQIFGTGHSSLESPTNMPSPSPDYFTWNLTWIMKDSFPFLSHRSRYGLECSFDFPCELEYSPPLHDLRNQSWSWRRIPSEEASQMDLLDGPGAERSKEMPRGSFLLLNTSADSKHTILSPWMRSSSEHCTLAVSVHRHLQPSGRYIAQLLPHNEAAREILLMPTPGKHGWTVLQGRIGRPDNPFRVALEYISSGNRSLSAVDFFALKNCSEGTSPGSKMALQSSFTCWNGTVLQLGQACDFHQDCAQGEDESQMCRKLPVGFYCNFEDGFCGWTQGTLSPHTPQWQVRTLKDARFQDHQDHALLLSTTDVPASESATVTSATFPAPIKSSPCELRMSWLIRGVLRGNVSLVLVENKTGKEQGRMVWHVAAYEGLSLWQWMVLPLLDVSDRFWLQMVAWWGQGSRAIVAFDNISISLDCYLTISGEDKILQNTAPKSRNLFERNPNKELKPGENSPRQTPIFDPTVHWLFTTCGASGPHGPTQAQCNNAYQNSNLSVEVGSEGPLKGIQIWKVPATDTYSISGYGAAGGKGGKNTMMRSHGVSVLGIFNLEKDDMLYILVGQQGEDACPSTNQLIQKVCIGENNVIEEEIRVNRSVHEWAGGGGGGGGATYVFKMKDGVPVPLIIAAGGGGRAYGAKTDTFHPERLENNSSVLGLNGNSGAAGGGGGWNDNTSLLWAGKSLQEGATGGHSCPQAMKKWGWETRGGFGGGGGGCSSGGGGGGYIGGNAASNNDPEMDGEDGVSFISPLGILYTPALKVMEGHGEVNIKHYLNCSHCEVDECHMDPESHKVICFCDHGTVLAEDGVSCIVSPTPEPHLPLSLILSVVTSALVAALVLAFSGIMIVYRRKHQELQAMQMELQSPEYKLSKLRTSTIMTDYNPNYCFAGKTSSISDLKEVPRKNITLIRGLGHGAFGEVYEGQVSGMPNDPSPLQVAVKTLPEVCSEQDELDFLMEALIISKFNHQNIVRCIGVSLQSLPRFILLELMAGGDLKSFLRETRPRPSQPSSLAMLDLLHVARDIACGCQYLEENHFIHRDIAARNCLLTCPGPGRVAKIGDFGMARDIYRASYYRKGGCAMLPVKWMPPEAFMEGIFTSKTDTWSFGVLLWEIFSLGYMPYPSKSNQEVLEFVTSGGRMDPPKNCPGPVYRIMTQCWQHQPEDRPNFAIILERIEYCTQDPDVINTALPIEYGPLVEEEEKVPVRPKDPEGVPPLLVSQQAKREEERSPAAPPPLPTTSSGKAAKKPTAAEISVRVPRGPAVEGGHVNMAFSQSNPPSELHKVHGSRNKPTSLWNPTYGSWFTEKPTKKNNPIAKKEPHDRGNLGLEGSCTVPPNVATGRLPGASLLLEPSSLTANMKEVPLFRLRHFPCGNVNYGYQQQGLPLEAATAPGAGHYEDTILKSKNSMNQPGP

SEQ ID NO: 18408 - protein, 363 aa, Homo sapiens
MAQTPAFDKPKVELHVHLDGSIKPETILYYGRRRGIALPANTAEGLLNVIGMDKPLTLPDFLAKFDYYMPAIAGCREAIKRIAYEFVEMKAKEGVVYVEVRYSPHLLANSKVEPIPWNQAEGDLTPDEVVALVGQGLQEGERDFGVKARSILCCMRHQPNWSPKVVELCKKYQQQTVVAIDLAGDETIPGSSLLPGHVQAYQEAVKSGIHRTVHAGEVGSAEVVKEAVDILKTERLGHGYHTLEDQALYNRLRQENMHFEICPWSSYLTGAWKPDTEHAVIRLKNDQANYSLNTDDPLIFKSTLDTDYQMTKRDMGFTEEEFKRLNINAAKSSFLPEDEKRELLDLLYKAYGMPPSASAGQNL

SEQ ID NO: 18409 - protein, 366 aa, Homo sapiens
MAARTVIIDHGSGFLKAGTAGWNEPQMVFPNIVNYLPCKENPGPSYARRRVSLGIDICHPDTFSYPIERGRILNWEGVQYLWSFVLENHRREQEVPPVIITETPLREPADRKKMLEILFELLHVPSVLLADQLQMSLYASGLLTGVVVDSGYGLTRVQPFHQGRPLPASGKTLEFAGQDLSAYLLKSLFKEDCDRRCLFQLETVAVTQMNKCYVPQNLGEALDFRERQQSALDESNTYQLPDGSRVELTPMQRVAPEMFFSPQVFEQPGPSIPRAIVESVESCEISLRPLLVSHVMACGGNTLYPGFTKRLFRELMGDHVSSTKATVWEGSNRNFSVWLGASVVAHLSTYQSEWMSREEYGEHMRM

SEQ ID NO: 18410 - protein, 615 aa, Homo sapiens
MAVYVGMLRLGRLCAGSSGVLGARAALSRSWQEARLQGVRFLSSREVDRMVSTPIGGLSYVQGCTKKHLNSKTVGQCLETTAQRVPEREALVVLHEDVRLTFAQLKEEVDKAASGLLSIGLCKGDRLGMWGPNSYAWVLMQLATAQAGIILVSVNPAYQAMELEYVLKKVGCKALVFPKQFKTQQYYNVLKQICPEVENAQPGALKSQRLPDLTTVISVDAPLPGTLLLDEVVAAGSTRQHLDQLQYNQQFLSCHDPINIQFTSGTTGSPKGATLSHYNIVNNSNILGERLKLHEKTPEQLRMILPNPLYHCLGSVAGTMMCLMYGATLILASPIFNGKKALEAISRERGTFLYGTPTMFVDILNQPDFSSYDISTMCGGVIAGSPAPPELIRAIINKINMKDLVVAYGTTENSPVTFAHFPEDTVEQKAESVGRIMPHTEARIMNMEAGTLAKLNTPGELCIRGYCVMLGYWGEPQKTEEAVDQDKWYWTGDVATMNEQGFCKIVGRSKDMIIRGGENIYPAELEDFFHTHPKVQEVQVVGVKDDRMGEEICACIRLKDGEETTVEEIKAFCKGKISHFKIPKYIVFVTNYPLTISGKIQKFKLREQMERHLNL

SEQ ID NO: 18411 - protein, 640 aa, Homo sapiens
MAVYVGMLRLGRLCAGSSGVLGARAALSRSWQEARLQGVRFLSARGGMEAGRQRISVPSSFTASAAAHSREVDRMVSTPIGGLSYVQGCTKKHLNSKTVGQCLETTAQRVPEREALVVLHEDVRLTFAQLKEEVDKAASGLLSIGLCKGDRLGMWGPNSYAWVLMQLATAQAGIILVSVNPAYQAMELEYVLKKVGCKALVFPKQFKTQQYYNVLKQICPEVENAQPGALKSQRLPDLTTVISVDAPLPGTLLLDEVVAAGSTRQHLDQLQYNQQFLSCHDPINIQFTSGTTGSPKGATLSHYNIVNNSNILGERLKLHEKTPEQLRMILPNPLYHCLGSVAGTMMCLMYGATLILASPIFNGKKALEAISRERGTFLYGTPTMFVDILNQPDFSSYDISTMCGGVIAGSPAPPELIRAIINKINMKDLVVAYGTTENSPVTFAHFPEDTVEQKAESVGRIMPHTEARIMNMEAGTLAKLNTPGELCIRGYCVMLGYWGEPQKTEEAVDQDKWYWTGDVATMNEQGFCKIVGRSKDMIIRGGENIYPAELEDFFHTHPKVQEVQVVGVKDDRMGEEICACIRLKDGEETTVEEIKAFCKGKISHFKIPKYIVFVTNYPLTISGKIQKFKLREQMERHLNL

SEQ ID NO: 18412 - protein, 602 aa, Homo sapiens
MAVYVGMLRLGRLCAGSSGVLGARAALSRSWQEARLQGVRFLSSREVDRMVSTPIGGLSYVQGCTKKHLNSKTVGQCLETTAQRVPEREALVVLHEDVRLTFAQLKEEVDKAASGLLSIGLCKGDRLGMWGPNSYAWVLMQLATAQAMELEYVLKKVGCKALVFPKQFKTQQYYNVLKQICPEVENAQPGALKSQRLPDLTTVISVDAPLPGTLLLDEVVAAGSTRQHLDQLQYNQQFLSCHDPINIQFTSGTTGSPKGATLSHYNIVNNSNILGERLKLHEKTPEQLRMILPNPLYHCLGSVAGTMMCLMYGATLILASPIFNGKKALEAISRERGTFLYGTPTMFVDILNQPDFSSYDISTMCGGVIAGSPAPPELIRAIINKINMKDLVVAYGTTENSPVTFAHFPEDTVEQKAESVGRIMPHTEARIMNMEAGTLAKLNTPGELCIRGYCVMLGYWGEPQKTEEAVDQDKWYWTGDVATMNEQGFCKIVGRSKDMIIRGGENIYPAELEDFFHTHPKVQEVQVVGVKDDRMGEEICACIRLKDGEETTVEEIKAFCKGKISHFKIPKYIVFVTNYPLTISGKIQKFKLREQMERHLNL

SEQ ID NO: 18413 - protein, 455 aa, Homo sapiens
MELEYVLKKVGCKALVFPKQFKTQQYYNVLKQICPEVENAQPGALKSQRLPDLTTVISVDAPLPGTLLLDEVVAAGSTRQHLDQLQYNQQFLSCHDPINIQFTSGTTGSPKGATLSHYNIVNNSNILGERLKLHEKTPEQLRMILPNPLYHCLGSVAGTMMCLMYGATLILASPIFNGKKALEAISRERGTFLYGTPTMFVDILNQPDFSSYDISTMCGGVIAGSPAPPELIRAIINKINMKDLVVAYGTTENSPVTFAHFPEDTVEQKAESVGRIMPHTEARIMNMEAGTLAKLNTPGELCIRGYCVMLGYWGEPQKTEEAVDQDKWYWTGDVATMNEQGFCKIVGRSKDMIIRGGENIYPAELEDFFHTHPKVQEVQVVGVKDDRMGEEICACIRLKDGEETTVEEIKAFCKGKISHFKIPKYIVFVTNYPLTISGKIQKFKLREQMERHLNL

SEQ ID NO: 18414 - protein, 517 aa, Homo sapiens
MAAAITDMADLEELSRLSPLPPGSPGSAARGRAEPPEEEEEEEEEEEEAEAEAVAALLLNGGSGGGGGGGGGGVGGGEAETMSEPSPESASQAGEDEDEEEDDEEEEDESSSSGGGEEESSAESLVGSSGGSSSDETRSLSPGAASSSSGDGDGKEGLEEPKGPRGSQGGGGGGSSSSSVVSSGGDEGYGTGGGGSSATSGGRRGSLEMSSDGEPLSRMDSEDSISSTIMDVDSTISSGRSTPAMMNGQGSTTSSSKNIAYNCCWDQCQACFNSSPDLADHIRSIHVDGQRGGVFVCLWKGCKVYNTPSTSQSWLQRHMLTHSGDKPFKCVVGGCNASFASQGGLARHVPTHFSQQNSSKVSSQPKAKEESPSKAGMNKRRKLKNKRRRSLPRPHDFFDAQTLDAIRHRAICFNLSAHIESLGKGHSVVFHSTVIAKRKEDSGKIKLLLHWMPEDILPDVWVNESERHQLKTKVVHLSKLPKDTALLLDPNIYRTMPQKRLKRTLIRKVFNLYLSKQ

SEQ ID NO: 18415 - protein, 503 aa, Homo sapiens
MAAAITDMADLEELSRLSPLPPGSPGSAARGRAEPPEEEEEEEEEEEEAEAEAVAALLLNGGSGGGGGGGGGGVGGGEAETMSEPSPESASQAGEDEDEEEDDEEEEDESSSSGGGEEESSAESLVGSSGGSSSDETRSLSPGAASSSSGDGDGKEGLEEPKGPRGSQGGGGGGSSSSSVVSSGGDEGYGTGGGGSSATSGGRRGSLEMSSDGEPLSRMDSEDSISSTIMDVDSTISSGRSTPAMMNGQGSTTSSSKNIAYNCCWDQCQACFNSSPDLADHIRSIHVDGQRGGVFVCLWKGCKVYNTPSTSQSWLQRHMLTHSGDKPFKCVVGGCNASFASQGGLARHVPTHFSQQNSSKVSSQPKAKEESPSKAGMNKRRKLKNKRRRSLPRPHDFFDAQTLDAIRHRAICFNLSAHIESLGKGHSVVFHSTVIAKRKEDSGKIKLLLHWMPEDILPDVWVNESERHQLKTKVVHLSKLPKDTALLLDPNIYRTMPQKRLKR

SEQ ID NO: 18416 - protein, 301 aa, Homo sapiens
MYTRRYSSISSTIMDVDSTISSGRSTPAMMNGQGSTTSSSKNIAYNCCWDQCQACFNSSPDLADHIRSIHVDGQRGGVFVCLWKGCKVYNTPSTSQSWLQRHMLTHSGDKPFKCVVGGCNASFASQGGLARHVPTHFSQQNSSKVSSQPKAKEESPSKAGMNKRRKLKNKRRRSLPRPHDFFDAQTLDAIRHRAICFNLSAHIESLGKGHSVVFHSTVIAKRKEDSGKIKLLLHWMPEDILPDVWVNESERHQLKTKVVHLSKLPKDTALLLDPNIYRTMPQKRLKRTLIRKVFNLYLSKQ

SEQ ID NO: 18417 - protein, 560 aa, Homo sapiens
MDLKTVLSLPRYPGEFLHPVVYACTAVMLLCLLASFVTYIVHQSAIRISRKGRHTLLNFCFHAALTFTVFAGGINRTKYPILCQAVGIVLHYSTLSTMLWIGVTARNIYKQVTKKAPLCLDTDQPPYPRQPLLRFYLVSGGVPFIICGVTAATNIRNYGTEDEDTAYCWMAWEPSLGAFYGPAAIITLVTCVYFLGTYVQLRRHPGRRYELRTQPEEQRRLATPEGGRGIRPGTPPAHDAPGASVLQNEHSFQAQLRAAAFTLFLFTATWAFGALAVSQGHFLDMVFSCLYGAFCVTLGLFVLIHHCAKREDVWQCWWACCPPRKDAHPALDANGAALGRAACLHSPGLGQPRGFAHPPGPCKMTNLQAAQGHASCLSPATPCCAKMHCEPLTADEAHVHLQEEGAFGHDPHLHGCLQGRTKPPYFSRHPAEEPEYAYHIPSSLDGSPRSSRTDSPPSSLDGPAGTHTLACCTQGDPFPMVTQPEGSDGSPALYSCPTQPGREAALGPGHLEMLRRTQSLPFGGPSQNGLPKGKLLEGLPFGTDGTGNIRTGPWKNETTV

SEQ ID NO: 18418 - protein, 1279 aa, Homo sapiens
MRGHGNHSRLKSRCASLGNVHHHQAQMAHGAHCRGGRTPQSPDSRGPTAGGHTRGRWTYRPIEALINVSFPGAKGGRTAEGEPSWAWVFRSGYLQRQALPGLPVSTRVAACWWQHHPGRDSGFLGPGFIDLLREEPSGRADGKAAAQKTGRLYLFPTFLGNKLPEAADSFGEIASGNSVIFTSVLQSSHPPGTPPPSARKPSPGAAMLVCEETLELGAQGCWGSTSPRGQAVSLVGGPTAGGSRLGGAGCTMGLLMALQARRPRDGTWADPRRCSRAVEGSGLTRAALVSPGPSGVEEDTRREGCVLVGSWRSSTHRSRVLIINTPSGRTPWSQGSLGSTGRYNQTRAPGSQQQGLCSDAALHEDFVPEPTPAFFQYPPQAFSKTKVRDLGRGGLYAFSKEEKVSEAQRVEAYETHGLGLSTGRQNPVPSPCKPGCVCQGLALDAEAWPRHPGRRPCAAKEACLGPPGCSGELSLPEEEGIAPGAATAAPAWVPHGRVSRFLTVKLFTYVTMYQCKQERILRLCISGESGRYVRRSRFRNFAALMVSTGVPGVLQLGARPLRGGGHPYGDSQAGKVVEWRAGDRASGLSAGERRFLSQSELQTWPRTPHCVGKKVPQPVGAADLAPDTSLCRKEGSSASRSCRPGPGHLTRREEDSFRQLAFPRFEEVTFPPLTAAERAPSVHGGHSLASQGLVLAGRTRSVASGGKQELSGPLAACIPTQDLKTVLSLPRYPGEFLHPVVYACTAVMLLCLLASFVTYIVHQSAIRISRKGRHTLLNFCFHAALTFTVFAGGINRTKYPILCQAVGIVLHYSTLSTMLWIGVTARNIYKQVTKKAPLCLDTDQPPYPRQPLLRFYLVSGGVPFIICGVTAATNIRNYGTEDEDTACWMAWEPSLGAFYGPAAIITLVTCVYFLGTYVQLRRHPGRRYELRTQPEEQRRLATPEGGRGIRPGTPPAHDAPGASVLQNEHSFQAQLRAAAFTLFLFTATWAFGALAVSQGHFLDMVFSCLYGAFCVTLGLFVLIHHCAKREDVWQCWWACCPPRKDAHPALDANGAALGRAACLHSPGLGQPRGFAHPPGPCKMTNLQAAQGHASCLSPATPCCAKMHCEPLTADEAHVHLQEEGAFGHDPHLHGCLQGRTKPPYFSRHPAEEPEYAYHIPSSLDGSPRSSRTDSPPSSLDGPAGTHTLACCTQGDPFPMVTQPEGSDGSPALYSCPTQPGREAALGPGHLEMLRRTQSLPFGGPSQNGLPKGKLLEGLPFGTDGTGNIRTGPWKNETTV

SEQ ID NO: 18419 - protein, 463 aa, Homo sapiens
MLWIGVTARNIYKQVTKKAPLCLDTDQPPYPRQPLLRFYLVSGGVPFIICGVTAATNIRNYGTEDEDTAYCWMAWEPSLGAFYGPAAIITLVTCVYFLGTYVQLRRHPGRRYELRTQPEEQRRLATPEGGRGIRPGTPPAHDAPGASVLQNEHSFQAQLRAAAFTLFLFTATWAFGALAVSQGHFLDMVFSCLYGAFCVTLGLFVLIHHCAKREDVWQCWWACCPPRKDAHPALDANGAALGRAACLHSPGLGQPRGFAHPPGPCKMTNLQAAQGHASCLSPATPCCAKMHCEPLTADEAHVHLQEEGAFGHDPHLHGCLQGRTKPPYFSRHPAEEPEYAYHIPSSLDGSPRSSRTDSPPSSLDGPAGTHTLACCTQGDPFPMVTQPEGSDGSPALYSCPTQPGREAALGPGHLEMLRRTQSLPFGGPSQNGLPKGKLLEGLPFGTDGTGNIRTGPWKNETTV

SEQ ID NO: 18420 - protein, 270 aa, Homo sapiens
MPRDNMASLIQRIARQACLTFRGSGGGRGASDRDAASGPEAPMQPGFPENLSKLKSLLTQLRAEDLNIAPRKATLQPLPPNLPPVTYMHIYETDGFSLGVFLLKSGTSIPLHDHPGMHGMLKVLYGTVRISCMDKLDAGGGQRPRALPPEQQFEPPLQPREREAVRPGVLRSRAEYTEASGPCILTPHRDNLHQIDAVEGPAAFLDILAPPYDPDDGRDCHYYRVLEPVRPKEASSSACDLPREVWLLETPQADDFWCEGEPYPGPKVFP

SEQ ID NO: 18421 - protein, 457 aa, Homo sapiens
MGSRFLLVLLSGASCPPCPKYASCHNSTHCTCEDGFRARSGRTYFHDSSEKCEDINECETGLAKCKYKAYCRNKVGGYICSCLVKYTLFNFLAGIIDYDHPDCYENNSQGTTQSNVDIWVSGVKPGFGKQLPGDKRTKHICVYWEGSEGGWSTEGCSHVHSNGSYTKCKCFHLSSFAVLVALAPKEDPVLTVITQVGLTISLLCLFLAILTFLLCRPIQNTSTSLHLELSLCLFLAHLLFLTGINRTEPEVLCSIIAGLLHFLYLACFTWMLLEGLHLFLTVRNLKVANYTSTGRFKKRFMYPVGYGIPAVIIAVSAIVGPQNYGTFTCWLKLDKGFIWSFMGPVAVIILINLVFYFQVLWILRSKLSSLNKEVSTIQDTRVMTFKAISQLFILGCSWGLGFFMVEEVGKTIGSIIAYSFTIINTLQGVLLFVVHCLLNRQVRLIILSVISLVPKSN

SEQ ID NO: 18422 - protein, 232 aa, Homo sapiens
MGSRFLLVLLSGLTVLLALPGSEAKNSGASCPPCPKYASCHNSTHCTCEDGFRARSGRTYFHDSSEKCEDINECETGLAKCKYKAYCRNKVGGYICSCLVKYTLFNFLAGIIDYDHPDCYENNSQGTTQSNVDIWENLRRNGSREDFARRATQLIQSVELSIWNASFASPGKGQISEFDIVYETKRCNETRENAFLEAGNNTMDINCADALKGNLRESTAVALSLINLLGIF

SEQ ID NO: 18423 - protein, 652 aa, Homo sapiens
MQGPLLLPGLCFLLSLFGAVTQKTKTSCAKCPPNASCVNNTHCTCNHGYTSGSGQKLFTFPLETCNDINECTPPYSVYCGFNAVCYNVEGSFYCQCVPGYRLHSGNEQFSNSNENTCQDTTSSKTTEGRKELQKIVDKFESLLTNQTLWRTEGRQEISSTATTILRDVESKVLETALKDPEQKVLKIQNDSVAIETQAITDNCSEERKTFNLNVQMNSMDIRCSDIIQGDTQGPSAIAFISYSSLGNIINATFFEEMDKKDQVYLNSQVVSAAIGPKRNVSLSKSVTLTFQHVKMTPSTKKVFCVYWKSTGQGSQWSRDGCFLIHVNKSHTMCNCSHLSSFAVLMALTSQEEDPVLTVITYVGLSVSLLCLLLAALTFLLCKAIRNTSTSLHLQLSLCLFLAHLLFLVGIDRTEPKVLCSIIAGALHYLYLAAFTWMLLEGVHLFLTARNLTVVNYSSINRLMKWIMFPVGYGVPAVTVAISAASWPHLYGTADRCWLHLDQGFMWSFLGPVCAIFSANLVLFILVFWILKRKLSSLNSEVSTIQNTRMLAFKATAQLFILGCTWCLGLLQVGPAAQVMAYLFTIINSLQGFFIFLVYCLLSQQVQKQYQKWFREIVKSKSESETYTLSSKMGPDSKPSEGDVFPGQVKRKY

SEQ ID NO: 18424 - protein, 600 aa, Homo sapiens
MQGPLLLPGLCFLLSLFGAVTQKTKTSCAKCPPNASCVNNTHCTCNHGYTSGSGQKLFTFPLETCNDTTSSKTTEGRKELQKIVDKFESLLTNQTLWRTEGRQEISSTATTILRDVESKVLETALKDPEQKVLKIQNDSVAIETQAITDNCSEERKTFNLNVQMNSMDIRCSDIIQGDTQGPSAIAFISYSSLGNIINATFFEEMDKKDQVYLNSQVVSAAIGPKRNVSLSKSVTLTFQHVKMTPSTKKVFCVYWKSTGQGSQWSRDGCFLIHVNKSHTMCNCSHLSSFAVLMALTSQEEDPVLTVITYVGLSVSLLCLLLAALTFLLCKAIRNTSTSLHLQLSLCLFLAHLLFLVGIDRTEPKVLCSIIAGALHYLYLAAFTWMLLEGVHLFLTARNLTVVNYSSINRLMKWIMFPVGYGVPAVTVAISAASWPHLYGTADRCWLHLDQGFMWSFLGPVCAIFSANLVLFILVFWILKRKLSSLNSEVSTIQNTRMLAFKATAQLFILGCTWCLGLLQVGPAAQVMAYLFTIINSLQGFFIFLVYCLLSQQVQKQYQKWFREIVKSKSESETYTLSSKMGPDSKPSEGDVFPGQVKRKY

SEQ ID NO: 18425 - protein, 117 aa, Homo sapiens
MQGPLLLPGLCFLLSLFGAVTQKTKTSCAKCPPNASCVNNTHCTCNHGYTSGSGQKLFTFPLETCNDINECTPPYSVYCGFNAVCYNVEGSFYCQCVPGYRLHSGNEQFSNSNENTC

SEQ ID NO: 18426 - protein, 408 aa, Homo sapiens
MAPWPHENSSLAPWPDLPTLAPNTANTSGLPGVPWEAALAGALLALAVLATVGGNLLVIVAIAWTPRLQTMTNVFVTSLAAADLVMGLLVVPPAATLALTGHWPLGATGCELWTSVDVLCVTASIETLCALAVDRYLAVTNPLRYGALVTKRCARTAVVLVWVVSAAVSFAPIMSQWWRVGADAEAQRCHSNPRCCAFASNMPYVLLSSSVSFYLPLLVMLFVYARVFVVATRQLRLLRGELGRFPPEESPPAPSRSLAPAPVGTCAPPEGVPACGRRPARLLPLREHRALCTLGLIMGTFTLCWLPFFLANVLRALGGPSLVPGPAFLALNWLGYANSAFNPLIYCRSPDFRSAFRRLLCRCGRRLPPEPCAAARPALFPSGVPAARSSPAQPRLCQRLDGASWGVS

SEQ ID NO: 18427 - protein, 623 aa, Homo sapiens
MAGFSHFSQPPYRDLWEPPRPGGERESTQRLGGQRSGADSTACSRAGTPGAESEAGACWLHPHCSFTPRPRRRGCSDSLRGSRSLSDVARRPLERSRKHRPRSRRLEDAWGETGTKPRPAWQPQTQLPPQRPQPCPHYPLAQGDSPPPCPGGAGTPLSGTFRVEKAQGGDQWAVPLGRHLGRWSPSSVPSERSSVPSQKFKRHSACVCAQKRDSSDQVESLASRDSQPLASSKEMRSPHTQVLKSKLEEVVVSSQDQQIVALVLTRLKKAQRIRELQQQAAKAWEELKRSDQKVQMTLERERRLLLRQSQEQWQEKEQRKTLQSPEQRGLRRDSQRKNVPPGESRWKEQPEDQESPRQEKLEKARAQAEHRKQCQVRRLREQEKMLRNLREQHSLQLQRRLVEACRKRHLHAVEGQKKVQDTNLSSLINYQARKVLMDCQAKAEELLRQLSLEQSFQRSQEIHQGLRKERQRELREKAQKEEEQLQQARWRAGESEEQRKMRKRILVELADEKIRQARSHVHKTTRDKVQHLRELNHLREKNHHILKLKAEKEEKCHIEGIKEAIKKKEQRVQHISQGKDPNFQEFQKLPQASRREERAPPNSSLDQMVLEAQLRACQQNRGY

SEQ ID NO: 18428 - protein, 898 aa, Homo sapiens
MSETDHIASTSSDKNVGKTPELKEDSCNLFSGNESSKLENESKLLSLNTDKTLCQPNEHNNRIEAQENYIPDHGGGEDSCAKTDTGSENSEQIANFPSGNFAKHISKTNETEQKVTQILVELRSSTFPESANEKTYSESPYDTDCTKKFISKIKSVSASEDLLEEIESELLSTEFAEHRVPNGMNKGEHALVLFEKCVQDKYLQQEHIIKKLIKENKKHQELFVDICSEKDNLREELKKRTETEKQHMNTIKQLESRIEELNKEVKASRDQLIAQDVTAKNAVQQLHKEMAQRMEQANKKCEEARQEKEAMVMKYVRGEKESLDLRKEKETLEKKLRDANKELEKNTNKIKQLSQEKGRLHQLYETKEGETTRLIREIDKLKEDINSHVIKVKWAQNKLKAEMDSHKETKDKLKETTTKLTQAKEEADQIRKNCQDMIKTYQESEEIKSNELDAKLRVTKGELEKQMQEKSDQLEMHHAKIKELEDLKRTFKEGMDELRTLRTKVKCLEDERLRTEDELSKYKEIINRQKAEIQNLLDKVKTADQLQEQLQRGKQEIENLKEEVESLNSLINDLQKDIEGSRKRESELLLFTERLTSKNAQLQSESNSLQSQFDKVSCSESQLQSQCEQMKQTNINLESRLLKEEELRKEEVQTLQAELACRQTEVKALSTQVEELKDELVTQRRKHASSIKDLTKQLQQARRKLDQVESGSYDKEVSSMGSRSSSSGSLNARSSAEDRSPENTGSSVAVDNFPQVDKAMLIERIVRLQKAHARKNEKIEFMEDHIKQLVEEIRKKTKIIQSYILREESGTLSSEASDFNKVHLSRRGGIMASLYTSHPADNGLTLELSLEINRKLQAVLEDTLLKNITLKENLQTLGTEIERLIKHQHELEQRTKKT

SEQ ID NO: 18429 - protein, 362 aa, Homo sapiens
MAAAEEEPKPKKLKVEAPQALRENILFGMGNPLLDISAVVDKDFLDKYSLKPNDQILAEDKHKELFDELVKKFKVEYHAGGSTQNSIKVAQWMIQQPHKAATFFGCIGIDKFGEILKRKAAEAHVDAHYYEQNEQPTGTCAACITGDNRSLIANLAAANCYKKEKHLDLEKNWMLVEKARVCYIAGFFLTVSPESVLKVAHHASENNRIFTLNLSAPFISQFYKESLMKVMPYVDILFGNETEAATFAREQGFETKDIKEIAKKTQALPKMNSKRQRIVIFTQGRDDTIMATESEVTAFAVLDQDQKEIIDTNGAGDAFVGGFLSQLVSDKPLTECIRAGHYAASIIIRRTGCTFPEKPDFH

SEQ ID NO: 18430 - protein, 345 aa, Homo sapiens
MTSVRENILFGMGNPLLDISAVVDKDFLDKYSLKPNDQILAEDKHKELFDELVKKFKVEYHAGGSTQNSIKVAQWMIQQPHKAATFFGCIGIDKFGEILKRKAAEAHVDAHYYEQNEQPTGTCAACITGDNRSLIANLAAANCYKKEKHLDLEKNWMLVEKARVCYIAGFFLTVSPESVLKVAHHASENNRIFTLNLSAPFISQFYKESLMKVMPYVDILFGNETEAATFAREQGFETKDIKEIAKKTQALPKMNSKRQRIVIFTQGRDDTIMATESEVTAFAVLDQDQKEIIDTNGAGDAFVGGFLSQLVSDKPLTECIRAGHYAASIIIRRTGCTFPEKPDFH

SEQ ID NO: 18431 - protein, 305 aa, Homo sapiens
MAAAEEEPKPKKLKVEAPQALRENILFGMGNPLLDISAVVDKDFLDKYSLKPNDQILAEDKHKELFDELVKKFKVEYHAGGSTQNSIKVAQWMIQQPHKAATFFGCIGIDKFGEILKRKAAEAHVDAHYYEQNEQPTGTCAACITGDNRSLIANLAAANCYKKEKHLDLEKNWMLVEKARVCYIAEAATFAREQGFETKDIKEIAKKTQALPKMNSKRQRIVIFTQGRDDTIMATESEVTAFAVLDQDQKEIIDTNGAGDAFVGGFLSQLVSDKPLTECIRAGHYAASIIIRRTGCTFPEKPDFH

SEQ ID NO: 18432 - protein, 327 aa, Homo sapiens
MTSVRENILFGMGNPLLDISAVVDKDFLDKFDELVKKFKVEYHAGGSTQNSIKVAQWMIQQPHKAATFFGCIGIDKFGEILKRKAAEAHVDAHYYEQNEQPTGTCAACITGDNRSLIANLAAANCYKKEKHLDLEKNWMLVEKARVCYIAGFFLTVSPESVLKVAHHASENNRIFTLNLSAPFISQFYKESLMKVMPYVDILFGNETEAATFAREQGFETKDIKEIAKKTQALPKMNSKRQRIVIFTQGRDDTIMATESEVTAFAVLDQDQKEIIDTNGAGDAFVGGFLSQLVSDKPLTECIRAGHYAASIIIRRTGCTFPEKPDFH

SEQ ID NO: 18433 - protein, 324 aa, Homo sapiens
MAPLLLQLAVLGAALAAAALVLISIVAFTTATKMPALHRHEEEKFFLNAKGQKETLPSIWDSPTKQLSVVVPSYNEEKRLPVMMDEALSYLEKRQKRDPAFTYEVIVVDDGSKDQTSKVAFKYCQKYGSDKVRVITLVKNRGKGGAIRMGIFSSRGEKILMADADGATKFPDVEKLEKGLNDLQPWPNQMAIACGSRAHLEKESIAQRSYFRTLLMYGFHFLVWFLCVKGIRDTQCGFKLFTREAASRTFSSLHVERWAFDVELLYIAQFFKIPIAEIAVNWTEIEGSKLVPFWSWLQMGKDLLFIRLRYLTGAWRLEQTRKMN

SEQ ID NO: 18434 - protein, 294 aa, Homo sapiens
MAPLLLQLAVLGAALAAAALVLISIVAFTTATKMPALHRHEEEKFFLNAKGQKETLPSIWDSPTKQLSVVVPSYNEEKRLPVMMDEALSYLEKRQKYGSDKVRVITLVKNRGKGGAIRMGIFSSRGEKILMADADGATKFPDVEKLEKGLNDLQPWPNQMAIACGSRAHLEKESIAQRSYFRTLLMYGFHFLVWFLCVKGIRDTQCGFKLFTREAASRTFSSLHVERWAFDVELLYIAQFFKIPIAEIAVNWTEIEGSKLVPFWSWLQMGKDLLFIRLRYLTGAWRLEQTRKMN

SEQ ID NO: 18435 - protein, 663 aa, Homo sapiens
MGNILTCRVHPSVSLEFDQQQGSVCPSESEIYEAGAGDRMAGAPMAAAVQPAEVTVEVGEDLHMHHVRDREMPEALEFNPSANPEASTIFQRNSQTDVVEIRRSNCTNHVSTVRFSQQYSLCSTIFLDDSTAIQHYLTMTIISVTLEIPHHITQRDADRSLSIPDEQLHSFAVSTVHIMKKRNGGGSLNNYSSSIPSTPSTSQEDPQFSVPPTANTPTPVCKRSMRWSNLFTSEKGSDPDKERKAPENHADTIGSGRAIPIKQGMLLKRSGKWLKTWKKKYVTLCSNGVLTYYSSLGDYMKNIHKKEIDLQTSTIKVPGKWPSLATSACTPISTSKSNGLSKDMDTGLGDSICFSPSISSTTSPKLNPPPSPHANKKKHLKKKSTNNFMIVSATGQTWHFEATTYEERDAWVQAIQSQILASLQSCESSKSKSQLTSQSKAMALQSIQNMRGNAHCVDCETQNPKWASLNLGVLMCIECSGIHRSLGTRLSRVRSLELDDWPVELRKVMSSIGNDLANSIWEGSSQGQTKPSEKSTREEKERWIRSKYEEKLFLAPLPCTELSLGQQLLRATADEDLQTAILLLAHGSREEVNETCGEGDGCTALHLACRKGNVVLAQLLIWYGVDVMARDAHGNTALTYARQASSQECINVLLQYGCPDKCV

SEQ ID NO: 18436 - protein, 361 aa, Homo sapiens
MAMNYNAKDEVDGGPPCAPGGTAKTRRPDNTAFKQQRLPAWQPILTAGTVLPIFFIIGLIFIPIGIGIFVTSNNIREIEIDYTGTEPSSPCNKCLSPDVTPCFCTINFTLEKSFEGNVFMYYGLSNFYQNHRRYVKSRDDSQLNGDSSALLNPSKECEPYRRNEDKPIAPCGAIANSMFNDTLELFLIGNDSYPIPIALKKKGIAWWTDKNVKFRNPPGGDNLEERFKGTTKPVNWLKPVYMLDSDPDNNGFINEDFIVWMRTAALPTFRKLYRLIERKSDLHPTLPAGRYSLNVTYNYPVHYFDGRKRMILSTISWMGGKNPFLGIAYIAVGSISFLLGVVLLVINHKYRNSSNTADITI

SEQ ID NO: 18437 - protein, 325 aa, Homo sapiens
MAMNYNAKDEVDGGPPCAPGGTAKTRRPDNTAFKQQRLPAWQPILTAGTVLPIFFIIGLIFIPIGIGIFVTSNNIREIEGNVFMYYGLSNFYQNHRRYVKSRDDSQLNGDSSALLNPSKECEPYRRNEDKPIAPCGAIANSMFNDTLELFLIGNDSYPIPIALKKKGIAWWTDKNVKFRNPPGGDNLEERFKGTTKPVNWLKPVYMLDSDPDNNGFINEDFIVWMRTAALPTFRKLYRLIERKSDLHPTLPAGRYSLNVTYNYPVHYFDGRKRMILSTISWMGGKNPFLGIAYIAVGSISFLLGVVLLVINHKYRNSSNTADITI

SEQ ID NO: 18438 - protein, 242 aa, Homo sapiens
MYYGLSNFYQNHRRYVKSRDDSQLNGDSSALLNPSKECEPYRRNEDKPIAPCGAIANSMFNDTLELFLIGNDSYPIPIALKKKGIAWWTDKNVKFRNPPGGDNLEERFKGTTKPVNWLKPVYMLDSDPDNNGFINEDFIVWMRTAALPTFRKLYRLIERKSDLHPTLPAGRYSLNVTYNYPVHYFDGRKRMILSTISWMGGKNPFLGIAYIAVGSISFLLGVVLLVINHKYRNSSNTADITI

SEQ ID NO: 18439 - protein, 611 aa, Homo sapiens
MASRGARQRLKGSGASSGDTAPAADKLRELLGSREAGGAEHRTELSGNKAGQVWAPEGSTAFKCLLSARLCAALLSNISDCDETFNYWEPTHYLIYGEGFQTWEYSPAYAIRSYAYLLLHAWPAAFHARILQTNKILVFYFLRCLLAFVSCICELYFYKAVCKKFGLHVSRMMLAFLVLSTGMFCSSSAFLPSSFCMYTTLIAMTGWYMDKTSIAVLGVAAGAILGWPFSAALGLPIAFDLLVMKHRWKSFFHWSLMALILFLVPVVVIDSYYYGKLVIAPLNIVLYNVFTPHGPDLYGTEPWYFYLINGFLNFNVAFALALLVLPLTSLMEYLLQRFHVQNLGHPYWLTLAPMYIWFIIFFIQPHKEERFLFPVYPLICLCGAVALSALQKCYHFVFQRYRLEHYTVTSNWLALGTVFLFGLLSFSRSVALFRGYHGPLDLYPEFYRIATDPTIHTVPEGRPVNVCVGKEWYRFPSSFLLPDNWQLQFIPSEFRGQLPKPFAEGPLATRIVPTDMNDQNLEEPSRYIDISKCHYLVDLDTMRETPREPKYSSNKEEWISLAYRPFLDASRSSKLLRAFYVPFLSDQYTVYVNYTILKPRKAKQIRKKSGG

SEQ ID NO: 18440 - protein, 440 aa, Homo sapiens
MMLAFLVLSTGMFCSSSAFLPSSFCMYTTLIAMTGWYMDKTSIAVLGVAAGAILGWPFSAALGLPIAFDLLVMKHRWKSFFHWSLMALILFLVPVVVIDSYYYGKLVIAPLNIVLYNVFTPHGPDLYGTEPWYFYLINGFLNFNVAFALALLVLPLTSLMEYLLQRFHVQNLGHPYWLTLAPMYIWFIIFFIQPHKEERFLFPVYPLICLCGAVALSALQKCYHFVFQRYRLEHYTVTSNWLALGTVFLFGLLSFSRSVALFRGYHGPLDLYPEFYRIATDPTIHTVPEGRPVNVCVGKEWYRFPSSFLLPDNWQLQFIPSEFRGQLPKPFAEGPLATRIVPTDMNDQNLEEPSRYIDISKCHYLVDLDTMRETPREPKYSSNKEEWISLAYRPFLDASRSSKLLRAFYVPFLSDQYTVYVNYTILKPRKAKQIRKKSGG

SEQ ID NO: 18441 - protein, 618 aa, Homo sapiens
MASRGARQRLKGSGASSGDTAPAADKLRELLGSREAGGAEHRTELSGNKAGQVWAPEGSTAFKCLLSARLCAALLSNISDCDETFNYWEPTHYLIYGEGFQTWEYSPAYAIRSYAYLLLHAWPAAFHARILQTNKILVFYFLRCLLAFVSCICELYFYKAVCKKFGLHVSRMMLAFLVLSTGMFCSSSAFLPSSFCMYTTLIAMTGWYMDKTSIAVLGVAAGAILGWPFSAALGLPIAFDLLVMKHRWKSFFHWSLMALILFLVPVVVIDSYYYGKLVIAPLNIVLYNVFTPHGPDLYGTEPWYFYLINGFLNFNVAFALALLVLPLTSLMEYLLQRFHVQNLGHPYWLTLAPMYIWFIIFFIQPHKEERFLFPVYPLICLCGAVALSALQHSFLYFQKCYHFVFQRYRLEHYTVTSNWLALGTVFLFGLLSFSRSVALFRGYHGPLDLYPEFYRIATDPTIHTVPEGRPVNVCVGKEWYRFPSSFLLPDNWQLQFIPSEFRGQLPKPFAEGPLATRIVPTDMNDQNLEEPSRYIDISKCHYLVDLDTMRETPREPKYSSNKEEWISLAYRPFLDASRSSKLLRAFYVPFLSDQYTVYVNYTILKPRKAKQIRKKSGG

SEQ ID NO: 18442 - protein, 447 aa, Homo sapiens
MMLAFLVLSTGMFCSSSAFLPSSFCMYTTLIAMTGWYMDKTSIAVLGVAAGAILGWPFSAALGLPIAFDLLVMKHRWKSFFHWSLMALILFLVPVVVIDSYYYGKLVIAPLNIVLYNVFTPHGPDLYGTEPWYFYLINGFLNFNVAFALALLVLPLTSLMEYLLQRFHVQNLGHPYWLTLAPMYIWFIIFFIQPHKEERFLFPVYPLICLCGAVALSALQHSFLYFQKCYHFVFQRYRLEHYTVTSNWLALGTVFLFGLLSFSRSVALFRGYHGPLDLYPEFYRIATDPTIHTVPEGRPVNVCVGKEWYRFPSSFLLPDNWQLQFIPSEFRGQLPKPFAEGPLATRIVPTDMNDQNLEEPSRYIDISKCHYLVDLDTMRETPREPKYSSNKEEWISLAYRPFLDASRSSKLLRAFYVPFLSDQYTVYVNYTILKPRKAKQIRKKSGG

SEQ ID NO: 18443 - protein, 309 aa, Homo sapiens
MVFPAKRFCLVPSMEGVRWAFSCGTWLPSRAEWLLAVRSIQPEEKERIGQFVFARDAKAAMAGRLMIRKLVAEKLNIPWNHIRLQRTAKGKPVLAKDSSNPYPNFNFNISHQGDYAVLAAEPELQVGIDIMKTSFPGRGSIPEFFHIMKRKFTNKEWETIRSFKDEWTQLDMFYRNWALKESFIKAIGVGLGFELQRLEFDLSPLNLDIGQVYKETRLFLDGEEEKEWAFEESKIDEHHFVAVALRKPDGSRHQDVPSQDDSKPTQRQFTILNFNDLMSSAVPMTPEDPSFWDCFCFTEEIPIRNGTKS

SEQ ID NO: 18444 - protein, 138 aa, Homo sapiens
MVFPAKRFCLVPSMEGVRWAFSCGTWLPSRAEWLLAVRSIQPEEKERIGQFVFARDAKAAMAGRLMIRKLVAEKLNIPWNHIRLQRTAKGKPVLAKDSSNPYPNFNFNISHQGDYAVLAAEPELQVGIDIMKTSFPGT

SEQ ID NO: 18445 - protein, 497 aa, Homo sapiens
MALWRGSAYAGFLALAVGCVFLLEPELPGSALRSLWSSLCLGPAPAPPGPVSPEGRLAAAWDALIVRPVRRWRRVAVGVNACVDVVLSGVKLLQALGLSPGNGKDHSILHSRNDLEEAFIHFMGKGAAAERFFSDKETFHDIAQVASEFPGAQHYVGGNAALIGQKFAANSDLKVLLCGPVGPKLHELLDDNVFVPPESLQEVDEFHLILEYQAGEEWGQLKAPHANRFIFSHDLSNGAMNMLEVFVSSLEEFQPDLVVLSGLHMMEGQSKELQRKRLLEVVTSISDIPTGIPVHLELASMTNRELMSSIVHQQVFPAVTSLGLNEQELLFLTQSASGPHSSLSSWNGVPDVGMVSDILFWILKEHGRSKSRASDLTRIHFHTLVYHILATVDGHWANQLAAVAAGARVAGTQACATETIDTSRVSLRAPQEFMTSHSEAGSRIVLNPNKPVVEWHREGISFHFTPVLVCKDPIRTVGLGDAISAEGLFYSEVHPHY

SEQ ID NO: 18446 - protein, 496 aa, Homo sapiens
MALWRGSAYAGFLALAVGCVFLLEPELPGSALRSLWSSLCLGPAPAPPGPVSPEGRLAAAWDALIVRPVRRWRRVAVGVNACVDVVLSGVKLLQALGLSPGNGKDHSILHSRNDLEEAFIHFMGKGAAAERFFSDKETFHDIAQVASEFPGAQHYVGGNAALIGQKFAANSDLKVLLCGPVGPKLHELLDDNVFVPPESLQEVDEFHLILEYQAGEEWGQLKAPHANRFIFSHDLSNGAMNMLEVFVSSLEEFQPDLVVLSGLHMMEGQSKELQRKRLLEVVTSISDIPTGIPVHLELASMTNRELMSSIVHQVFPAVTSLGLNEQELLFLTQSASGPHSSLSSWNGVPDVGMVSDILFWILKEHGRSKSRASDLTRIHFHTLVYHILATVDGHWANQLAAVAAGARVAGTQACATETIDTSRVSLRAPQEFMTSHSEAGSRIVLNPNKPVVEWHREGISFHFTPVLVCKDPIRTVGLGDAISAEGLFYSEVHPHY

SEQ ID NO: 18447 - protein, 258 aa, Homo sapiens
MNMLEVFVSSLEEFQPDLVVLSGLHMMEGQSKELQRKRLLEVVTSISDIPTGIPVHLELASMTNRELMSSIVHQQVFPAVTSLGLNEQELLFLTQSASGPHSSLSSWNGVPDVGMVSDILFWILKEHGRSKSRASDLTRIHFHTLVYHILATVDGHWANQLAAVAAGARVAGTQACATETIDTSRVSLRAPQEFMTSHSEAGSRIVLNPNKPVVEWHREGISFHFTPVLVCKDPIRTVGLGDAISAEGLFYSEVHPHY

SEQ ID NO: 18448 - protein, 222 aa, Homo sapiens
MAASCRVVTSISDIPTGIPVHLELASMTNRELMSSIVHQVFPAVTSLGLNEQELLFLTQSASGPHSSLSSWNGVPDVGMVSDILFWILKEHGRSKSRASDLTRIHFHTLVYHILATVDGHWANQLAAVAAGARVAGTQACATETIDTSRVSLRAPQEFMTSHSEAGSRIVLNPNKPVVEWHREGISFHFTPVLVCKDPIRTVGLGDAISAEGLFYSEVHPHY

SEQ ID NO: 18449 - protein, 347 aa, Homo sapiens
MGKGAAAERFFSDKETFHDIAQVASEFPGAQHYVGGNAALIGQKFAANSDLKVLLCGPVGPKLHELLDDNVFVPPESLQEVDEFHLILEYQAGEEWGQLKAPHANRFIFSHDLSNGAMNMLEVFVSSLEEFQPDLVVLSGLHMMEGQSKELQRKRLLEVVTSISDIPTGIPVHLELASMTNRELMSSIVHQQVFPAVTSLGLNEQELLFLTQSASGPHSSLSSWNGVPDVGMVSDILFWILKEHGRSKSRASDLTRIHFHTLVYHILATVDGHWANQLAAVLGSSCGWDTGLRHRNHRHQPSVSEGTPRVHDFPFGGRLQDCIKPKQASSRMAQRGNILPLHTSIGV

SEQ ID NO: 18450 - protein, 78 aa, Homo sapiens
MALWRGSAYAGFLALAVGCVFLLEPELPGSALRSLWSSLCLGPAPAPPGPVSPEGRLAAAWDALIVRPVRRWRRVAVG

SEQ ID NO: 18451 - protein, 351 aa, Homo sapiens
MTWSATARGAHQPDNTAFTQQRLPAWQPLLSASIALPLFFCAGLAFIGLGLGLYYSSNGIKELEYDYTGDPGTGNCSVCAAAGQGRALPPPCSCAWYFSLPELFQGPVYLYYELTNFYQNNRRYGVSRDDAQLSGLPSALRHPVNECAPYQRSAAGLPIAPCGAIANSLFNDSFSLWHQRQPGGPYVEVPLDRSGIAWWTDYHVKFRNPPLVNGSLALAFQGTAPPPNWRRPVYELSPDPNNTGFINQDFVVWMRTAALPTFRKLYARIRQGNYSAGLPRGAYRVNITYNYPVRAFGGHKLLIFSSISWMGGKNPFLGIAYLVVGSLCILTGFVMLVVYIRYQDQDDDDEE

SEQ ID NO: 18452 - protein, 198 aa, Homo sapiens
MADTQCCPPPCEFISSAGTDLALGMGWDATLCLLPFTGFGKCAGIWNHMDEEPDNGDDRGSRRTTGQGRKWAAHGTMAAPRVHTDYHPGGGSACSSVKVRSHVGHTGVFFFVDQDPLAVSLTSQSLIPPLIKPGLLKAWGFLLLCAQPSANGHSLCCLLYTDLVSSHELSPFRALCLGPSDAPSACASCNCLASTYYL

SEQ ID NO: 18453 - protein, 543 aa, Homo sapiens
MRKPAAGFLPSLLKVLLLPLAPAAAQDSTQASTPGSPLSPTEYERFFALLTPTWKAETTCRLRATHGCRNPTLVQLDQYENHGLVPDGAVCSNLPYASWFESFCQFTHYRCSNHVYYAKRVLCSQPVSILSPNTLKEIEASAEVSPTTMTSPISPHFTVTERQTFQPWPERLSNNVEELLQSSLSLGGQEQAPEHKQEQGVEHRQEPTQEHKQEEGQKQEEQEEEQEEEGKQEEGQGTKEGREAVSQLQTDSEPKFHSESLSSNPSSFAPRVREVESTPMIMENIQELIRSAQEIDEMNEIYDENSYWRNQNPGSLLQLPHTEALLVLCYSIVENTCIITPTAKAWKYMEEEILGFGKSVCDSLGRRHMSTCALCDFCSLKLEQCHSEASLQRQQCDTSHKTPFVSPLLASQSLSIGNQVGSPESGRFYGLDLYGGLHMDFWCARLATKGCEDVRVSGWLQTEFLSFQDGDFPTKICDTDYIQYPNYCSFKSQQCLMRNRNRKVSRMRCLQNETYSALSPGKSEDVVLRWSQEFSTLTLGQFG

SEQ ID NO: 18454 - protein, 477 aa, Homo sapiens
MGAGVLVLGASEPGNLSSAAPLPDGAATAARLLVPASPPASLLPPASESPEPLSQQWTAGMGLLMALIVLLIVAGNVLVIVAIAKTPRLQTLTNLFIMSLASADLVMGLLVVPFGATIVVWGRWEYGSFFCELWTSVDVLCVTASIETLCVIALDRYLAITSPFRYQSLLTRARARGLVCTVWAISALVSFLPILMHWWRAESDEARRCYNDPKCCDFVTNRAYAIASSVVSFYVPLCIMAFVYLRVFREAQKQVKKIDSCERRFLGGPARPPSPSPSPVPAPAPPPGPPRPAAAAATAPLANGRAGKRRPSRLVALREQKALKTLGIIMGVFTLCWLPFFLANVVKAFHRELVPDRLFVFFNWLGYANSAFNPIIYCRSPDFRKAFQRLLCCARRAARRRHATHGDRPRASGCLARPGPPPSPGAASDDDDDDVVGATPPARLLEPWAGCNGGAAADSDSSLDEPCRPGFASESKV

SEQ ID NO: 18455 - protein, 542 aa, Homo sapiens
MDLGAITKYSALHAKPNGLILQYGTAGFRTKAEHLDHVMFRMGLLAVLRSKQTKSTIGVMVTASHNPEEDNGVKLVDPLGEMLAPSWEEHATCLANAEEQDMQRVLIDISEKEAVNLQQDAFVVIGRDTRPSSEKLSQSVIDGVTVLGGQFHDYGLLTTPQLHYMVYCRNTGGRYGKATIEGYYQKLSKAFVELTKQASCSGDEYRSLKVDCANGIGALKLREMEHYFSQGLSVQLFNDGSKGKLNHLCGADFVKSHQKPPQGMEIKSNERCCSFDGDADRIVYYYHDADGHFHLIDGDKIATLISSFLKELLVEIGESLNIGVVQTAYANGSSTRYLEEVMKVPVYCTKTGVKHLHHKAQEFDIGVYFEANGHGTALFSTAVEMKIKQSAEQLEDKKRKAAKMLENIIDLFNQAAGDAISDMLVIEAILALKGLTVQQWDALYTDLPNRQLKVQVADRRVISTTDAERQAVTPPGLQEAINDLVKKYKLSRAFVRPSGTEDVVRVYAEADSQESADHLAHEVSLAVFQLAGGIGERPQPGF

SEQ ID NO: 18456 - protein, 566 aa, Homo sapiens
MDLGAITKYSALHAKPNGLILQYGTAGFRTKAEHLDHVMFRMGLLAVLRSKQTKSTIGVMVTASHNPEEDNGVKLVDPLGEMLAPSWEEHATCLANAEEQDMQRVLIDISEKEAVNLQQDAFVVIGRDTRPSSEKLSQSVIDGVTVLGGQFHDYGLLTTPQLHYMVYCRNTGGRYGKATIEGYYQKLSKAFVELTKQASCSGDEYRSLKVDCANGIGALKLREMEHYFSQGLSVQLFNDGSKGKLNHLCGADFVKSHQKPPQGMEIKSNERCCSFDGDADRIVYYYHDADGHFHLIDGDKIATLISSFLKELLVEIGESLNIGVVQTAYANGSSTRYLEEVMKVPVYCTKTGVKHLHHKAQEFDIGVYFEANGHGTALFSTAVEMKIKQSAEQLEDKKRKAAKMLENIIDLFNQAAGDAISDMLVIEAILALKGLTVQQWDALYTDLPNRQLKVQVADRRVISTTDAERQAVTPPGLQEAINDLVKKYKLSRAFVRPSGTEDVVRVYAEADSQESADHLAHEVSLAVFQLAGGIGERPQPGYKAAETTHNINNAFGPGTANEHTVP

SEQ ID NO: 18457 - protein, 570 aa, Homo sapiens
MGGEWGQSAICPESAQEWTYQVGQHLVDMDLGAITKYSALHAKPNGLILQYGTAGFRTKAEHLDHVMFRMGLLAVLRSKQTKSTIGVMVTASHNPEEDNGVKLVDPLGEMLAPSWEEHATCLANAEEQDMQRVLIDISEKEAVNLQQDAFVVIGRDTRPSSEKLSQSVIDGVTVLGGQFHDYGLLTTPQLHYMVYCRNTGGRYGKATIEGYYQKLSKAFVELTKQASCSGDEYRSLKVDCANGIGALKLREMEHYFSQGLSVQLFNDGSKGKLNHLCGADFVKSHQKPPQGMEIKSNERCCSFDGDADRIVYYYHDADGHFHLIDGDKIATLISSFLKELLVEIGESLNIGVVQTAYANGSSTRYLEEVMKVPVYCTKTGVKHLHHKAQEFDIGVYFEANGHGTALFSTAVEMKIKQSAEQLEDKKRKAAKMLENIIDLFNQAAGDAISDMLVIEAILALKGLTVQQWDALYTDLPNRQLKVQVADRRVISTTDAERQAVTPPGLQEAINDLVKKYKLSRAFVRPSGTEDVVRVYAEADSQESADHLAHEVSLAVFQLAGGIGERPQPGF

SEQ ID NO: 18458 - protein, 684 aa, Homo sapiens
MSLWPPFRCRWKLAPRYSRRASPQQPQQDFEALLAECLRNGCLFEDTSFPATLSSIGSGSLLQKLPPRLQWKRPPELHSNPQFYFAKAKRLDLCQGIVGDCWFLAALQALALHQDILSRVVPLNQSFTEKYAGIFRFWFWHYGNWVPVVIDDRLPVNEAGQLVFVSSTYKNLFWGALLEKAYAKLSGSYEDLQSGQVSEALVDFTGGVTMTINLAEAHGNLWDILIEATYNRTLIGCQTHSGEKILENGLVEGHAYTLTGIRKVTCKHRPEYLVKLRNPWGKVEWKGDWSDSSSKWELLSPKEKILLLRKDNDGEFWMTLQDFKTHFVLLVICKLTPGLLSQEAAQKWTYTMREGRWEKRSTAGGQRQLLQDTFWKNPQFLLSVWRPEEGRRSLRPCSVLVSLLQKPRHRCRKRKPLLAIGFYLYRMNKYHDDQRRLPPEFFQRNTPLSQPDRFLKEKEVSQELCLEPGTYLIVPCILEAHQKSEFVLRVFSRKHIFYEIGSNSGVVFSKEIEDQNERQDEFFTKFFEKHPEINAVQLQNLLNQMTWSSLGSRQPFFSLEACQGILALLDLNASGTMSIQEFRDLWKQLKLSQKVFHKQDRGSGYLNWEQLHAAMREAGIMLSDDVCQLMLIRYGGPRLQMDFVSFIHLMLRVENMEDVFQNLTQDGKGIYLQKPEWMMMALYS

SEQ ID NO: 18459 - protein, 508 aa, Homo sapiens
MLASSGSGLSGSYEDLQSGQVSEALVDFTGGVTMTINLAEAHGNLWDILIEATYNRTLIGCQTHSGEKILENGLVEGHAYTLTGIRKVTCKHRPEYLVKLRNPWGKVEWKGDWSDSSSKWELLSPKEKILLLRKDNDGEFWMTLQDFKTHFVLLVICKLTPGLLSQEAAQKWTYTMREGRWEKRSTAGGQRQLLQDTFWKNPQFLLSVWRPEEGRRSLRPCSVLVSLLQKPRHRCRKRKPLLAIGFYLYRMNKYHDDQRRLPPEFFQRNTPLSQPDRFLKEKEVSQELCLEPGTYLIVPCILEAHQKSEFVLRVFSRKHIFYEIGSNSGVVFSKEIEDQNERQDEFFTKFFEKHPEINAVQLQNLLNQMTWSSLGSRQPFFSLEACQGILALLDLNASGTMSIQEFRDLWKQLKLSQKVFHKQDRGSGYLNWEQLHAAMREAGIMLSDDVCQLMLIRYGGPRLQMDFVSFIHLMLRVENMEDVFQNLTQDGKGIYLQKPEWMMMALYS

SEQ ID NO: 18460 - protein, 182 aa, Homo sapiens
MKSFLLVVNALALTLPFLAVEVQNQKQPACHENDERPFYQKTAPYVPMYYVPNSYPYYGTNLYQRRPAIAINNPYVPRTYYANPAVVRPHAQIPQRQYLPNSHPPTVVRRPNLHPSFIAIPPKKIQDKIIIPTINTIATVEPTPAPATEPTVDSVVTPEAFSESIITSTPETTTVAVTPPTA

SEQ ID NO: 18461 - protein, 1597 aa, Homo sapiens
MEAEEAQRGASPPISAIEEFSIIPEAPMRSSQVSALGLEAQEDEDPSYKWREEHRLSATQQSELRDVCDYAIETMPSFPKEGSADVEPNQESLVAEACDTPEHWEAVPQSLAGRQARTLAPPELWACPIQSEHLDMAPFSSDLGSEEEEVEFWPGLTSLTLGSGQAEEEEETSSDNSGQTRYYSPCEEHPAETNQNEGSESGTIRQGEELPPEELQESQGLLHPQEVQVLEEQGQQEAGFRGEGTLREDVCADGLLGEEQMIEQVNDEKGEQKQKQEQVQDVMLGRQGERMGLTGEPEGLNDGEWEQEDMERKAQGQGGPEQGEERKRELQVPEENRADSQDEKSQTFLGKSEEVTGKQEDHGIKEKGVPVSGQEAKEPESWDGGRLGAVGRARSREEENEHHGPSMPALIAPEDSPHCDLFPGASYLMTQIPGTQTESRAEELSPAALSPSLEPIRCSHQPISLLGSFLTEESPDKEIDQNSQQEESRLRKGTVSSQGTEVVFASASVTPPRTPDSAPPSPAEAYPITPASVSARPPVAFPRRETSCAARAPETASAPLSMDDPSPCGTSEMCPAALYGFPSTGTSPPRPPANSTGTVQHLRSDSFPGSHRTEQTPDLVGMLLSYSHSELPQRPPKPAIYSSVTPRRDRRSGRDYSTVSASPTALSTLKQDSQESISNLERPSSPPSIQPWVSPHNPAFATESPAYGSSPSFVSMEDVRIHEPLPPPPPQRRDTHPSVVETDGHARVVVPTLKQHSHPPPLALGSGLHAPHKGPLPQASDPAVARQHRPLPSTPDSSHHAQATPRWRYNKPLPPTPDLPQPHLPPISAPGSSRIYRPLPPLPIIDPPTEPPPLPPKSRGRSRSTRGGHMNSGGHAKTRPACQDWTVPLPASAGRTSWPPATARSTESFTSTSRSKSEVSPGMAFSNMTNFLCPSSPTTPWTPELQGPTSKDEAGVSEHPEAPAREPLRRTTPQQGASGPGRSPVGQARQPEKPSHLHLEKASSWPHRRDSGRPPGDSSGQAVAPSEGANKHKGWSRQGLRRPSILPEGSSDSRGPAVEKHPGPSDTVVFREKKPKEVMGGFSRRCSKLINSSQLLYQEYSDVVLNKEIQSQQRLESLSETPGPSSPRQPRKALVSSESYLQRLSMASSGSLWQEIPVVRNSTVLLSMTHEDQKLQEVKFELIVSEASYLRSLNIAVDHFQLSTSLRATLSNQEHQWLFSRLQDVRDVSATFLSDLEENFENNIFSFQVCDVVLNHAPDFRRVYLPYVTNQTYQERTFQSLMNSNSNFREVLEKLESDPVCQRLSLKSFLILPFQRITRLKLLLQNILKRTQPGSSEEAEATKAHHALEQLIRDCNNNVQSMRRTEELIYLSQKIEFECKIFPLISQSRWLVKSGELTALEFSASPGLRRKLNTRPVHLHLFNDCLLLSRPREGSRFLVFDHAPFSSIRGEKCEMKLHGPHKNLFRLFLRQNTQGAQAEFLFRTETQSEKLRWISALAMPREELDLLECYNSPQVQCLRAYKPRENDELALEKADVVMVTQQSSDGWLEGVRLSDGERGWFPVQQVEFISNPEVRAQNLKEAHRVKTAKLQLVEQQA

SEQ ID NO: 18462 - protein, 519 aa, Homo sapiens
MGGFSRRCSKLINSSQLLYQEYSDVVLNKEIQSQQRLESLSETPGPSSPRQPRKALVSSESYLQRLSMASSGSLWQEIPVVRNSTVLLSMTHEDQKLQEVKFELIVSEASYLRSLNIAVDHFQLSTSLRATLSNQEHQWLFSRLQDVRDVSATFLSDLEENFENNIFSFQVCDVVLNHAPDFRRVYLPYVTNQTYQERTFQSLMNSNSNFREVLEKLESDPVCQRLSLKSFLILPFQRITRLKLLLQNILKRTQPGSSEEAEATKAHHALEQLIRDCNNNVQSMRRTEELIYLSQKIEFECKIFPLISQSRWLVKSGELTALEFSASPGLRRKLNTRPVHLHLFNDCLLLSRPREGSRFLVFDHAPFSSIRGEKCEMKLHGPHKNLFRLFLRQNTQGAQAEFLFRTETQSEKLRWISALAMPREELDLLECYNSPQVQCLRAYKPRENDELALEKADVVMVTQQSSDGWLEGVRLSDGERGWFPVQQVEFISNPEVRAQNLKEAHRVKTAKLQLVEQQA

SEQ ID NO: 18463 - protein, 262 aa, Homo sapiens
MVAWRSAFLVCLAFSLATLVQRGSGDFDDFNLEDAVKETSSVKQPWDHTTTTTTNRPGTTRAPAKPPGSGLDLADALDDQDDGRRKPGIGGRERWNHVTTTTKRPVTTRAPANTLGNDFDLADALDDRNDRDDGRRKPIAGGGGFSDKDLEDIVGGGEYKPDKGKGDGRYGSNDDPGSGMVAEPGTIAGVASALAMALIGAVSSYISYQQKKFCFSIQQGLNADYVKGENLEAVVCEEPQVKYSTLHTQSAEPPPPPEPARI

SEQ ID NO: 18464 - protein, 213 aa, Homo sapiens
MVAWRSAFLVCLAFSLATLVQRGSGDFDDFNLEDAVKETSSVKQRWNHVTTTTKRPVTTRAPANTLGNDFDLADALDDRNDRDDGRRKPIAGGGGFSDKDLEDIVGGGEYKPDKGKGDGRYGSNDDPGSGMVAEPGTIAGVASALAMALIGAVSSYISYQQKKFCFSIQQGLNADYVKGENLEAVVCEEPQVKYSTLHTQSAEPPPPPEPARI

SEQ ID NO: 18465 - protein, 190 aa, Homo sapiens
MVAWRSAFLVCLAFSLATLVQRGSGDFDDFNLEDAVKETSSVKRNDFDLADALDDRNDRDDGRRKPIAGGGGFSDKDLEDIVGGGEYKPDKGKGDGRYGSNDDPGSGMVAEPGTIAGVASALAMALIGAVSSYISYQQKKFCFSIQQGLNADYVKGENLEAVVCEEPQVKYSTLHTQSAEPPPPPEPARI

SEQ ID NO: 18466 - protein, 145 aa, Homo sapiens
MVAWRSAFLVCLAFSLATLVQRGSGDFDDFNLEDAVKETSSVKPALGMYHKLDGLKQQNFILSLFWMLEVLYQGVGWATFSLKALGKNLSLTFPTSGGSRCSLVCGCITPISASVVTWCSPFCVSLLSLTKMLVSGFKAHLDNPG

SEQ ID NO: 18467 - protein, 272 aa, Homo sapiens
MVAWRSAFLVCLAFSLATLVQRGSGDFDDFNLEDAVKETSSVKQPWDHTTTTTTNRPGTTRAPAKPPGPTEGSGLDLADALDDQDDGRRKPGIGGRERWNHVTTTTKRPVTTRAPANTLGNDFDLADALDDRNDRDDGRRKPIAGGGGFSDKDLEDIVGGGEYKPDKGKGDGRYGSNDDPGSGMVAEPGTIAGVASALAMALIGAVSSYISYQQKKFCFSIQHAAAGQEGLNADYVKGENLEAVVCEEPQVKYSTLHTQSAEPPPPPEPARI

SEQ ID NO: 18468 - protein, 189 aa, Homo sapiens
MVAWRSAFLVCLAFSLATLVQRGSGDFDDFNLEDAVKETSSVKQPWDHTTTTTTNRPGTTRAPAKPPGSGLDLADALDDQDDGRRKPGIGGRGDGRYGSNDDPGSGMVAEPGTIAGVASALAMALIGAVSSYISYQQKKFCFSIQQGLNADYVKGENLEAVVCEEPQVKYSTLHTQSAEPPPPPEPARI

SEQ ID NO: 18469 - protein, 714 aa, Homo sapiens
MSEEIITPVYCTGVSAQVQKQRARELGLGRHENAIKYLGQDYEQLRVRCLQSGTLFRDEAFPPVPQSLGYKDLGPNSSKTYGIKWKRPTELLSNPQFIVDGATRTDICQGALGDCWLLAAIASLTLNDTLLHRVVPHGQSFQNGYAGIFHFQLWQFGEWVDVVVDDLLPIKDGKLVFVHSAEGNEFWSALLEKAYAKVNGSYEALSGGSTSEGFEDFTGGVTEWYELRKAPSDLYQIILKALERGSLLGCSIDISSVLDMEAITFKKLVKGHAYSVTGAKQVNYRGQVVSLIRMRNPWGEVEWTGAWSDSSSEWNNVDPYERDQLRVKMEDGEFWMSFRDFMREFTRLEICNLTPDALKSRTIRKWNTTLYEGTWRRGSTAGGCRNYPATFWVNPQFKIRLDETDDPDDYGDRESGCSFVLALMQKHRRRERRFGRDMETIGFAVYEVPPELVGQPAVHLKRDFFLANASRARSEQFINLREVSTRFRLPPGEYVVVPSTFEPNKEGDFVLRFFSEKSAGTVELDDQIQANLPDEQVLSEEEIDENFKALFRQLAGEDMEISVKELRTILNRIISKHKDLRTKGFSLESCRSMVNLMDRDGNGKLGLVEFNILWNRIRNYLSIFRKFDLDKSGSMSAYEMRMAIESAGFKLNKKLYELIITRYSEPDLAVDFDNFVCCLVRLETMFRFFKTLDTDLDGVVTFDLFKWLQLTMFA

SEQ ID NO: 18470 - protein, 516 aa, Homo sapiens
MTLLITGDSIVSAEAVWDHVTMANRELAFKAGDVIKVLDASNKDWWWGQIDDEEGWFPASFVRLWVNQEDEVEEGPSDVQNGHLDPNSDCLCLGRPLQNRDQMRANVINEIMSTERHYIKHLKDICEGYLKQCRKRRDMFSDEQLKVIFGNIEDIYRFQMGFVRDLEKQYNNDDPHLSEIGPCFLEHQDGFWIYSEYCNNHLDACMELSKLMKDSRYQHFFEACRLLQQMIDIAIDGFLLTPVQKICKYPLQLAELLKYTAQDHSDYRYVAAALAVMRNVTQQINERKRRLENIDKIAQWQASVLDWEGEDILDRSSELIYTGEMAWIYQPYGRNQQRVFFLFDHQMVLCKKDLIRRDILYYKGRIDMDKYEVVDIEDGRDDDFNVSMKNAFKLHNKETEEIHLFFAKKLEEKIRWLRAFREERKMVQEDEKIGFEISENQKRQAAMTVRKVPKQKGVNSARSVPPSYPPPQDPLNHGQYLVPDGIAQSQVFEFTEPKRSQSPFWQNFSRLTPFKK

SEQ ID NO: 18471 - protein, 463 aa, Homo sapiens
MQWIRGGSGMLWVNQEDEVEEGPSDVQNGHLDPNSDCLCLGRPLQNRDQMRANVINEIMSTERHYIKHLKDICEGYLKQCRKRRDMFSDEQLKVIFGNIEDIYRFQMGFVRDLEKQYNNDDPHLSEIGPCFLEHQDGFWIYSEYCNNHLDACMELSKLMKDSRYQHFFEACRLLQQMIDIAIDGFLLTPVQKICKYPLQLAELLKYTAQDHSDYRYVAAALAVMRNVTQQINERKRRLENIDKIAQWQASVLDWEGEDILDRSSELIYTGEMAWIYQPYGRNQQRVFFLFDHQMVLCKKDLIRRDILYYKGRIDMDKYEVVDIEDGRDDDFNVSMKNAFKLHNKETEEIHLFFAKKLEEKIRWLRAFREERKMVQEDEKIGFEISENQKRQAAMTVRKVPKQKGVNSARSVPPSYPPPQDPLNHGQYLVPDGIAQSQVFEFTEPKRSQSPFWQNFSRLTPFKK

SEQ ID NO: 18472 - protein, 414 aa, Homo sapiens
MRANVINEIMSTERHYIKHLKDICEGYLKQCRKRRDMFSDEQLKVIFGNIEDIYRFQMGFVRDLEKQYNNDDPHLSEIGPCFLEHQDGFWIYSEYCNNHLDACMELSKLMKDSRYQHFFEACRLLQQMIDIAIDGFLLTPVQKICKYPLQLAELLKYTAQDHSDYRYVAAALAVMRNVTQQINERKRRLENIDKIAQWQASVLDWEGEDILDRSSELIYTGEMAWIYQPYGRNQQRVFFLFDHQMVLCKKDLIRRDILYYKGRIDMDKYEVVDIEDGRDDDFNVSMKNAFKLHNKETEEIHLFFAKKLEEKIRWLRAFREERKMVQEDEKIGFEISENQKRQAAMTVRKVPKQKGVNSARSVPPSYPPPQDPLNHGQYLVPDGIAQSQVFEFTEPKRSQSPFWQNFSRLTPFKK

SEQ ID NO: 18473 - protein, 253 aa, Homo sapiens
MASGSNWLSGVNVVLVMAYGSLVFVLLFIFVKRQIMRFAMKSRRGPHVPVGHNAPKDLKEEIDIRLSRVQDIKYEPQLLADDDARLLQLETQGNQSCYNYLYRMKALDAIRTSEIPFHSEGRHPRSLMGKNFRSYLLDLRNTSTPFKGVRKALIDTLLDGYETARYGTGVFGQNEYLRYQEALSELATAVKARIGSSQRHHQSAAKDLTQSPEVSPTTIQVTYLPSSQKSKRAKHFLELKSFKDNYNTLESTL

SEQ ID NO: 18474 - protein, 219 aa, Homo sapiens
MASGSNWLSGVNVVLVMAYGSLDLKEEIDIRLSRVQDIKYEPQLLADDDARLLQLETQGNQSCYNYLYRMKALDAIRTSEIPFHSEGRHPRSLMGKNFRSYLLDLRNTSTPFKGVRKALIDTLLDGYETARYGTGVFGQNEYLRYQEALSELATAVKARIGSSQRHHQSAAKDLTQSPEVSPTTIQVTYLPSSQKSKRAKHFLELKSFKDNYNTLESTL

SEQ ID NO: 18475 - protein, 189 aa, Homo sapiens
MASGSNWLSGVNVVLVMAYGSLVFVLLFIFVKRQIMRFAMKSRRGPHVPVGHNAPKDLKEEIDIRLSRVQDIKYEPQLLADDDARLLQLETQGNQSCYNYLYRMKALDAIRTSEIPFHSEGRHPRSLMGKNFRSYLLDLRNTSTPFKGVRKALIDTLLDGYETARYGTGVFGQNEYLRYQEALSELATA

SEQ ID NO: 18476 - protein, 201 aa, Homo sapiens
MASGSNWLSGVNVVLVMAYGSLDLKEEIDIRLSRVQDIKYEPQLLADDDARLLQLETQGNQKIPFHSEGRHPRSLMGKNFRSYLLDLRNTSTPFKGVRKALIDTLLDGYETARYGTGVFGQNEYLRYQEALSELATAVKARIGSSQRHHQSAAKDLTQSPEVSPTTIQVTYLPSSQKSKRAKHFLELKSFKDNYNTLESTL

SEQ ID NO: 18477 - protein, 152 aa, Homo sapiens
MASGSNWLSGVNVVLVMAYGSLVFVLLFIFVKRQIMRFAMKSRRGPHVPVGHNAPKDLKEEIDIRLSRVQDIKYEPQLLADDDARLLQLETQGNQKIPFHSEGRHPRSLMGKNFRSYLLDLRNTSTPFKGVRKALIDTLLDGYETARYGTGG

SEQ ID NO: 18478 - protein, 710 aa, Homo sapiens
MSVPSSLSQSAINANSHGGPALSLPLPLHAAHNQLLNAKLQATAVGPKDLRSAMGEGGGPEPGPANAKWLKEGQNQLRRAATAHRDQNRNVTLTLAEEASQEPEMAPLGPKGLIHLYSELELSAHNAANRGLRGPGLIISTQEQGPDEGEEKAAGEAEEEEEDDDDEEEEEDLSSPPGLPEPLESVEAPPRPQALTDGPREHSKSASLLFGMRNSAASDEDSSWATLSQGSPSYGSPEDTDSFWNPNAFETDSDLPAGWMRVQDTSGTYYWHIPTGTTQWEPPGRASPSQGSSPQEESQLTWTGFAHGEGFEDGEFWKDEPSDEAPMELGLKEPEEGTLTFPAQSLSPEPLPQEEEKLPPRNTNPGIKCFAVRSLGWVEMTEEELAPGRSSVAVNNCIRQLSYHKNNLHDPMSGGWGEGKDLLLQLEDETLKLVEPQSQALLHAQPIISIRVWGVGRDSGRERDFAYVARDKLTQMLKCHVFRCEAPAKNIATSLHEICSKIMAERRNARCLVNGLSLDHSKLVDVPFQVEFPAPKNELVQKFQVYYLGNVPVAKPVGVDVINGALESVLSSSSREQWTPSHVSVAPATLTILHQQTEAVLGECRVRFLSFLAVGRDVHTFAFIMAAGPASFCCHMFWCEPNAASLSEAVQAACMLRYQKCLDARSQASTSCLPAPPAESVARRVGWTVRRGVQSLWGSLKPKRLGAHTP

SEQ ID NO: 18479 - protein, 708 aa, Homo sapiens
MSVPSSLSQSAINANSHGGPALSLPLPLHAAHNQLLNAKLQATAVGPKDLRSAMGEGGGPEPGPANAKWLKEGQNQLRRAATAHRDQNRNVTLTLAEEASQEPEMAPLGPKGLIHLYSELELSAHNAANRGLRGPGLIISTQEQGPDEGEEKAAGEAEEEEEDDDDEEEEEDLSSPPGLPEPLESVEAPPRPQALTDGPREHSKSASLLFGMRNSAASDEDSSWATLSQGSPSYGSPEDTDSFWNPNAFETDSDLPAGWMRVQDTSGTYYWHIPTGTTQWEPPGRASPSQGSSPQEESQLTWTGFAHGEGFEDGEFWKDEPSDEAPMELGLKEPEEGTLTFPAQSLSPEPLPQEEEKLPPRNTNPGIKCFAVRSLGWVEMTEEELAPGRSSVAVNNCIRQLSYHKNNLHDPMSGGWGEGKDLLLQLEDETLKLVEPQSQALLHAQPIISIRVWGVGRDSGRDFAYVARDKLTQMLKCHVFRCEAPAKNIATSLHEICSKIMAERRNARCLVNGLSLDHSKLVDVPFQVEFPAPKNELVQKFQVYYLGNVPVAKPVGVDVINGALESVLSSSSREQWTPSHVSVAPATLTILHQQTEAVLGECRVRFLSFLAVGRDVHTFAFIMAAGPASFCCHMFWCEPNAASLSEAVQAACMLRYQKCLDARSQASTSCLPAPPAESVARRVGWTVRRGVQSLWGSLKPKRLGAHTP

SEQ ID NO: 18480 - protein, 488 aa, Homo sapiens
MSAMFSQDFFLAIILQDSSADSFWNPNAFETDSDLPAGWMRVQDTSGTYYWHIPTGTTQWEPPGRASPSQGSSPQEESQLTWTGFAHGEGFEDGEFWKDEPSDEAPMELGLKEPEEGTLTFPAQSLSPEPLPQEEEKLPPRNTNPGIKCFAVRSLGWVEMTEEELAPGRSSVAVNNCIRQLSYHKNNLHDPMSGGWGEGKDLLLQLEDETLKLVEPQSQALLHAQPIISIRVWGVGRDSGRDFAYVARDKLTQMLKCHVFRCEAPAKNIATSLHEICSKIMAERRNARCLVNGLSLDHSKLVDVPFQVEFPAPKNELVQKFQVYYLGNVPVAKPVGVDVINGALESVLSSSSREQWTPSHVSVAPATLTILHQQTEAVLGECRVRFLSFLAVGRDVHTFAFIMAAGPASFCCHMFWCEPNAASLSEAVQAACMLRYQKCLDARSQASTSCLPAPPAESVARRVGWTVRRGVQSLWGSLKPKRLGAHTP

SEQ ID NO: 18481 - protein, 451 aa, Homo sapiens
MRVQDTSGTYYWHIPTGTTQWEPPGRASPSQGSSPQEESQLTWTGFAHGEGFEDGEFWKDEPSDEAPMELGLKEPEEGTLTFPAQSLSPEPLPQEEEKLPPRNTNPGIKCFAVRSLGWVEMTEEELAPGRSSVAVNNCIRQLSYHKNNLHDPMSGGWGEGKDLLLQLEDETLKLVEPQSQALLHAQPIISIRVWGVGRDSGRERDFAYVARDKLTQMLKCHVFRCEAPAKNIATSLHEICSKIMAERRNARCLVNGLSLDHSKLVDVPFQVEFPAPKNELVQKFQVYYLGNVPVAKPVGVDVINGALESVLSSSSREQWTPSHVSVAPATLTILHQQTEAVLGECRVRFLSFLAVGRDVHTFAFIMAAGPASFCCHMFWCEPNAASLSEAVQAACMLRYQKCLDARSQASTSCLPAPPAESVARRVGWTVRRGVQSLWGSLKPKRLGAHTP

SEQ ID NO: 18482 - protein, 490 aa, Homo sapiens
MSAMFSQDFFLAIILQDSSADSFWNPNAFETDSDLPAGWMRVQDTSGTYYWHIPTGTTQWEPPGRASPSQGSSPQEESQLTWTGFAHGEGFEDGEFWKDEPSDEAPMELGLKEPEEGTLTFPAQSLSPEPLPQEEEKLPPRNTNPGIKCFAVRSLGWVEMTEEELAPGRSSVAVNNCIRQLSYHKNNLHDPMSGGWGEGKDLLLQLEDETLKLVEPQSQALLHAQPIISIRVWGVGRDSGRERDFAYVARDKLTQMLKCHVFRCEAPAKNIATSLHEICSKIMAERRNARCLVNGLSLDHSKLVDVPFQVEFPAPKNELVQKFQVYYLGNVPVAKPVGVDVINGALESVLSSSSREQWTPSHVSVAPATLTILHQQTEAVLGECRVRFLSFLAVGRDVHTFAFIMAAGPASFCCHMFWCEPNAASLSEAVQAACMLRYQKCLDARSQASTSCLPAPPAESVARRVGWTVRRGVQSLWGSLKPKRLGAHTP

SEQ ID NO: 18483 - protein, 475 aa, Homo sapiens
MTQMRDSFWNPNAFETDSDLPAGWMRVQDTSGTYYWHIPTGTTQWEPPGRASPSQGSSPQEESQLTWTGFAHGEGFEDGEFWKDEPSDEAPMELGLKEPEEGTLTFPAQSLSPEPLPQEEEKLPPRNTNPGIKCFAVRSLGWVEMTEEELAPGRSSVAVNNCIRQLSYHKNNLHDPMSGGWGEGKDLLLQLEDETLKLVEPQSQALLHAQPIISIRVWGVGRDSGRERDFAYVARDKLTQMLKCHVFRCEAPAKNIATSLHEICSKIMAERRNARCLVNGLSLDHSKLVDVPFQVEFPAPKNELVQKFQVYYLGNVPVAKPVGVDVINGALESVLSSSSREQWTPSHVSVAPATLTILHQQTEAVLGECRVRFLSFLAVGRDVHTFAFIMAAGPASFCCHMFWCEPNAASLSEAVQAACMLRYQKCLDARSQASTSCLPAPPAESVARRVGWTVRRGVQSLWGSLKPKRLGAHTP

SEQ ID NO: 18484 - protein, 404 aa, Homo sapiens
MADKVLKEKRKLFIRSMGEGTINGLLDELLQTRVLNKEEMEKVKRENATVMDKTRALIDSVIPKGAQACQICITYICEEDSYLAGTLGLSADQTSGNYLNMQDSQGVLSSFPAPQAVQDNPAMPTSSGSEGNVKLCSLEEAQRIWKQKSAEIYPIMDKSSRTRLALIICNEEFDSIPRRTGAEVDITGMTMLLQNLGYSVDVKKNLTASDMTTELEAFAHRPEHKTSDSTFLVFMSHGIREGICGKKHSEQVPDILQLNAIFNMLNTKNCPSLKDKPKVIIIQACRGDSPGVVWFKDSVGVSGNLSLPTTEEFEDDAIKKAHIEKDFIAFCSSTPDNVSWRHPTMGSVFIGRLIEHMQEYACSCDVEEIFRKVRFSFEQPDGRAQMPTTERVTLTRCFYLFPGH

SEQ ID NO: 18485 - protein, 383 aa, Homo sapiens
MADKVLKEKRKLFIRSMGEGTINGLLDELLQTRVLNKEEMEKVKRENATVMDKTRALIDSVIPKGAQACQICITYICEEDSYLAGTLGLSAAPQAVQDNPAMPTSSGSEGNVKLCSLEEAQRIWKQKSAEIYPIMDKSSRTRLALIICNEEFDSIPRRTGAEVDITGMTMLLQNLGYSVDVKKNLTASDMTTELEAFAHRPEHKTSDSTFLVFMSHGIREGICGKKHSEQVPDILQLNAIFNMLNTKNCPSLKDKPKVIIIQACRGDSPGVVWFKDSVGVSGNLSLPTTEEFEDDAIKKAHIEKDFIAFCSSTPDNVSWRHPTMGSVFIGRLIEHMQEYACSCDVEEIFRKVRFSFEQPDGRAQMPTTERVTLTRCFYLFPGH

SEQ ID NO: 18486 - protein, 311 aa, Homo sapiens
MADKVLKEKRKLFIRSMGEAPQAVQDNPAMPTSSGSEGNVKLCSLEEAQRIWKQKSAEIYPIMDKSSRTRLALIICNEEFDSIPRRTGAEVDITGMTMLLQNLGYSVDVKKNLTASDMTTELEAFAHRPEHKTSDSTFLVFMSHGIREGICGKKHSEQVPDILQLNAIFNMLNTKNCPSLKDKPKVIIIQACRGDSPGVVWFKDSVGVSGNLSLPTTEEFEDDAIKKAHIEKDFIAFCSSTPDNVSWRHPTMGSVFIGRLIEHMQEYACSCDVEEIFRKVRFSFEQPDGRAQMPTTERVTLTRCFYLFPGH

SEQ ID NO: 18487 - protein, 263 aa, Homo sapiens
MADKVLKEKRKLFIRSMGEAPQAVQDNPAMPTSSGSEGNVKLCSLEEAQRIWKQKSAEIYPIMDKSSRTRLALIICNEEFDSIPRRTGAEVDITGMTMLLQNLGYSVDVKKNLTASDMTTELEAFAHRPEHKTSDSTFLVFMSHGIREGICGKKHSEQVPDILQLNAIFNMLNTKNCPSLKDKPKVIIIQACRGDNVSWRHPTMGSVFIGRLIEHMQEYACSCDVEEIFRKVRFSFEQPDGRAQMPTTERVTLTRCFYLFPGH

SEQ ID NO: 18488 - protein, 88 aa, Homo sapiens
MADKVLKEKRKLFIRSMGEDNVSWRHPTMGSVFIGRLIEHMQEYACSCDVEEIFRKVRFSFEQPDGRAQMPTTERVTLTRCFYLFPGH

SEQ ID NO: 18489 - protein, 322 aa, Homo sapiens
MSAKSRTIGIIGAPFSKGQPRGGVEEGPTVLRKAGLLEKLKEQECDVKDYGDLPFADIPNDSPFQIVKNPRSVGKASEQLAGKVAEVKKNGRISLVLGGDHSLAIGSISGHARVHPDLGVIWVDAHTDINTPLTTTSGNLHGQPVSFLLKELKGKIPDVPGFSWVTPCISAKDIVYIGLRDVDPGEHYILKTLGIKYFSMTEVDRLGIGKVMEETLSYLLGRKKRPIHLSFDVDGLDPSFTPATGTPVVGGLTYREGLYITEEIYKTGLLSGLDIMEVNPSLGKTPEEVTRTVNTAVAITLACFGLAREGNHKPIDYLNPPK

SEQ ID NO: 18490 - protein, 330 aa, Homo sapiens
MSAKSRTIGIIGAPFSKGQPRGGVEEGPTVLRKAGLLEKLKEQVTQNFLILECDVKDYGDLPFADIPNDSPFQIVKNPRSVGKASEQLAGKVAEVKKNGRISLVLGGDHSLAIGSISGHARVHPDLGVIWVDAHTDINTPLTTTSGNLHGQPVSFLLKELKGKIPDVPGFSWVTPCISAKDIVYIGLRDVDPGEHYILKTLGIKYFSMTEVDRLGIGKVMEETLSYLLGRKKRPIHLSFDVDGLDPSFTPATGTPVVGGLTYREGLYITEEIYKTGLLSGLDIMEVNPSLGKTPEEVTRTVNTAVAITLACFGLAREGNHKPIDYLNPPK

SEQ ID NO: 18491 - protein, 236 aa, Homo sapiens
MSAKSRTIGIIGAPFSKGQPRGGVEEGPTVLRKAGLLEKLKEQECDVKDYGDLPFADIPNDSPFQIVKNPRSVGKASEQLAGKVAEVKKNGRISLVLGGDHSLAIGSISGHARVHPDLGVIWVDAHTDINTPLTTTSGNLHGQPVSFLLKELKGKIPDVPGFSWVTPCISAKDIVYIGLRDVDPGEHYILKTLGIKYFSMTEVTRTVNTAVAITLACFGLAREGNHKPIDYLNPPK

SEQ ID NO: 18492 - protein, 486 aa, Homo sapiens
MLGKDYMLAIILVNCDDDLWGDHSLEVEAGLPPGWRKIHDAAGTYYWHVPSGSTQWQRPTWELGDAEDPGTGTEGIWGLRPPKGRSFSSLESSLDRSNSLSWYGGESYIQSMEPGAKCFAVRSLGWVEVPEEDLAPGKSSIAVNNCIQQLAQTRSRSQPPDGAWGEGQNMLMILKKDAMSLVNPLDHSLIHCQPLVHIRVWGVGSSKGRDRDFAFVASDKDSCMLKCHVFCCDVPAKAIASALHGLCAQILSERVEVSGDASCCSPDPISPEDLPRQVELLDAVSQAAQKYEALYMGTLPVTKAMGMDVLNEAIGTLTARGDRNAWVPTMLSVSDSLMTAHPIQAEASTEEEPLWQCPVRLVTFIGVGRDPHTFGLIADLGRQSFQCAAFWCQPHAGGLSEAVQAACMVQYQKCLVASAARGKAWGAQARARLRLKRTSSMDSPGGPLPLPLLKGGVGGAGATPRKRGVFSFLDAFRLKPSLLHMP

SEQ ID NO: 18493 - protein, 484 aa, Homo sapiens
MLGKDYMLAIILVNCDDDLWGDHSLEVEAGLPPGWRKIHDAAGTYYWHVPSGSTQWQRPTWELGDAEDPGTGTEGIWGLRPPKGRSFSSLESSLDRSNSLSWYGGESYIQSMEPGAKCFAVRSLGWVEVPEEDLAPGKSSIAVNNCIQQLAQTRSRSQPPDGAWGEGQNMLMILKKDAMSLVNPLDHSLIHCQPLVHIRVWGVGSSKGRDFAFVASDKDSCMLKCHVFCCDVPAKAIASALHGLCAQILSERVEVSGDASCCSPDPISPEDLPRQVELLDAVSQAAQKYEALYMGTLPVTKAMGMDVLNEAIGTLTARGDRNAWVPTMLSVSDSLMTAHPIQAEASTEEEPLWQCPVRLVTFIGVGRDPHTFGLIADLGRQSFQCAAFWCQPHAGGLSEAVQAACMVQYQKCLVASAARGKAWGAQARARLRLKRTSSMDSPGGPLPLPLLKGGVGGAGATPRKRGVFSFLDAFRLKPSLLHMP

SEQ ID NO: 18494 - protein, 491 aa, Homo sapiens
MLGKDYMLAIILVNCDDDLWGDHSLEVEAGLPPGWRKIHDAAGTYYWHVPSGSTQWQRPTWELGDAEDPGTGTEGIWGLRPPKGRSFSSLESSLDRSNSLSWYGGESYIQSMEPGAKCFAVRSLGWVEVPEEDLAPGKSSIAVNNCIQQLAQTRSRSQPPDGAWGEGQNMLMILKKDAMSLVNPLDHSLIHCQPLVHIRVWGVGSSKGRPISAPARDFAFVASDKDSCMLKCHVFCCDVPAKAIASALHGLCAQILSERVEVSGDASCCSPDPISPEDLPRQVELLDAVSQAAQKYEALYMGTLPVTKAMGMDVLNEAIGTLTARGDRNAWVPTMLSVSDSLMTAHPIQAEASTEEEPLWQCPVRLVTFIGVGRDPHTFGLIADLGRQSFQCAAFWCQPHAGGLSEAVQAACMVQYQKCLVASAARGKAWGAQARARLRLKRTSSMDSPGGPLPLPLLKGGVGGAGATPRKRGVFSFLDAFRLKPSLLHMP

SEQ ID NO: 18495 - protein, 493 aa, Homo sapiens
MLGKDYMLAIILVNCDDDLWGDHSLEVEAGLPPGWRKIHDAAGTYYWHVPSGSTQWQRPTWELGDAEDPGTGTEGIWGLRPPKGRSFSSLESSLDRSNSLSWYGGESYIQSMEPGAKCFAVRSLGWVEVPEEDLAPGKSSIAVNNCIQQLAQTRSRSQPPDGAWGEGQNMLMILKKDAMSLVNPLDHSLIHCQPLVHIRVWGVGSSKGRDSPISAPARDFAFVASDKDSCMLKCHVFCCDVPAKAIASALHGLCAQILSERVEVSGDASCCSPDPISPEDLPRQVELLDAVSQAAQKYEALYMGTLPVTKAMGMDVLNEAIGTLTARGDRNAWVPTMLSVSDSLMTAHPIQAEASTEEEPLWQCPVRLVTFIGVGRDPHTFGLIADLGRQSFQCAAFWCQPHAGGLSEAVQAACMVQYQKCLVASAARGKAWGAQARARLRLKRTSSMDSPGGPLPLPLLKGGVGGAGATPRKRGVFSFLDAFRLKPSLLHMP

SEQ ID NO: 18496 - protein, 214 aa, Homo sapiens
MLGKDYMLAIILVNCDDDLWGDHSLEVEAGLPPGWRKIHDAAGTYYWHVPSGSTQWQRPTWELGDAEDPGTGTEGIWGLRPPKGRSFSSLESSLDRSNSLSWYGGESYIQSMEPGAKCFAVRSLGWVEVPEEDLAPGKSSIAVNNCIQQLAQTRSRSQPPDGAWGEGQNMLMILKKDAMSLVNPLDHSLIHCQPLAVIPTDADPQYLNPWTQIL

SEQ ID NO: 18497 - protein, 245 aa, Homo sapiens
MLGKDYMLAIILVNCDDDLWGDHSLEVEAGLPPGWRKIHDAAGTYYWHVPSGSTQWQRPTWELGDAEDPGTGTEGIWGLRPPKGRSFSSLESSLDRSNSLSWYGGESYIQSMEPGAKCFAVRSLGWVEVPEEDLAPGKSSIAVNNCIQQLAQTRSRSQPPDGAWGEGQNMLMILKKDAMSLVNPLDHSLIHCQPLVHIRVWGVGSSKGRSSDVDPGLLPLPGPALVGEGGPSSAGTVWGESERLG

SEQ ID NO: 18498 - protein, 126 aa, Homo sapiens
MAPGEVTITVRLIRSFEHRNFKPVVYHGVNLDQTVKEFIVFLKQDIPLRTNLPPPFRNYKYDALKIIHQAHKSKTNELVLSLEDDERLLLKEDSTLKAAGIASETEIAFFCEEDYKNYKANPISSW

SEQ ID NO: 18499 - protein, 922 aa, Homo sapiens
MHWLASATQTSASIVSSSLLSAVDVSSSLTMSEYFQNTSLPGTANSRQFSLPVVSNAAFLTGSISNFSRASAPAISSAWLQPSASGTSFQPLMGSAYLYQHSSTTMLSGVTGQSHICTSAASYPGVFEWDSTASTVKKSSSLRDFTVTVIDQNTAVSSMSMTAQYYKTSDTNTMVPLYPSLSASLVQGTLTQIPNQQGHNLSLPCQIGSQVYYYNQGTLGPQLSCLQSYGSVSYTGYRASAHQPEMVMVLKEVQPTNVLPPVSTSGMYYSVSSQPITETSVQVMETSLGMDTSLGLQSPSQTFCLPQTPEFSKSFSSRNTQTLESNPSPELGDISITPVQSPTNLLTLSPAPSQEKNENENLDEIKTNLSKPLDVHQILIGNQDPPLLPVEIPDIHPLLACIDPLGQEEQPGSENANLRNKSLSLEDQGIFENGIESSSDLADITTWVEDTYLPPIFSSLQDLDQPESPSAKKAKDTSAIKVNQVQEKSCVIKGHSDQVRKNKHKASEPIQGAPKAKIQPKNPECLLEREVVVGSATVSNSASVNKAKHSSNKPHKAASSRISKTKSHGQEKTKGNRKNSSKKSEESKQSGKKVKVEEKQTIPNMKRKKNQPELSQKTLKKPRSSLGMHMLESVQVFHALGKKIDMKTGFSSSRTLGSSSNTQNRQPFPALKPWLDIQHEGKGPEKIQVKAQKLDGSAEKECTSPSHSELPPPGKVKLIPLPFLTLDQPQARHVSRRPNPLASRRPAVAYPARPDSTNSAQSNAVNPSRPAPTNTSLTGPATPAQPISAKATQPSSANPTQPTVPQSAASRPSAYKTSSCSSLQREPVSTAVTSLRSLPKPQNQFLIQDFSLQPRPWRKPTVPEPVMSTPITEEQRPEREAMKRKAQQERENAAKYTSLGKVQFFIERERDMEIAEYYGYTI

SEQ ID NO: 18500 - protein, 531 aa, Homo sapiens
MAATLDLKSKEEKDAELDKRIEALRRKNEALIRRYQEIEEDRKKAELEGVAVTAPRKGRSVEKENVAVESEKNLGPSRRSPGTPRPPGASKGGRTPPQQGGRAGMGRASRSWEGSPGEQPRGGGAGGRGRRGRGRGSPHLSGAGDTSISDRKSKEWEERRRQNIEKMNEEMEKIAEYERNQREGVLEPNPVRNFLDDPRRRSGPLEESERDRREESRRHGRNWGGPDFERVRCGLEHERQGRRAGLGSAGDMTLSMTGRERSEYLRWKQEREKIDQERLQRHRKPTGQWRREWDAEKTDGMFKDGPVPAHEPSHRYDDQAWARPPKPPTFGEFLSQHKAEASSRRRRKSSRPQAKAAPRAYSDHDDRWETKEGAASPAPETPQPTSPETSPKETPMQPPEIPAPAHRPPEDEGEENEGEEDEEWEDISEDEEEEEIEVEEGDEEEPAQDHQAPEAAPTGIPCSEQAHGVPFSPEEPLLEPQAPGTPSSPFSPPSGHQPVSDWGEEVELNSPRTTHLAGALSPGEAWPFESV

SEQ ID NO: 18501 - protein, 782 aa, Homo sapiens
MFPPSGSTGLIPPSHFQARPLSTLPRMAPTWLSDIPLVQPPGHQDVSERRLDTQRPQVTMWERDVSSDRQEPGRRGRSWGLEGSQALSQQAEVIVRQLQELRRLEEEVRLLRETSLQQKMRLEAQAMELEALARAEKAGRAEAEGLRAALAGAEVVRKNLEEGSQRELEEVQRLHQEQLSSLTQAHEEALSSLTSKAEGLEKSLSSLETRRAGEAKELAEAQREAELLRKQLSKTQEDLEAQVTLVENLRKYVGEQVPSEVHSQTWELERQKLLETMQHLQEDRDSLHATAELLQVRVQSLTHILALQEEELTRKVQPSDSLEPEFTRKCQSLLNRWREKVFALMVQLKAQELEHSDSVKQLKGQVASLQEKVTSQSQEQAILQRSLQDKAAEVEVERMGAKGLQLELSRAQEARRRWQQQTASAEEQLRLVVNAVSSSQIWLETTMAKVEGAAAQLPSLNNRLSYAVRKVHTIRGLIARKLALAQLRQESCPLPPPVTDVSLELQQLREERNRLDAELQLSARLIQQEVGRAREQGEAERQQLSKVAQQLEQELQQTQESLASLGLQLEVARQGQQESTEEAASLRQELTQQQELYGQALQEKVAEVETRLREQLSDTERRLNEARREHAKAVVSLRQIQRRAAQEKERSQELRRLQEEARKEEGQRLARRLQELERDKNLMLATLQQEGLLSRYKQQRLLTVLPSLLDKKKSVVSSPRPPECSASAPVAAAVPTRESIKGSLSVLLDDLQDLSEAISKEEAVCQGDNLDRCSSSNPQMSS

SEQ ID NO: 18502 - protein, 871 aa, Homo sapiens
MWPHSAGARPWASTLTGKDPRVMACWCLDGLPSGLAEPWRELWRWRSRPLHCVPPFSPLARSSRDHRNLRRRGNIDGWRQNLEPSNNVEMFPPSGSTGLIPPSHFQARPLSTLPRMAPTWLSDIPLVQPPGHQDVSERRLDTQRPQVTMWERDVSSDRQEPGRRGRSWGLEGSQALSQQAEVIVRQLQELRRLEEEVRLLRETSLQQKMRLEAQAMELEALARAEKAGRAEAEGLRAALAGAEVVRKNLEEGSQRELEEVQRLHQEQLSSLTQAHEEALSSLTSKAEGLEKSLSSLETRRAGEAKELAEAQREAELLRKQLSKTQEDLEAQVTLVENLRKYVGEQVPSEVHSQTWELERQKLLETMQHLQEDRDSLHATAELLQVRVQSLTHILALQEEELTRKVQPSDSLEPEFTRKCQSLLNRWREKVFALMVQLKAQELEHSDSVKQLKGQVASLQEKVTSQSQEQAILQRSLQDKAAEVEVERMGAKGLQLELSRAQEARRRWQQQTASAEEQLRLVVNAVSSSQIWLETTMAKVEGAAAQLPSLNNRLSYAVRKVHTIRGLIARKLALAQLRQESCPLPPPVTDVSLELQQLREERNRLDAELQLSARLIQQEVGRAREQGEAERQQLSKVAQQLEQELQQTQESLASLGLQLEVARQGQQESTEEAASLRQELTQQQELYGQALQEKVAEVETRLREQLSDTERRLNEARREHAKAVVSLRQIQRRAAQEKERSQELRRLQEEARKEEGQRLARRLQELERDKNLMLATLQQEGLLSRYKQQRLLTVLPSLLDKKKSVVSSPRPPECSASAPVAAAVPTRESIKGSLSVLLDDLQDLSEAISKEEAVCQGDNLDRCSSSNPQMSS

SEQ ID NO: 18503 - protein, 835 aa, Homo sapiens
MWPHSAGARPWASTLTGKDPRVMACWCLDGLPSGLAEPWRELWRWRSRPLHCVPPFSPLARSSRDHRNLRRRGNIDGWRQNLEPSNNVEMFPPSGHQDVSERRLDTQRPQVTMWERDVSSDRQEPGRRGRSWGLEGSQALSQQAEVIVRQLQELRRLEEEVRLLRETSLQQKMRLEAQAMELEALARAEKAGRAEAEGLRAALAGAEVVRKNLEEGSQRELEEVQRLHQEQLSSLTQAHEEALSSLTSKAEGLEKSLSSLETRRAGEAKELAEAQREAELLRKQLSKTQEDLEAQVTLVENLRKYVGEQVPSEVHSQTWELERQKLLETMQHLQEDRDSLHATAELLQVRVQSLTHILALQEEELTRKVQPSDSLEPEFTRKCQSLLNRWREKVFALMVQLKAQELEHSDSVKQLKGQVASLQEKVTSQSQEQAILQRSLQDKAAEVEVERMGAKGLQLELSRAQEARRRWQQQTASAEEQLRLVVNAVSSSQIWLETTMAKVEGAAAQLPSLNNRLSYAVRKVHTIRGLIARKLALAQLRQESCPLPPPVTDVSLELQQLREERNRLDAELQLSARLIQQEVGRAREQGEAERQQLSKVAQQLEQELQQTQESLASLGLQLEVARQGQQESTEEAASLRQELTQQQELYGQALQEKVAEVETRLREQLSDTERRLNEARREHAKAVVSLRQIQRRAAQEKERSQELRRLQEEARKEEGQRLARRLQELERDKNLMLATLQQEGLLSRYKQQRLLTVLPSLLDKKKSVVSSPRPPECSASAPVAAAVPTRESIKGSLSVLLDDLQDLSEAISKEEAVCQGDNLDRCSSSNPQMSS

SEQ ID NO: 18504 - protein, 132 aa, Homo sapiens
MVRRFLVTLRIRRACGPPRVRVFVVHIPRLTGEWAAPGAPAAVALVLMLLRSQRLGQQPLPRRPGHDDGQRPSGGAAAAPRRGAQLRRPRHSHPTRARRCPGGLPGHAGGAAPGRGAAGRARCLGPSARGPG

SEQ ID NO: 18505 - protein, 85 aa, Homo sapiens
MLLRSQRLGQQPLPRRPGHDDGQRPSGGAAAAPRRGAQLRRPRHSHPTRARRCPGGLPGHAGGAAPGRGAAGRARCLGPSARGPG

SEQ ID NO: 18506 - protein, 84 aa, Homo sapiens
MKVKIKCWNGVATWLWVANDENCGICRMAFNGCCPDCKVPGDDCPLVWGQCSHCFHMHCILKWLHAQQVQQHCPMCRQEWKFKE

SEQ ID NO: 18507 - protein, 196 aa, Homo sapiens
MKVKIKCWNGVATWLWVANDENCGICRMAFNGCCPDCPLHGESISRCLGWCPQPVPVLGGRAHPQVPINTASPTPGQHTGSLMSREESSRSPDPTPPALDQETSSLLRCTSPWCLDHSCDLFGITDQVSADGPRACRQGARRRLPAGVGPVLPLLPHALHPQVAARTAGAAALPHVPPGMEVQGVRPDLALAGGAS

SEQ ID NO: 18508 - protein, 229 aa, Homo sapiens
MAPHDPGSLTTLVPWAAALLLALGVERALALPEICTQCPGSVQNLSKVAFYCKTTRELMLHARCCLNQKGTILGLDLQNCSLEDPGPNFHQAHTTVIIDLQANPLKGDLANTFRGFTQLQTLILPQHVNCPGGINAWNTITSYIDNQICQGQKNLCNNTGDPEMCPENGSCVPDGPGLLQCVCADGFHGYKCMRQGSFSLLMFFGILGATTLSVSILLWATQRRKAKTS

SEQ ID NO: 18509 - protein, 171 aa, Homo sapiens
MLHARCCLNQKGTILGLDLQNCSLEDPGPNFHQAHTTVIIDLQANPLKGDLANTFRGFTQLQTLILPQHVNCPGGINAWNTITSYIDNQICQGQKNLCNNTGDPEMCPENGSCVPDGPGLLQCVCADGFHGYKCMRQGSFSLLMFFGILGATTLSVSILLWATQRRKAKTS

SEQ ID NO: 18510 - protein, 284 aa, Homo sapiens
MKTSAELHEQEKPPSSPRATGPGRLGHARGRGPDALRGGAAGPGRASSGAPRERKMAPHDPGSLTTLVPWAAALLLALGVERALALPEICTQCPGSVQNLSKVAFYCKTTRELMLHARCCLNQKGTILGLDLQNCSLEDPGPNFHQAHTTVIIDLQANPLKGDLANTFRGFTQLQTLILPQHVNCPGGINAWNTITSYIDNQICQGQKNLCNNTGDPEMCPENGSCVPDGPGLLQCVCADGFHGYKCMRQGSFSLLMFFGILGATTLSVSILLWATQRRKAKTS

SEQ ID NO: 18511 - protein, 2285 aa, Homo sapiens
MAAQVAPAAASSLGNPPPPPPSELKKAEQQQREEAGGEAAAAAAAERGEMKAAAGQESEGPAVGPPQPLGKELQDGAESNGGGGGGGAGSGGGPGAEPDLKNSNGNAGPRPALNNNLTEPPGGGGGGSSDGVGAPPHSAAAALPPPAYGFGQPYGRSPSAVAAAAAAVFHQQHGGQQSPGLAALQSGGGGGLEPYAGPQQNSHDHGFPNHQYNSYYPNRSAYPPPAPAYALSSPRGGTPGSGAAAAAGSKPPPSSSASASSSSSSFAQQRFGAMGGGGPSAAGGGTPQPTATPTLNQLLTSPSSARGYQGYPGGDYSGGPQDGGAGKGPADMASQCWGAAAAAAAAAAASGGAQQRSHHAPMSPGSSGGGGQPLARTPQPSSPMDQMGKMRPQPYGGTNPYSQQQGPPSGPQQGHGYPGQPYGSQTPQRYPMTMQGRAQSAMGGLSYTQQIPPYGQQGPSGYGQQGQTPYYNQQSPHPQQQQPPYSQQPPSQTPHAQPSYQQQPQSQPPQLQSSQPPYSQQPSQPPHQQSPAPYPSQQSTTQQHPQSQPPYSQPQAQSPYQQQQPQQPAPSTLSQQAAYPQPQSQQSQQTAYSQQRFPPPQELSQDSFGSQASSAPSMTSSKGGQEDMNLSLQSRPSSLPDLSGSIDDLPMGTEGALSPGVSTSGISSSQGEQSNPAQSPFSPHTSPHLPGIRGPSPSPVGSPASVAQSRSGPLSPAAVPGNQMPPRPPSGQSDSIMHPSMNQSSIAQDRGYMQRNPQMPQYSSPQPGSALSPRQPSGGQIHTGMGSYQQNSMGSYGPQGGQYGPQGGYPRQPNYNALPNANYPSAGMAGGINPMGAGGQMHGQPGIPPYGTLPPGRMSHASMGNRPYGPNMANMPPQVGSGMCPPPGGMNRKTQETAVAMHVAANSIQNRPPGYPNMNQGGMMGTGPPYGQGINSMAGMINPQGPPYSMGGTMANNSAGMAASPEMMGLGDVKLTPATKMNNKADGTPKTESKSKKSSSSTTTNEKITKLYELGGEPERKMWVDRYLAFTEEKAMGMTNLPAVGRKPLDLYRLYVSVKEIGGLTQVNKNKKWRELATNLNVGTSSSAASSLKKQYIQCLYAFECKIERGEDPPPDIFAAADSKKSQPKIQPPSPAGSGSMQGPQTPQSTSSSMAEGGDLKPPTPASTPHSQIPPLPGMSRSNSVGIQDAFNDGSDSTFQKRNSMTPNPGYQPSMNTSDMMGRMSYEPNKDPYGSMRKAPGSDPFMSSGQGPNGGMGDPYSRAAGPGLGNVAMGPRQHYPYGGPYDRVRTEPGIGPEGNMSTGAPQPNLMPSNPDSGMYSPSRYPPQQQQQQQQRHDSYGNQFSTQGTPSGSPFPSQQTTMYQQQQQNYKRPMDGTYGPPAKRHEGEMYSVPYSTGQGQPQQQQLPPAQPQPASQQQAAQPSPQQDVYNQYGNAYPATATAATERRPAGGPQNQFPFQFGRDRVSAPPGTNAQQNMPPQMMGGPIQASAEVAQQGTMWQGRNDMTYNYANRQSTGSAPQGPAYHGVNRTDEMLHTDQRANHEGSWPSHGTRQPPYGPSAPVPPMTRPPPSNYQPPPSMQNHIPQVSSPAPLPRPMENRTSPSKSPFLHSGMKMQKAGPPVPASHIAPAPVQPPMIRRDITFPPGSVEATQPVLKQRRRLTMKDIGTPEAWRVMMSLKSGLLAESTWALDTINILLYDDNSIMTFNLSQLPGLLELLVEYFRRCLIEIFGILKEYEVGDPGQRTLLDPGRFSKVSSPAPMEGGEEEEELLGPKLEEEEEEEVVENDEEIAFSGKDKPASENSEEKLISKFDKLPVKIVQKNDPFVVDCSDKLGRVQEFDSGLLHWRIGGGDTTEHIQTHFESKTELLPSRPHAPCPPAPRKHVTTAEGTPGTTDQEGPPPDGPPEKRITATMDDMLSTRSSTLTEDGAKSSEAIKESSKFPFGISPAQSHRNIKILEDEPHSKDETPLCTLLDWQDSLAKRCVCVSNTIRSLSFVPGNDFEMSKHPGLLLILGKLILLHHKHPERKQAPLTYEKEEEQDQGVSCNKVEWWWDCLEMLRENTLVTLANISGQLDLSPYPESICLPVLDGLLHWAVCPSAEAQDPFSTLGPNAVLSPQRLVLETLSKLSIQDNNVDLILATPPFSRLEKLYSTMVRFLSDRKNPVCREMAVVLLANLAQGDSLAARAIAVQKGSIGNLLGFLEDSLAATQFQQSQASLLHMQNPPFEPTSVDMMRRAARALLALAKVDENHSEFTLYESRLLDISVSPLMNSLVSQVICDVLFLIGQS

SEQ ID NO: 18512 - protein, 2068 aa, Homo sapiens
MAAQVAPAAASSLGNPPPPPPSELKKAEQQQREEAGGEAAAAAAAERGEMKAAAGQESEGPAVGPPQPLGKELQDGAESNGGGGGGGAGSGGGPGAEPDLKNSNGNAGPRPALNNNLTEPPGGGGGGSSDGVGAPPHSAAAALPPPAYGFGQPYGRSPSAVAAAAAAVFHQQHGGQQSPGLAALQSGGGGGLEPYAGPQQNSHDHGFPNHQYNSYYPNRSAYPPPAPAYALSSPRGGTPGSGAAAAAGSKPPPSSSASASSSSSSFAQQRFGAMGGGGPSAAGGGTPQPTATPTLNQLLTSPSSARGYQGYPGGDYSGGPQDGGAGKGPADMASQCWGAAAAAAAAAAASGGAQQRSHHAPMSPGSSGGGGQPLARTPQPSSPMDQMGKMRPQPYGGTNPYSQQQGPPSGPQQGHGYPGQPYGSQTPQRYPMTMQGRAQSAMGGLSYTQQIPPYGQQGPSGYGQQGQTPYYNQQSPHPQQQQPPYSQQPPSQTPHAQPSYQQQPQSQPPQLQSSQPPYSQQPSQPPHQQSPAPYPSQQSTTQQHPQSQPPYSQPQAQSPYQQQQPQQPAPSTLSQQAAYPQPQSQQSQQTAYSQQRFPPPQELSQDSFGSQASSAPSMTSSKGGQEDMNLSLQSRPSSLPDLSGSIDDLPMGTEGALSPGVSTSGISSSQGEQSNPAQSPFSPHTSPHLPGIRGPSPSPVGSPASVAQSRSGPLSPAAVPGNQMPPRPPSGQSDSIMHPSMNQSSIAQDRGYMQRNPQMPQYSSPQPGSALSPRQPSGGQIHTGMGSYQQNSMGSYGPQGGQYGPQGGYPRQPNYNALPNANYPSAGMAGGINPMGAGGQMHGQPGIPPYGTLPPGRMSHASMGNRPYGPNMANMPPQVGSGMCPPPGGMNRKTQETAVAMHVAANSIQNRPPGYPNMNQGGMMGTGPPYGQGINSMAGMINPQGPPYSMGGTMANNSAGMAASPEMMGLGDVKLTPATKMNNKADGTPKTESKSKKSSSSTTTNEKITKLYELGGEPERKMWVDRYLAFTEEKAMGMTNLPAVGRKPLDLYRLYVSVKEIGGLTQVNKNKKWRELATNLNVGTSSSAASSLKKQYIQCLYAFECKIERGEDPPPDIFAAADSKKSQPKIQPPSPAGSGSMQGPQTPQSTSSSMAEGGDLKPPTPASTPHSQIPPLPGMSRSNSVGIQDAFNDGSDSTFQKRNSMTPNPGYQPSMNTSDMMGRMSYEPNKDPYGSMRKAPGSDPFMSSGQGPNGGMGDPYSRAAGPGLGNVAMGPRQHYPYGGPYDRVRTEPGIGPEGNMSTGAPQPNLMPSNPDSGMYSPSRYPPQQQQQQQQRHDSYGNQFSTQGTPSGSPFPSQQTTMYQQQQQVSSPAPLPRPMENRTSPSKSPFLHSGMKMQKAGPPVPASHIAPAPVQPPMIRRDITFPPGSVEATQPVLKQRRRLTMKDIGTPEAWRVMMSLKSGLLAESTWALDTINILLYDDNSIMTFNLSQLPGLLELLVEYFRRCLIEIFGILKEYEVGDPGQRTLLDPGRFSKVSSPAPMEGGEEEEELLGPKLEEEEEEEVVENDEEIAFSGKDKPASENSEEKLISKFDKLPVKIVQKNDPFVVDCSDKLGRVQEFDSGLLHWRIGGGDTTEHIQTHFESKTELLPSRPHAPCPPAPRKHVTTAEGTPGTTDQEGPPPDGPPEKRITATMDDMLSTRSSTLTEDGAKSSEAIKESSKFPFGISPAQSHRNIKILEDEPHSKDETPLCTLLDWQDSLAKRCVCVSNTIRSLSFVPGNDFEMSKHPGLLLILGKLILLHHKHPERKQAPLTYEKEEEQDQGVSCNKVEWWWDCLEMLRENTLVTLANISGQLDLSPYPESICLPVLDGLLHWAVCPSAEAQDPFSTLGPNAVLSPQRLVLETLSKLSIQDNNVDLILATPPFSRLEKLYSTMVRFLSDRKNPVCREMAVVLLANLAQGDSLAARAIAVQKGSIGNLLGFLEDSLAATQFQQSQASLLHMQNPPFEPTSVDMMRRAARALLALAKVDENHSEFTLYESRLLDISVSPLMNSLVSQVICDVLFLIGQS

SEQ ID NO: 18513 - protein, 1902 aa, Homo sapiens
MDQMGKMRPQPYGGTNPYSQQQGPPSGPQQGHGYPGQPYGSQTPQRYPMTMQGRAQSAMGGLSYTQQIPPYGQQGPSGYGQQGQTPYYNQQSPHPQQQQPPYSQQPPSQTPHAQPSYQQQPQSQPPQLQSSQPPYSQQPSQPPHQQSPAPYPSQQSTTQQHPQSQPPYSQPQAQSPYQQQQPQQPAPSTLSQQAAYPQPQSQQSQQTAYSQQRFPPPQELSQDSFGSQASSAPSMTSSKGGQEDMNLSLQSRPSSLPDLSGSIDDLPMGTEGALSPGVSTSGISSSQGEQSNPAQSPFSPHTSPHLPGIRGPSPSPVGSPASVAQSRSGPLSPAAVPGNQMPPRPPSGQSDSIMHPSMNQSSIAQDRGYMQRNPQMPQYSSPQPGSALSPRQPSGGQIHTGMGSYQQNSMGSYGPQGGQYGPQGGYPRQPNYNALPNANYPSAGMAGGINPMGAGGQMHGQPGIPPYGTLPPGRMSHASMGNRPYGPNMANMPPQVGSGMCPPPGGMNRKTQETAVAMHVAANSIQNRPPGYPNMNQGGMMGTGPPYGQGINSMAGMINPQGPPYSMGGTMANNSAGMAASPEMMGLGDVKLTPATKMNNKADGTPKTESKSKKSSSSTTTNEKITKLYELGGEPERKMWVDRYLAFTEEKAMGMTNLPAVGRKPLDLYRLYVSVKEIGGLTQVNKNKKWRELATNLNVGTSSSAASSLKKQYIQCLYAFECKIERGEDPPPDIFAAADSKKSQPKIQPPSPAGSGSMQGPQTPQSTSSSMAEGGDLKPPTPASTPHSQIPPLPGMSRSNSVGIQDAFNDGSDSTFQKRNSMTPNPGYQPSMNTSDMMGRMSYEPNKDPYGSMRKAPGSDPFMSSGQGPNGGMGDPYSRAAGPGLGNVAMGPRQHYPYGGPYDRVRTEPGIGPEGNMSTGAPQPNLMPSNPDSGMYSPSRYPPQQQQQQQQRHDSYGNQFSTQGTPSGSPFPSQQTTMYQQQQQNYKRPMDGTYGPPAKRHEGEMYSVPYSTGQGQPQQQQLPPAQPQPASQQQAAQPSPQQDVYNQYGNAYPATATAATERRPAGGPQNQFPFQFGRDRVSAPPGTNAQQNMPPQMMGGPIQASAEVAQQGTMWQGRNDMTYNYANRQSTGSAPQGPAYHGVNRTDEMLHTDQRANHEGSWPSHGTRQPPYGPSAPVPPMTRPPPSNYQPPPSMQNHIPQVSSPAPLPRPMENRTSPSKSPFLHSGMKMQKAGPPVPASHIAPAPVQPPMIRRDITFPPGSVEATQPVLKQRRRLTMKDIGTPEAWRVMMSLKSGLLAESTWALDTINILLYDDNSIMTFNLSQLPGLLELLVEYFRRCLIEIFGILKEYEVGDPGQRTLLDPGRFSKVSSPAPMEGGEEEEELLGPKLEEEEEEEVVENDEEIAFSGKDKPASENSEEKLISKFDKLPVKIVQKNDPFVVDCSDKLGRVQEFDSGLLHWRIGGGDTTEHIQTHFESKTELLPSRPHAPCPPAPRKHVTTAEGTPGTTDQEGPPPDGPPEKRITATMDDMLSTRSSTLTEDGAKSSEAIKESSKFPFGISPAQSHRNIKILEDEPHSKDETPLCTLLDWQDSLAKRCVCVSNTIRSLSFVPGNDFEMSKHPGLLLILGKLILLHHKHPERKQAPLTYEKEEEQDQGVSCNKVEWWWDCLEMLRENTLVTLANISGQLDLSPYPESICLPVLDGLLHWAVCPSAEAQDPFSTLGPNAVLSPQRLVLETLSKLSIQDNNVDLILATPPFSRLEKLYSTMVRFLSDRKNPVCREMAVVLLANLAQGDSLAARAIAVQKGSIGNLLGFLEDSLAATQFQQSQASLLHMQNPPFEPTSVDMMRRAARALLALAKVDENHSEFTLYESRLLDISVSPLMNSLVSQVICDVLFLIGQS

SEQ ID NO: 18514 - protein, 1705 aa, Homo sapiens
MELSCSEAPLYGQMMIYAKFDKNVYLPEDAEFYFTYDGSHQRHVMIAERIEDNVLQSSVPGHGLQETVTVSVCLCSEGYSPVTMGSGSVTYVDNMACRLARLLVTQANRLTACSHQTLLTPFALTAGALPALDEELVLALTHLELPLEWTVLGSSSLEVSSHRESLLHLAMRWGLAKLSQFFLCLPGGVQALALPNEEGATPLDLALREGHSKLVEDVTNFQGRWSPSFSRVQLSEEASLHYIHSSETLTLTLNHTAEHLLEADIKLFRKYFWDRAFLVKAFEPEARPEERTAMPSSGAETEEEIKNSVSSRSAAEKEDIKRVKSLVVQHNEHEDQHSLDLDRSFDILKKSKPPSTLLAAGRLSDMLNGGDEVYANCMVIDQVGDLDISYINIEGITATTSPESRGCTLWPQSSKHTLPTETSPSVYPLSENVEGTAHTEAQQSFMSPSSSCASNLNLSFGWHGFEKEQSHLKKRSSSLDALDADSEGEGHSEPSHICYTPGSQSSSRTGIPSGDELDSFETNTEPDFNISRAESLPLSSNLQSKESLLSGVRSRSYSCSSPKISLGKTRLVRELTVCSSSEEQRAYSLSEPPRENRIQEEEWDKYIIPAKSESEKYKVSRTFSFLMNRMTSPRNKSKTKSKDAKDKEKLNRHQFAPGTFSGVLQCLVCDKTLLGKESLQCSNCNANVHKGCKDAAPACTKKFQEKYNKNKPQTILGNSSFRDIPQPGLSLHPSSSVPVGLPTGRRETVGQVHPLSRSVPGTTLESFRRSATSLESESDHNSCRSRSHSDELLQSMGSSPSTESFIMEDVVDSSLWSDLSSDAQEFEAESWSLVVDPSFCNRQEKDVIKRQDVIFELMQTEMHHIQTLFIMSEIFRKGMKEELQLDHSTVDKIFPCLDELLEIHRHFFYSMKERRQESCAGSDRNFVIDRIGDILVQQFSEENASKMKKIYGEFCCHHKEAVNLFKELQQNKKFQNFIKLRNSNLLARRRGIPECILLVTQRITKYPVLVERILQYTKERTEEHKDLRKALCLIKDMIATVDLKVNEYEKNQKWLEILNKIENKTYTKLKNGHVFRKQALMSEERTLLYDGLVYWKTATGRFKDILALLLTDVLLFLQEKDQKYIFAAVDQKPSVISLQKLIAREVANEERGMFLISASSAGPEMYEIHTNSKEERNNWMRRIQQAVESCPEEKGGRTSESDEDKRKAEARVAKIQQCQEILTNQDQQICAYLEEKLHIYAELGELSGFEDVHLEPHLLIKPDPGEPPQAASLLAAALKEAESLQVAVKASQMGAVSQSCEDSCGDSVLADTLSSHDVPGSPTASLVTGGREGRGCSDVDPGIQGVVTDLAVSDAGEKVECRNFPGSSQSEIIQAIQNLTRLLYSLQAALTIQDSHIEIHRLVLQQQEGLSLGHSILRGGPLQDQKSRDADRQHEELANVHQLQHQLQQEQRRWLRRCEQQQRAQATRESWLQERERECQSQEELLLRSRGELDLQLQEYQHSLERLREGQRLVEREQARMRAQQSLLGHWKHGRQRSLPAVLLPGGPEVMELNRSESLCHENSFFINEALVQMSFNTFNKLNPSVIHQDATYPTTQSHSDLVRTSEHQVDLKVDPSQPSNVSHKLWTAAGSGHQILPFHESSKDSCKNDLDTSHTESPTPHDSNSHRPQLQAFITEAKLNLPTRTMTRQDGETGDGAKENIVYL

SEQ ID NO: 18515 - protein, 602 aa, Homo sapiens
MELSCSEAPLYGQMMIYAKFDKNVYLPEDAEFYFTYDGSHQRHVMIAERIEDNVLQSSVPGHGLQETVTVSVCLCSEGYSPVTMGSGSVTYVDNMACRLARLLVTQANRLTACSHQTLLTPFALTAGALPALDEELVLALTHLELPLEWTVLGSSSLEVSSHRESLLHLAMRWGLAKLSQFFLCLPGGVQALALPNEEGATPLDLALREGHSKLVEDVTNFQGRWSPSFSRVQLSEEASLHYIHSSETLTLTLNHTAEHLLEADIKLFRKYFWDRAFLVKAFEPEARPEERTAMPSSGAETEEEIKNSVSSRSAAEKEDIKRVKSLVVQHNEHEDQHSLDLDRSFDILKKSKPPSTLLAAGRLSDMLNGGDEVYANCMVIDQVGDLDISYINIEGITATTSPESRGCTLWPQSSKHTLPTETSPSVYPLSENVEGTAHTEAQQSFMSPSSSCASNLNLSFGWHGFEKEQSHLKKRSSSLDALDADSEGEGHSEPSHICYTPGSQSSSRTGIPSGDELDSFETNTEPDFNISRAESLPLSSNLQSKESLLSGVRSRSYSCSSPKISLGKTRLVRELTVCSSSEGKHHLTFGFENTLFQNRFFS

SEQ ID NO: 18516 - protein, 1687 aa, Homo sapiens
MELSCSEAPLYGQMMIYAKFDKNVYLPEDAEFYFTYDGSHQRHVMIAERIEDNVLQSSVPGHGLQETVTVSVCLCSEGYSPVTMGSGSVTYVDNMACRLARLLVTQANRLTACSHQTLLTPFALTAGALPALDEELVLALTHLELPLEWTVLGSSSLEVSSHRESLLHLAMRWGLAKLSQFFLCLPGGVQALALPNEEGATPLDLALREGHSKLVEDVTNFQGRWSPSFSRVQLSEEASLHYIHSSETLTLTLNHTAEHLLEADIKLFRKYFWDRAFLVKAFEPEARPEERTAMPSSGAETEEEIKNSVSSRSAAEKEDIKRVKSLVVQHNEHEDQHSLDLDRSFDILKKSKPPSTLLAAGRLSDMLNGGDEVYANCMVIDQVGDLDISYINIEGITATTSPESRGCTLWPQSSKHTLPTETSPSVYPLSENVEGTAHTEAQQSFMSPSSSCASNLNLSFGWHGFEKEQSHLKKRSSSLDALDADSEGEGHSEPSHICYTPGSQSSSRTGIPSGDELDSFETNTEPDFNISRAESLPLSSNLQSKESLLSGVRSRSYSCSSPKISLGKTRLVRELTVCSSSEEQRAYSLSEPPRENRIQEEEWDKYIIPAKSESEKYKVSRTFSFLMNRMTSPRNKSKTKSKDAKDKEKLNRHQFAPGTFSGVLQCLVCDKTLLGKESLQCSNCNANVHKGCKDAAPACTKKFQEKYNKNKPQTILGNSSFRDIPQPGLSLHPSSSVPVGLPTGRRETVGQVHPLSRSVPGTTLESFRRSATSLESESDHNSCRSRSHSDELLQSMGSSPSTESFIMEDVVDSSLWSDLSSDAQEFEAESWSLVVDPSFCNRQEKDVIKRQDVIFELMQTEMHHIQTLFIMSEIFRKGMKEELQLDHSTVDKIFPCLDELLEIHRHFFYSMKERRQESCAGSDRNFVIDRIGDILVQQFSEENASKMKKIYGEFCCHHKEAVNLFKELQQNKKFQNFIKLRNSNLLARRRGIPECILLVTQRITKYPVLVERILQYTKERTEEHKDLRKALCLIKDMIATVDLKVNEYEKNQKWLEILNKIENKTYTKLKNGHVFRKQALMSEERTLLYDGLVYWKTATGRFKDILALLLTDVLLFLQEKDQKYIFAAVDQKPSVISLQKLIAREVANEERGMFLISASSAGPEMYEIHTNSKEERNNWMRRIQQAVESCPEEKGGRTSESDEDKRKAEARVAKIQQCQEILTNQDQQICAYLEEKLHIYAELGELSGFEDVHLEPHLLIKPDPGEPPQAASLLAAALKEALVTGGREGRGCSDVDPGIQGVVTDLAVSDAGEKVECRNFPGSSQSEIIQAIQNLTRLLYSLQAALTIQDSHIEIHRLVLQQQEGLSLGHSILRGGPLQDQKSRDADRQHEELANVHQLQHQLQQEQRRWLRRCEQQQRAQATRESWLQERERECQSQEELLLRSRGELDLQLQEYQHSLERLREGQRLVEREQARMRAQQSLLGHWKHGRQRSLPAVLLPGGPEVMELNRSESLCHENSFFINEALVQMSFNTFNKLNPSVIHQDATYPTTQSHSDLVRTSEHQVDLKVDPSQPSNVSHKLWTAAGSGHQILPFHESSKDSCKNGSSMTKCSCTLTSPPGLWTGTTSTLKDLDTSHTESPTPHDSNSHRPQLQAFITEAKLNLPTRTMTRQDGETGDGAKENIVYL

SEQ ID NO: 18517 - protein, 1651 aa, Homo sapiens
MELSCSEAPLYGQMMIYAKFDKNVYLPEDAEFYFTYDGSHQRHVMIAERIEDNVLQSSVPGHGLQETVTVSVCLCSEGYSPVTMGSGSVTYVDNMACRLARLLVTQANRLTACSHQTLLTPFALTAGALPALDEELVLALTHLELPLEWTVLGSSSLEVSSHRESLLHLAMRWGLAKLSQFFLCLPGGVQALALPNEEGATPLDLALREGHSKLVEDVTNFQGRWSPSFSRVQLSEEASLHYIHSSETLTLTLNHTAEHLLEADIKLFRKYFWDRAFLVKAFEPEARPEERTAMPSSGAETEEEIKNSVSSRSAAEKEDIKRVKSLVVQHNEHEDQHSLDLDRSFDILKKSKPPSTLLAAGRLSDMLNGGDEVYANCMVIDQVGDLDISYINIEGITATTSPESRGCTLWPQSSKHTLPTETSPSVYPLSENVEGTAHTEAQQSFMSPSSSCASNLNLSFGWHGFEKEQSHLKKRSSSLDALDADSEGEGHSEPSHICYTPGSQSSSRTGIPSGDELDSFETNTEPDFNISRAESLPLSSNLQSKESLLSGVRSRSYSCSSPKISLGKTRLVRELTVCSSSEEQRAYSLSEPPRENRIQEEEWDKYIIPAKSESEKYKVSRTFSFLMNRMTSPRNKSKTKSKDAKDKEKLNRHQFAPGTFSGVLQCLVCDKTLLGKESLQCSNCNANVHKGCKDAAPACTKKFQEKYNKNKPQTILGNSSFRDIPQPGLSLHPSSSVPVGLPTGRRETVGQVHPLSRSVPGTTLESFRRSATSLESESDHNSCRSRSHSDELLQSMGSSPSTESFIMEDVVDSSLWSDLSSDAQEFEAESWSLVVDPSFCNRQEKDVIKRQDVIFELMQTEMHHIQTLFIMSEIFRKGMKEELQLDHSTVDKIFPCLDELLEIHRHFFYSMKERRQESCAGSDRNFVIDRIGDILVQQFSEENASKMKKIYGEFCCHHKEAVNLFKELQQNKKFQNFIKLRNSNLLARRRGIPECILLVTQRITKYPVLVERILQYTKERTEEHKDLRKALCLIKDMIATVDLKVNEYEKNQKWLEILNKIENKTYTKLKNGHVFRKQALMSEERTLLYDGLVYWKTATGRFKDILALLLTDVLLFLQEKDQKYIFAAVDQKPSVISLQKLIAREVANEERGMFLISASSAGPEMYEIHTNSKEERNNWMRRIQQAVESCPEEKGGRTSESDEDKRKAEARVAKIQQCQEILTNQDQQICAYLEEKLHIYAELGELSGFEDVHLEPHLLIKPDPGEPPQAASLLAAALKEAESLQVAVKASQMGAVSQSCEDSCGDSVLADTLSSHDVPGSPTASLVTGGREGRGCSDVDPGIQGVVTDLAVSDAGEKVECRNFPGSSQSEIIQAIQNLTRLLYSLQAALTIQDSHIEIHRLVLQQQEGLSLGHSILRGGPLQDQKSRDADRQHEELANVHQLQHQLQQEQRRWLRRCEQQQRAQATRESWLQERERECQSQEELLLRSRGELDLQLQEYQHSLERLREGQRLVEREQARMRAQQSLLGHWKHGRQRSLPAVLLPGGPEVMELNRSESLCHENSFFINEALVQMSFNTFNKLNPSVIHQDATYPTTQSHSDLVRTSEHQVDLKVDPSQPSNVSHKLWTAAGSGHQILPFHESSKDSCKNGN

SEQ ID NO: 18518 - protein, 1392 aa, Homo sapiens
MDSDSDSPFNYSWPSFPKMKIRRRTSKQDRSFDILKKSKPPSTLLAAGRLSDMLNGGDEVYANCMVIDQVGDLDISYINIEGITATTSPESRGCTLWPQSSKHTLPTETSPSVYPLSENVEGTAHTEAQQSFMSPSSSCASNLNLSFGWHGFEKEQSHLKKRSSSLDALDADSEGEGHSEPSHICYTPGSQSSSRTGIPSGDELDSFETNTEPDFNISRAESLPLSSNLQSKESLLSGVRSRSYSCSSPKISLGKTRLVRELTVCSSSEEQRAYSLSEPPRENRIQEEEWDKYIIPAKSESEKYKVSRTFSFLMNRMTSPRNKSKTKSKDAKDKEKLNRHQFAPGTFSGVLQCLVCDKTLLGKESLQCSNCNANVHKGCKDAAPACTKKFQEKYNKNKPQTILGNSSFRDIPQPGLSLHPSSSVPVGLPTGRRETVGQVHPLSRSVPGTTLESFRRSATSLESESDHNSCRSRSHSDELLQSMGSSPSTESFIMEDVVDSSLWSDLSSDAQEFEAESWSLVVDPSFCNRQEKDVIKRQDVIFELMQTEMHHIQTLFIMSEIFRKGMKEELQLDHSTVDKIFPCLDELLEIHRHFFYSMKERRQESCAGSDRNFVIDRIGDILVQQFSEENASKMKKIYGEFCCHHKEAVNLFKELQQNKKFQNFIKLRNSNLLARRRGIPECILLVTQRITKYPVLVERILQYTKERTEEHKDLRKALCLIKDMIATVDLKVNEYEKNQKWLEILNKIENKTYTKLKNGHVFRKQALMSEERTLLYDGLVYWKTATGRFKDILALLLTDVLLFLQEKDQKYIFAAVDQKPSVISLQKLIAREVANEERGMFLISASSAGPEMYEIHTNSKEERNNWMRRIQQAVESCPEEKGGRTSESDEDKRKAEARVAKIQQCQEILTNQDQQICAYLEEKLHIYAELGELSGFEDVHLEPHLLIKPDPGEPPQAASLLAAALKEAESLQVAVKASQMGAVSQSCEDSCGDSVLADTLSSHDVPGSPTASLVTGGREGRGCSDVDPGIQGVVTDLAVSDAGEKVECRNFPGSSQSEIIQAIQNLTRLLYSLQAALTIQDSHIEIHRLVLQQQEGLSLGHSILRGGPLQDQKSRDADRQHEELANVHQLQHQLQQEQRRWLRRCEQQQRAQATRESWLQERERECQSQEELLLRSRGELDLQLQEYQHSLERLREGQRLVEREQARMRAQQSLLGHWKHGRQRSLPAVLLPGGPEVMELNRSESLCHENSFFINEALVQMSFNTFNKLNPSVIHQDATYPTTQSHSDLVRTSEHQVDLKVDPSQPSNVSHKLWTAAGSGHQILPFHESSKDSCKNDLDTSHTESPTPHDSNSHRPQLQAFITEAKLNLPTRTMTRQDGETGDGAKENIVYL

SEQ ID NO: 18519 - protein, 1731 aa, Homo sapiens
MELSCSEAPLYGQMMIYAKFDKNVYLPEDAEFYFTYDGSHQRHVMIAERIEDNVLQSSVPGHGLQETVTVSVCLCSEGYSPVTMGSGSVTYVDNMACRLARLLVTQANRLTACSHQTLLTPFALTAGALPALDEELVLALTHLELPLEWTVLGSSSLEVSSHRESLLHLAMRWGLAKLSQFFLCLPGGVQALALPNEEGATPLDLALREGHSKLVEDVTNFQGRWSPSFSRVQLSEEASLHYIHSSETLTLTLNHTAEHLLEADIKLFRKYFWDRAFLVKAFEPEARPEERTAMPSSGAETEEEIKNSVSSRSAAEKEDIKRVKSLVVQHNEHEDQHSLDLDRSFDILKKSKPPSTLLAAGRLSDMLNGGDEVYANCMVIDQVGDLDISYINIEGITATTSPESRGCTLWPQSSKHTLPTETSPSVYPLSENVEGTAHTEAQQSFMSPSSSCASNLNLSFGWHGFEKEQSHLKKRSSSLDALDADSEGEGHSEPSHICYTPGSQSSSRTGIPSGDELDSFETNTEPDFNISRAESLPLSSNLQSKESLLSGVRSRSYSCSSPKISLGKTRLVRELTVCSSSEEQRAYSLSEPPRENRIQEEEWDKYIIPAKSESEKYKVSRTFSFLMNRMTSPRNKSKTKSKDAKDKEKLNRHQFAPGTFSGVLQCLVCDKTLLGKESLQCSNCNANVHKGCKDAAPACTKKFQEKYNKNKPQTILGNSSFRDIPQPGLSLHPSSSVPVGLPTGRRETVGQVHPLSRSVPGTTLESFRRSATSLESESDHNSCRSRSHSDELLQSMGSSPSTESFIMEDVVDSSLWSDLSSDAQEFEAESWSLVVDPSFCNRQEKDVIKRQDVIFELMQTEMHHIQTLFIMSEIFRKGMKEELQLDHSTVDKIFPCLDELLEIHRHFFYSMKERRQESCAGSDRNFVIDRIGDILVQQFSEENASKMKKIYGEFCCHHKEAVNLFKELQQNKKFQNFIKLRNSNLLARRRGIPECILLVTQRITKYPVLVERILQYTKERTEEHKDLRKALCLIKDMIATVDLKVNEYEKNQKWLEILNKIENKTYTKLKNGHVFRKQALMSEERTLLYDGLVYWKTATGRFKDILALLLTDVLLFLQEKDQKYIFAAVDQKPSVISLQKLIAREVANEERGMFLISASSAGPEMYEIHTNSKEERNNWMRRIQQAVESCPEEKGGRTSESDEDKRKAEARVAKIQQCQEILTNQDQQICAYLEEKLHIYAELGELSGFEDVHLEPHLLIKPDPGEPPQAASLLAAALKEAESLQVAVKASQMGAVSQSCEDSCGDSVLADTLSSHDVPGSPTASLVTGGREGRGCSDVDPGIQGVVTDLAVSDAGEKVECRNFPGSSQSEIIQAIQNLTRLLYSLQAALTIQDSHIEIHRLVLQQQEGLSLGHSILRGGPLQDQKSRDADRQHEELANVHQLQHQLQQEQRRWLRRCEQQQRAQATRESWLQERERECQSQEELLLRSRGELDLQLQEYQHSLERLREGQRLVEREQARMRAQQSLLGHWKHGRQRSLPAVLLPGGPEVMELNRSESLCHENSFFINEALVQMSFNTFNKLNPSVIHQDATYPTTQSHSDLVRTSEHQVDLKVDPSQPSNVSHKLWTAAGSGHQILPFHESSKDSCKNGSSMTKCSCTLTSPPGLWTGTTSTLKDLDTSHTESPTPHDSNSHRPQLQAFITEAKLNLPTRTMTRQDGETGDGAKENIVYL

SEQ ID NO: 18520 - protein, 74 aa, Homo sapiens
MDSEVQRDGRILDLIDDAWREDKLPYEDVAIPLNELPEPEQDNGGTTESVKEQEMKWTDLALQYLHENVPPIGN

SEQ ID NO: 18521 - protein, 121 aa, Homo sapiens
MSTLFPSLFPRVTETLWFNLDRPCVEETELQQQEQQHQAWLQSIAEKDNNLVPIGKPASEHYDDEEEEDDEDDEDSEEDSEDDEDMQDMDEMNDYNESPDDGEVNEVDMEGNEQDQDQWMI

SEQ ID NO: 18522 - protein, 125 aa, Homo sapiens
MSTLFPSLFPRVTETLWFNLDRPCVEETELQQQEQQHQAWLQSIAEKDNNLVPIGKPASEHYDDEEEEDDEDDEDSEEDSEDDEDMQDMDEMNDYNESPDDGEVNEPPLQVDMEGNEQDQDQWMI

SEQ ID NO: 18523 - protein, 226 aa, Homo sapiens
MSFAESGWRSALRRRGPGTPGPVARPSYSSFTQGDSWGEGEVDEEEGCDQVARDLRAEFSAGAWSEPRKRSVLPPDGNGSPVLPDKRNGIFPAAAGSRAQPRRWPVQVLSILCSLLFAILLAFLLAIAYLIVKELHAENLKNEDDVDTGLLGFWTLLIISLTAGFSCCSFSWTVTYFDSFEPGMFPPTPLSPARFKKLTGHSFHMGYSMAILNGIVAALTVAWCLM

SEQ ID NO: 18524 - protein, 115 aa, Homo sapiens
MNSGVCLCVLMAVLAAGALTQPVPPADPAGSGLQRAEEAPRRQLRVSQRTDGESRAHLGALLARYIQQARKAPSGRMSIVKNLQNLDPSHRISDRDYMGWMDFGRRSAEEYEYPS

SEQ ID NO: 18525 - protein, 886 aa, Homo sapiens
MELRCGGLLFSSRFDSGNLAHVEKVESLSSDGEGVGGGASALTSGIASSPDYEFNVWTRPDCAETEFENGNRSWFYFSVRGGMPGKLIKINIMNMNKQSKLYSQGMAPFVRTLPTRPRWERIRDRPTFEMTETQFVLSFVHRFVEGRGATTFFAFCYPFSYSDCQELLNQLDQRFPENHPTHSSPLDTIYYHRELLCYSLDGLRVDLLTITSCHGLREDREPRLEQLFPDTSTPRPFRFAGKRIFFLSSRVHPGETPSSFVFNGFLDFILRPDDPRAQTLRRLFVFKLIPMLNPDGVVRGHYRTDSRGVNLNRQYLKPDAVLHPAIYGAKAVLLYHHVHSRLNSQSSSEHQPSSCLPPDAPVSDLEKANNLQNEAQCGHSADRHNAEAWKQTEPAEQKLNSVWIMPQQSAGLEESAPDTIPPKESGVAYYVDLHGHASKRGCFMYGNSFSDESTQVENMLYPKLISLNSAHFDFQGCNFSEKNMYARDRRDGQSKEGSGRVAIYKASGIIHSYTLECNYNTGRSVNSIPAACHDNGRASPPPPPAFPSRYTVELFEQVGRAMAIAALDMAECNPWPRIVLSEHSSLTNLRAWMLKHVRNSRGLSSTLNVGVNKKRGLRTPPKSHNGLPVSCSENTLSRARSFSTGTSAGGSSSSQQNSPQMKNSPSFPFHGSRPAGLPGLGSSTQKVTHRVLGPVREPRSQDRRRQQQPLNHRPAGSLAPSPAPTSSGPASSHKLGSCLLPDSFNIPGSSCSLLSSGDKPEAVMVIGKGLLGTGARMPCIKTRLQARPRLGRGSPPTRRGMKGSSGPTSPTPRTRESSELELGSCSATPGLPQARPPRPRSAPAFSPISCSLSDSPSWNCYSRGPLGQPEVCFVPKSPPLTVSPRV

SEQ ID NO: 18526 - protein, 816 aa, Homo sapiens
MELRCGGLLFSSRFDSGNLAHVEKVESLSSDGEGVGGGASALTSGIASSPDYEFNVWTRPDCAETEFENGNRSWFYFSVRGGMPGKLIKINIMNMNKQSKLYSQGMAPFVRTLPTRPRWERIRDRPTFEMTETQFVLSFVHRFVEGRGATTFFAFCYPFSYSDCQELLNQLDQRFPENHPTHSSPLDTIYYHRELLCYSLDGLRVDLLTITSCHGLREDREPRLEQLFPDTSTPRPFRFAGKRIFFLSSRVHPGETPSSFVFNGFLDFILRPDDPRAQTLRRLFVFKLIPMLNPDGVVRGHYRTDSRGVNLNRQYLKPDAVLHPAIYGAKAVLLYHHVHSRLNSQSSSEHQPSSCLPPDAPVSDLEKANNLQNEAQCGHSADRHNAEAWKQTEPAEQKLNSVWIMPQQSAGLEESAPDTIPPKESGVAYYVDLHGHASKRGCFMYGNSFSDESTQVENMLYPKLISLNSAHFDFQGCNFSEKNMYARDRRDGQSKEGSGRVAIYKASGIIHSYTLECNYNTGRSVNSIPAACHDNGRASPPPPPAFPSRYTVELFEQVGRAMAIAALDMAECNPWPRIVLSEHSSLTNLRAWMLKHVRNSRGLSSTLNVGVNKKRGLRTPPKSHNGLPVSCSENTLSRARSFSTGTSAGGSSSSQQNSPQMKNSPSFPFHGSRPAGLPGLGSSTQKVTHRVLGPVREPRSQDRRRQQQPLNHRPAGSLAPSPAPTSSGPASSHKLGSCLLPDSFNIPGSSCSLLSSGDKPEAVMVIGKGLLGTGARMPCIKTRLQTCPRRVSARRGPGFPRLGPGWAGAHRRLAEG

SEQ ID NO: 18527 - protein, 717 aa, Homo sapiens
MELRCGGLLFSSRFDSGNLAHVEKVESLSSDGEGVGGGASALTSGIASSPDYEFNVWTRPDCAETEFENGNRSWFYFSVRGGMPGKLIKINIMNMNKQSKLYSQGMAPFVRTLPTRPRWERIRDRPTFEMTETQFVLSFVHRFVEGRGATTFFAFCYPFSYSDCQELLNQLDQRFPENHPTHSSPLDTIYYHRELLCYSLDGLRVDLLTITSCHGLREDREPRLEQLFPDTSTPRPFRFAGKRIFFLSSRVHPGETPSSFVFNGFLDFILRPDDPRAQTLRRLFVFKLIPMLNPDGVVRGHYRTDSRGVNLNRQYLKPDAVLHPAIYGAKAVLLYHHVHSRLNSQSSSEHQPSSCLPPDAPVSDLEKANNLQNEAQCGHSADRHNAEAWKQTEPAEQKLNSVWIMPQQSAGLEESAPDTIPPKESGVAYYVDLHGHASKRGCFMYGNSFSDESTQVENMLYPKLISLNSAHFDFQGCNFSEKNMYARDRRDGQSKEGSGRVAIYKASGIIHSYTLECNYNTGRSVNSIPAACHDNGRASPPPPPAFPSRYTVELFEQVGRAMAIAALDMAECNPWPRIVLSEHSSLTNLRAWMLKHVRNSRGLSSTLNVGVNKKRGLRTPPKSHNGLPVSCSENTLSRARSFSTGTSAGGSSSSQQNSPQMKNSPSFPFHGSRPAGLPGLGSSTQKVTHRVLGPVRGKPVWEPLQHVFGCLGHCWGK

SEQ ID NO: 18528 - protein, 93 aa, Homo sapiens
MKISVAAIPFFLLITIALGTKTESSSRGPYHPSECCFTYTTYKIPRQRIMDYYETNSQCSKPGIVFITKRGHSVCTNPSDKWVQDYIKDMKEN

SEQ ID NO: 18529 - protein, 109 aa, Homo sapiens
MKISVAAIPFFLLITIALGTKTESSSQTGGKPKVVKIQLKLVGGPYHPSECCFTYTTYKIPRQRIMDYYETNSQCSKPGIVFITKRGHSVCTNPSDKWVQDYIKDMKEN

SEQ ID NO: 18530 - protein, 593 aa, Homo sapiens
MKLQAVMETLLQRQQRARQELEARQQLPPDPPAAPPGRARAAPDEDREPESARMQRAQMAALAAMRAAAAGLGHPASPGGSEDGPPGSEEEDAAREGTPGSPGRGREGPGEEHFEDMASDEDMKPKWEEEEMEEDLGEDEEEEEEDYEDEEEEEDEEGLGPPGPASLGTTALFPRKAQPPQAFRGDGVPRVLGGQERPGPGPAHPGGAAHVAPQLQPPDHGDWTYEEQFKQLYELDGDPKRKEFLDDLFSFMQKRGTPVNRIPIMAKQVLDLFMLYVLVTEKGGLVEVINKKLWREITKGLNLPTSITSAAFTLRTQYMKYLYPYECEKRGLSNPNELQAAIDSNRREGRRQSFGGSLFAYSPGGAHGMLSSPKLPVSSLGLAASTNGSSITPAPKIKKEEDSAIPITVPGRLPVSLAGHPVVAAQAAAVQAAAAQAAVAAQAAALEQLREKLESAEPPEKKMALVADEQQRLMQRALQQNFLAMAAQLPMSIRINSQASESRQDSAVNLTGTNGSNSISMSVEINGIMYTGVLFAQPPAPTPTSAPNKGGGGGGGSSSNAGGRGGNTGTSGGQAGPAGLSTPSTSTSNNSLP

SEQ ID NO: 18531 - protein, 492 aa, Homo sapiens
MVKFPALTHYWPLIRFLVPLGITNIAIDFGEQALNRGIAAVKEDAVEMLASYGLAYSLMKFFTGPMSDFKNVGLVFVNSKRDRTKAVLCMVVAGAIAAVFHTLIAYSDLGYYIINKLHHVDESVGSKTRRAFLYLAAFPFMDAMAWTHAGILLKHKYSFLVGCASISDVIAQVVFVAILLHSHLECREPLLIPILSLYMGALVRCTTLCLGYYKNIHDIIPDRSGPELGGDATIRKMLSFWWPLALILATQRISRPIVNLFVSRDLGGSSAATEAVAILTATYPVGHMPYGWLTEIRAVYPAFDKNNPSNKLVSTSNTVTAAHIKKFTFVCMALSLTLCFVMFWTPNVSEKILIDIIGVDFAFAELCVVPLRIFSFFPVPVTVRAHLTGWLMTLKKTFVLAPSSVLRIIVLIASLVVLPYLGVHGATLGVGSLLAGFVGESTMVAIAACYVYRKQKKKMENESATEGEDSAMTDMPPTEEVTDIVEMREENE

SEQ ID NO: 18532 - protein, 294 aa, Homo sapiens
MGALVRCTTLCLGYYKNIHDIIPDRSGPELGGDATIRKMLSFWWPLALILATQRISRPIVNLFVSRDLGGSSAATEAVAILTATYPVGHMPYGWLTEIRAVYPAFDKNNPSNKLVSTSNTVTAAHIKKFTFVCMALSLTLCFVMFWTPNVSEKILIDIIGVDFAFAELCVVPLRIFSFFPVPVTVRAHLTGWLMTLKKTFVLAPSSVLRIIVLIASLVVLPYLGVHGATLGVGSLLAGFVGESTMVAIAACYVYRKQKKKMENESATEGEDSAMTDMPPTEEVTDIVEMREENE

SEQ ID NO: 18533 - protein, 938 aa, Homo sapiens
MLWPRLAAAEWAALAWELLGASVLLIAVRWLVRRLGPRPGGLGRSGTPVPPPSAAAAPASGEMTMDALLARLKLLNPDDLREEIVKAGLKCGPITSTTRFIFEKKLAQALLEQGGRLSSFYHHEAGVTALSQDPQRILKPAEGNPTDQAGFSEDRDFGYSVGLNPPEEEAVTSKTCSVPPSDTDTYRAGATASKEPPLYYGVCPVYEDVPARNERIYVYENKKEALQAVKMIKGSRFKAFSTREDAEKFARGICDYFPSPSKTSLPLSPVKTAPLFSNDRLKDGLCLSESETVNKERANSYKNPRTQDLTAKLRKAVEKGEEDTFSDLIWSNPRYLIGSGDNPTIVQEGCRYNVMHVAAKENQASICQLTLDVLENPDFMRLMYPDDDEAMLQKRIRYVVDLYLNTPDKMGYDTPLHFACKFGNADVVNVLSSHHLIVKNSRNKYDKTPEDVICERSKNKSVELKERIREYLKGHYYVPLLRAEETSSPVIGELWSPDQTAEASHVSRYGGSPRDPVLTLRAFAGPLSPAKAEDFRKLWKTPPREKAGFLHHVKKSDPERGFERVGRELAHELGYPWVEYWEFLGCFVDLSSQEGLQRLEEYLTQQEIGKKAQQETGEREASCRDKATTSGSNSISVRAFLDEDDMSLEEIKNRQNAARNNSPPTVGAFGHTRCSAFPLEQEADLIEAAEPGGPHSSRNGLCHPLNHSRTLAGKRPKAPRGEEAHLPPVSDLTVEFDKLNLQNIGRSVSKTPDESTKTKDQILTSRINAVERDLLEPSPADQLGNGHRRTESEMSARIAKMSLSPSSPRHEDQLEVTREPARRLFLFGEEPSKLDQDVLAALECADVDPHQFPAVHRWKSAVLCYSPSDRQSWPSPAVKGRFKSQLPDLSGPHSYSPGRNSVAGSNPAKPGLGSPGRYSPVHGSQLRRMARLAELAAL

SEQ ID NO: 18534 - protein, 648 aa, Homo sapiens
MLWPRLAAAEWAALAWELLGASVLLIAVRWLVRRLGPRPGGLGRSGTPVPPPSAAAAPASGEMTMDALLARLKLLNPDDLREEIVKAGLKCGPITSTTRFIFEKKLAQALLEQGGRLSSFYHHEAGVTALSQDPQRILKPAEGNPTDQAGFSEDRDFGYSVGLNPPEEEAVTSKTCSVPPSDTDTYRAGATASKEPPLYYGVCPVYEDVPARNERIYVYENKKEALQAVKMIKGSRFKAFSTREDAEKFARGICDYFPSPSKTSLPLSPVKTAPLFSNDRLKDGLCLSESETVNKERANSYKNPRTQDLTAKLRKAVEKGEEDTFSDLIWSNPRYLIGSGDNPTIVQEGCRYNVMHVAAKENQASICQLTLDVLENPDFMRLMYPDDDEAMLQKRIRYVVDLYLNTPDKMGYDTPLHFACKFGNADVVNVLSSHHLIVKNSRNKYDKTPEDVICERSKNKSVELKERIREYLKGHYYVPLLRAEETSSPVIGELWSPDQTAEASHVSRYGGSPRDPVLTLRAFAGPLSPAKAEDFRKLWKTPPREKAGFLHHVKKSDPERGFERVGRELAHELGYPWVEYWEFLGCFVDLSSQEGLQRLEEYLTQQEIGKKAQQETGEREASCRDKATTSVEMRFHRIDQAGLELLTS

SEQ ID NO: 18535 - protein, 293 aa, Homo sapiens
MSLEEIKNRQNAARNNSPPTVGAFGHTRCSAFPLEQEADLIEAAEPGGPHSSRNGLCHPLNHSRTLAGKRPKAPRGEEAHLPPVSDLTVEFDKLNLQNIGRSVSKTPDESTKTKDQILTSRINAVERDLLEPSPADQLGNGHRRTESEMSARIAKMSLSPSSPRHEDQLEVTREPARRLFLFGEEPSKLDQDVLAALECADVDPHQFPAVHRWKSAVLCYSPSDRQSWPSPAVKGRFKSQLPDLSGPHSYSPGRNSVAGSNPAKPGLGSPGRYSPVHGSQLRRMARLAELAAL

SEQ ID NO: 18536 - protein, 177 aa, Homo sapiens
MGNIFEKLFKSLLGKKKMRILILSLDTAGKTTILYKLKLGETVPAVPTVGFCVETVEYKNNTFAVWDVGSHFKIRPLWQHFFQNTKGARSPGSTHQGSLASGVLPIKCSHVEFGMWKGGRSHPFLPHSSRCAGSGGQLDSILPHQSPAWGPWGCKDLSSGFPSFLTSSILWKSAVVK

SEQ ID NO: 18537 - protein, 125 aa, Homo sapiens
MGNIFEKLFKSLLGKKKMRILILSLDTAGKTTILYKLKLGETVPAVPTVGFCVETVEYKNNTFAVWDVGSHFKIRPLWQHFFQNTKELSASQFAQFIKKLCGVTGTNDEASPGSLTSYPSHLLDR

SEQ ID NO: 18538 - protein, 203 aa, Homo sapiens
MGNIFEKLFKSLLGKKKMRILILSLDTAGKTTILYKLKLGETVPAVPTVGFCVETVEYKNNTFAVWDVGSHFKIRPLWQHFFQNTKGARSPGSTHQGSLASGVLPIKCSHVEFGMWKGGRSHPFLPHSSRCAGSGGQLDSILPHQSPAWGPWGCKDLSSGFPSFLTSSILWKSAVSYQLPSLHNSSRNYAGSPAQMMRHLLEA

SEQ ID NO: 18539 - protein, 264 aa, Homo sapiens [sequence omitted]

SEQ ID NO: 18540 - protein, 208 aa, Homo sapiens
MSLSITNNGHSVQVDFNDSDDRTVVTGGPLEGPYRLKQFHFHWGKKHDVGSEHTVDGKSFPSELHLVHWNAKKYSTFGEAASAPDGLAVVGVFLETGDEHPSMNRLTDALYMVRFKGTKAQFSCFNPKCLLPASRHYWTYPGSLTTPPLSESVTWIVLREPICISERQMGKFRSLLFTSEDDERIHMVNNFRPPQPLKGRVVKASFRA

SEQ ID NO: 18541 - protein, 247 aa, Homo sapiens
MWGPGVTAEGLSVAPAPPPLLPLLLLLALALVAPSRGGGGCAELACGERERCCDATNATAVRCCKLPLHAFLDNVGWFVRKLSGLLILLVLFAIGYFLQRIICPSPRRYPRGQARPGQRPGPPGGAGPLGGAGPPDDDDDSPALLRDEAAAGSQDSLLDSGGGGRGRGGGGRSDPSCASEHEMRVVSPVFLQLPSYEEVKYLPTYEESMRLQQLSPGEVVLPVSVLGRPRGGVAAEPDGGEGRYPLI

SEQ ID NO: 18542 - protein, 290 aa, Homo sapiens
MADLSFIEDTVAFPEKEEDEEEEEEGVEWGYEEGVEWGLVFPDANGEYQSPINLNSREARYDPSLLDVRLSPNYVVCRDCEVTNDGHTIQVILKSKSVLSGGPLPQGHEFELYEVRFHWGRENQRGSEHTVNFKAFPMELHLIHWNSTLFGSIDEAVGKPHGIAIIALFVQIGKEHVGLKAVTEILQDIQYKGKSKTIPCFNPNTLLPDPLLRDYWVYEGSLTIPPCSEGVTWILFRYPLTISQLQIEEFRRLRTHVKGAELVEGCDGILGDNFRPTQPLSDRVIRAAFQ

SEQ ID NO: 18543 - protein, 502 aa, Homo sapiens
MRIFIAFEGSFEPFDVSADETVEVVKLMIKDYFHIPLSEDKQGRRYLELMYAGAALKDSWSLADVGISFCSTLKCFVKEEDKPTLYVFNAVTQDTMPVMESISLLDKTVSDLRTLVTLRCGLPVSVYCLRTPRGLEMYDCNTLKDYQTDIGTTLRLDVWDGWKEFLMGCLLGQKLKVQRYLSKEGPVLKYQKRVALYIAAFCGYIELTEWALKQGARPHEAVGVHPYRAWCHEALHADVSKCPIHAAAEAGQLLILKAFVNYSVLCLECKNAAGQTPLTIVFKHKHKDCVLYLLSKMWSTVSFPKISVPMRIYIKIKQWILRAQSHSLHKSQFCGARVFGAKVGDTVMVDGFTKPKMTSKSWHKAGNSDSQSIVLKLPSLSKQTASSKPVNPLAISQPDTRKQALKFHPLVNASSFSELQKHQQQNQKKITATARKKEKLIKNTYLPQVPLPPVSRVGYSHPSFFYATPSADFLLKSSFSSFLEHSGKTPWENAIYCLAVAR

SEQ ID NO: 18544 - protein, 424 aa, Homo sapiens
MRIFIAFEGSFEPFDVSADETVEVVKLMIKDYFHIPLSEDKQGRRYLELMYAGAALKDSWSLADVGISFCSTLKCFVKEEDKPTLYVFNAVTQDTMPVMESISLLDKTVSDLRTLVTLRCGLPVSVYCLRTPRGLEMYDCNTLKDYQTDIGTTLRLDVWDGWKEFLMGCLLGQKLKVQRYLSKEGPVLKYQKRVALYIAAFCGYIELTEWALKQGARPHEAVGVHPYRAWCHEALHADVSKCPIHAAAEAGQLLILKAFVNYSVLCLECKNAAGQTPLTIVFKHKHKDCVLYLLSKMWSTVSFPKISVPMRIYIKIKQWILRAQSHSLHKSQFCGARVFGAKVGDTVMVDGFTKPKMTSKSWHKAGNSDSQSIVLKLPSLSKQTASSKPVNPLAISQPDTRKQALKFHPLKGESPKADKSSGIM

SEQ ID NO: 18545 - protein, 544 aa, Homo sapiens
MRIFIAFEGSFEPFDVSADETVEVVKLMIKDYFHIPLSEDKQGRRYLELMYAGAALKDSWSLADVGISFCSTLKCFVKEEDKPTLYVFNAVTQDTMPVMESISLLDKTVSDLRTLVTLRCGLPVSVYCLRTPRGLEMYDCNTLKDYQTDIGTTLRLDVWDGWKEFLMGCLLGQKLKVQRYLSKEGPVLKYQKRVALYIAAFCGYIELTEWALKQGARPHEAVGVHPYRAWCHEALHADVSKCPIHAAAEAGQLLILKAFVNYSVLCLECKNAAGQTPLTIVFKHKHKDCVLYLLSKMWSTVSFPKISVPMRIYIKIKQWILRAQSHSLHKSQFCGARVFGAKVGDTVMVDGFTKPKMTSKSWHKAGNSDSQSIVLKLPSLSKQTASSKPVNPLAISQPDTRKQALKFHPLVNASSFSELQKHQQQNQKKITATARKKEKLIKNTYLPQVPLPPVSRVGYSHPSFFYATPSADFLLKSSFSSFLEHSGKTPWENAIYCLAVASAFKEKRWLQQLEIARVLAKKSISNLTTRGGLTACENSLETVL

SEQ ID NO: 18546 - protein, 1453 aa, Homo sapiens
MMLPQNSWHIDFGRCCCHQNLFSAVVTCILLLNSCFLISSFNGTDLELRLVNGDGPCSGTVEVKFQGQWGTVCDDGWNTTASTVVCKQLGCPFSFAMFRFGQAVTRHGKIWLDDVSCYGNESALWECQHREWGSHNCYHGEDVGVNCYGEANLGLRLVDGNNSCSGRVEVKFQERWGTICDDGWNLNTAAVVCRQLGCPSSFISSGVVNSPAVLRPIWLDDILCQGNELALWNCRHRGWGNHDCSHNEDVTLTCYDSSDLELRLVGGTNRCMGRVELKIQGRWGTVCHHKWNNAAADVVCKQLGCGTALHFAGLPHLQSGSDVVWLDGVSCSGNESFLWDCRHSGTVNFDCLHQNDVSVICSDGADLELRLADGSNNCSGRVEVRIHEQWWTICDQNWKNEQALVVCKQLGCPFSVFGSRRAKPSNEARDIWINSISCTGNESALWDCTYDGKAKRTCFRRSDAGVICSDKADLDLRLVGAHSPCYGRLEVKYQGEWGTVCHDRWSTRNAAVVCKQLGCGKPLHVFGMTYFKEASGPIWLDDVSCIGNESNIWDCEHSGWGKHNCVHREDVIVTCSGDATWGLRLVGGSNRCSGRLEVYFQGRWGTVCDDGWNSKAAAVVCSQLDCPSSIIGMGLGNASTGYGKIWLDDVSCDGDESDLWSCRNSGWGNNDCSHSEDVGVICSDASDMELRLVGGSSRCAGKVEVNVQGAVGILCANGWGMNIAEVVCRQLECGSAIRVSREPHFTERTLHILMSNSGCTGGEASLWDCIRWEWKQTACHLNMEASLICSAHRQPRLVGADMPCSGRVEVKHADTWRSVCDSDFSLHAANVLCRELNCGDAISLSVGDHFGKGNGLTWAEKFQCEGSETHLALCPIVQHPEDTCIHSREVGVVCSRYTDVRLVNGKSQCDGQVEINVLGHWGSLCDTHWDPEDARVLCRQLSCGTALSTTGGKYIGERSVRVWGHRFHCLGNESLLDNCQMTVLGAPPCIHGNTVSVICTGSLTQPLFPCLANVSDPYLSAVPEGSALICLEDKRLRLVDGDSRCAGRVEIYHDGFWGTICDDGWDLSDAHVVCQKLGCGVAFNATVSAHFGEGSGPIWLDDLNCTGMESHLWQCPSRGWGQHDCRHKEDAGVICSEFTALRLYSETETESCAGRLEVFYNGTWGSVGRRNITTAIAGIVCRQLGCGENGVVSLAPLSKTGSGFMWVDDIQCPKTHISIWQCLSAPWERRISSPAEETWITCEDRIRVRGGDTECSGRVEIWHAGSWGTVCDDSWDLAEAEVVCQQLGCGSALAALRDASFGQGTGTIWLDDMRCKGNESFLWDCHAKPWGQSDCGHKEDAGVRCSGQSLKSLNASSGHLALILSSIFGLLLLVLFILFLTWCRVQKQKHLPLRVSTRRRGSLEENLFHEMETCLKREDPHGTRTSDDTPNHGCEDASDTSLLGVLPASEATK

SEQ ID NO: 18547 - protein, 1421 aa, Homo sapiens
MMLPQNSWHIDFGRCCCHQNLFSAVVTCILLLNSCFLISSFNGTDLELRLVNGDGPCSGTVEVKFQGQWGTVCDDGWNTTASTVVCKQLGCPFSFAMFRFGQAVTRHGKIWLDDVSCYGNESALWECQHREWGSHNCYHGEDVGVNCYGEANLGLRLVDGNNSCSGRVEVKFQERWGTICDDGWNLNTAAVVCRQLGCPSSFISSGVVNSPAVLRPIWLDDILCQGNELALWNCRHRGWGNHDCSHNEDVTLTCYDSSDLELRLVGGTNRCMGRVELKIQGRWGTVCHHKWNNAAADVVCKQLGCGTALHFAGLPHLQSGSDVVWLDGVSCSGNESFLWDCRHSGTVNFDCLHQNDVSVICSDGADLELRLADGSNNCSGRVEVRIHEQWWTICDQNWKNEQALVVCKQLGCPFSVFGSRRAKPSNEARDIWINSISCTGNESALWDCTYDGKAKRTCFRRSDAGVICSDKADLDLRLVGAHSPCYGRLEVKYQGEWGTVCHDRWSTRNAAVVCKQLGCGKPLHVFGMTYFKEASGPIWLDDVSCIGNESNIWDCEHSGWGKHNCVHREDVIVTCSGDATWGLRLVGGSNRCSGRLEVYFQGRWGTVCDDGWNSKAAAVVCSQLDCPSSIIGMGLGNASTGYGKIWLDDVSCDGDESDLWSCRNSGWGNNDCSHSEDVGVICSDASDMELRLVGGSSRCAGKVEVNVQGAVGILCANGWGMNIAEVVCRQLECGSAIRVSREPHFTERTLHILMSNSGCTGGEASLWDCIRWEWKQTACHLNMEASLICSAHRQPRLVGADMPCSGRVEVKHADTWRSVCDSDFSLHAANVLCRELNCGDAISLSVGDHFGKGNGLTWAEKFQCEGSETHLALCPIVQHPEDTCIHSREVGVVCSRYTDVRLVNGKSQCDGQVEINVLGHWGSLCDTHWDPEDARVLCRQLSCGTALSTTGGKYIGERSVRVWGHRFHCLGNESLLDNCQMTVLGAPPCIHGNTVSVICTGSLTQPLFPCLANVSDPYLSAVPEGSALICLEDKRLRLVDGDSRCAGRVEIYHDGFWGTICDDGWDLSDAHVVCQKLGCGVAFNATVSAHFGEGSGPIWLDDLNCTGMESHLWQCPSRGWGQHDCRHKEDAGVICSEFTALRLYSETETESCAGRLEVFYNGTWGSVGRRNITTAIAGIVCRQLGCGENGVVSLAPLSKTGSGFMWVDDIQCPKTHISIWQCLSAPWERRISSPAEETWITCEDRIRVRGGDTECSGRVEIWHAGSWGTVCDDSWDLAEAEVVCQQLGCGSALAALRDASFGQGTGTIWLDDMRCKGNESFLWDCHAKPWGQSDCGHKEDAGVRCSGQSLKSLNASSGHLALILSSIFGLLLLVLFILFLTWCRVQKQKHLPLRDDTPNHGCEDASDTSLLGVLPASEATK

SEQ ID NO: 18548 - protein, 727 aa, Homo sapiens
MMLPQNSWHIDFGRCCCHQNLFSAVVTCILLLNSCFLISSFNGTDLELRLVNGDGPCSGTVEVKFQGQWGTVCDDGWNTTASTVVCKQLGCPFSFAMFRFGQAVTRHGKIWLDDVSCYGNESALWECQHREWGSHNCYHGEDVGVNCYGEANLGLRLVDGNNSCSGRVEVKFQERWGTICDDGWNLNTAAVVCRQLGCPSSFISSGVVNSPAVLRPIWLDDILCQGNELALWNCRHRGWGNHDCSHNEDVTLTCYDSSDLELRLVGGTNRCMGRVELKIQGRWGTVCHHKWNNAAADVVCKQLGCGTALHFAGLPHLQSGSDVVWLDGVSCSGNESFLWDCRHSGTVNFDCLHQNDVSVICSDGADLELRLADGSNNCSGRVEVRIHEQWWTICDQNWKNEQALVVCKQLGCPFSVFGSRRAKPSNEARDIWINSISCTGNESALWDCTYDGKAKRTCFRRSDAGVICSDKADLDLRLVGAHSPCYGRLEVKYQGEWGTVCHDRWSTRNAAVVCKQLGCGKPLHVFGMTYFKEASGPIWLDDVSCIGNESNIWDCEHSGWGKHNCVHREDVIVTCSGDATWGLRLVGGSNRCSGRLEVYFQGRWGTVCDDGWNSKAAAVVCSQLDCPSSIIGMGLGNASTGYGKIWLDDVSCDGDESDLWSCRNSGWGNNDCSHSEDVGVICSDASDMELRLVGGSSRCAGKVEVNVQGAVGILCANSFLMTSSKPR

SEQ ID NO: 18549 - protein, 1463 aa, Homo sapiens
MMLPQNSWHIDFGRCCCHQNLFSAVVTCILLLNSCFLISSFNGTDLELRLVNGDGPCSGTVEVKFQGQWGTVCDDGWNTTASTVVCKQLGCPFSFAMFRFGQAVTRHGKIWLDDVSCYGNESALWECQHREWGSHNCYHGEDVGVNCYGKSLTRVGRQGEANLGLRLVDGNNSCSGRVEVKFQERWGTICDDGWNLNTAAVVCRQLGCPSSFISSGVVNSPAVLRPIWLDDILCQGNELALWNCRHRGWGNHDCSHNEDVTLTCYDSSDLELRLVGGTNRCMGRVELKIQGRWGTVCHHKWNNAAADVVCKQLGCGTALHFAGLPHLQSGSDVVWLDGVSCSGNESFLWDCRHSGTVNFDCLHQNDVSVICSDGADLELRLADGSNNCSGRVEVRIHEQWWTICDQNWKNEQALVVCKQLGCPFSVFGSRRAKPSNEARDIWINSISCTGNESALWDCTYDGKAKRTCFRRSDAGVICSDKADLDLRLVGAHSPCYGRLEVKYQGEWGTVCHDRWSTRNAAVVCKQLGCGKPLHVFGMTYFKEASGPIWLDDVSCIGNESNIWDCEHSGWGKHNCVHREDVIVTCSGDATWGLRLVGGSNRCSGRLEVYFQGRWGTVCDDGWNSKAAAVVCSQLDCPSSIIGMGLGNASTGYGKIWLDDVSCDGDESDLWSCRNSGWGNNDCSHSEDVGVICSDASDMELRLVGGSSRCAGKVEVNVQGAVGILCANGWGMNIAEVVCRQLECGSAIRVSREPHFTERTLHILMSNSGCTGGEASLWDCIRWEWKQTACHLNMEASLICSAHRQPRLVGADMPCSGRVEVKHADTWRSVCDSDFSLHAANVLCRELNCGDAISLSVGDHFGKGNGLTWAEKFQCEGSETHLALCPIVQHPEDTCIHSREVGVVCSRYTDVRLVNGKSQCDGQVEINVLGHWGSLCDTHWDPEDARVLCRQLSCGTALSTTGGKYIGERSVRVWGHRFHCLGNESLLDNCQMTVLGAPPCIHGNTVSVICTGSLTQPLFPCLANVSDPYLSAVPEGSALICLEDKRLRLVDGDSRCAGRVEIYHDGFWGTICDDGWDLSDAHVVCQKLGCGVAFNATVSAHFGEGSGPIWLDDLNCTGMESHLWQCPSRGWGQHDCRHKEDAGVICSEFTALRLYSETETESCAGRLEVFYNGTWGSVGRRNITTAIAGIVCRQLGCGENGVVSLAPLSKTGSGFMWVDDIQCPKTHISIWQCLSAPWERRISSPAEETWITCEDRIRVRGGDTECSGRVEIWHAGSWGTVCDDSWDLAEAEVVCQQLGCGSALAALRDASFGQGTGTIWLDDMRCKGNESFLWDCHAKPWGQSDCGHKEDAGVRCSGQSLKSLNASSGHLALILSSIFGLLLLVLFILFLTWCRVQKQKHLPLRVSTRRRGSLEENLFHEMETCLKREDPHGTRTSDDTPNHGCEDASDTSLLGVLPASEATK

SEQ ID NO: 18550 - protein, 1274 aa, Homo sapiens
MARQPEEEETAVARARRPPLWLLCLVACWLLGAGAEADFSILDEAQVLASQMRRLAAEELGVVTMQRIFNSFVYTEKISNGESEVQQLAKKIREKFNRYLDVVNRNKQVVEASYTAHLTSPLTAIQDCCTIPPSMMEFDGNFNTNVSRTISCDRLSTTVNSRAFNPGRDLNSVLADNLKSNPGIKWQYFSSEEGIFTVFPAHKFRCKGSYEHRSRPIYVSTVRPQSKHIVVILDHGASVTDTQLQIAKDAAQVILSAIDEHDKISVLTVADTVRTCSLDQCYKTFLSPATSETKRKMSTFVSSVKSSDSPTQHAVGFQKAFQLIRSTNNNTKFQANTDMVIIYLSAGITSKDSSEEDKKATLQVINEENSFLNNSVMILTYALMNDGVTGLKELAFLRDLAEQNSGKYGVPDRMALPVIKGSMMVLNQLSNLETTVGRFYTNLPNRMIDEAVFSLPFSDEMGDGLIMTVSKPCYFGNLLLGIVGVDVNLAYILEDVTYYQDSLASYTFLIDDKGYTLMHPSLTRPYLLSEPPLHTDIIHYENIPKFELVRQNILSLPLGSQIIAVPVNSSLSWHINKLRETGKEAYNVSYAWKMVQDTSFILCIVVIQPEIPVKQLKNLNTVPSSKLLYHRLDLLGQPSACLHFKQLATLESPTIMLSAGSFSSPYEHLSQPETKRMVEHYTAYLSDNTRLIANPGLKFSVRNEVMATSHVTDEWMTQMEMSSLNTYIVRRYIATPNGVLRIYPGSLMDKAFDPTRRQWYLHAVANPGLISLTGPYLDVGGAGYVVTISHTIHSSSTQLSSGHTVAVMGIDFTLRYFYKVLMDLLPVCNQDGGNKIRCFIMEDRGYLVAHPTLIDPKGHAPVEQQHITHKEPLVANDILNHPNFVKKNLCNSFSDRTVQRFYKFNTSLAGDLTNLVHGSHCSKYRLARIPGTNAFVGIVNETCDSLAFCACSMVDRLCLNCHRMEQNECECPCECPLEVNECTGNLTNAENRNPSCEVHQEPVTYTAIDPGLQDALHQCVNSRCSQRLESGDCFGVLDCEWCMVDSDGKTHLDKPYCAPQKECFGGIVGAKSPYVDDMGAIGDEVITLNMIKSAPVGPVAGGIMGCIMVLVLAVYAYRHQIHRRSHQHMSPLAAQEMSVRMSNLENDRDERDDDSHEDRGIISNTRFIAAVIERHAHSPERRRRYWGRSGTESDHGYSTMSPQEDSENPPCNNDPLSAGVDVGNHDEDLDLDTPPQTAALLSHKFHHYRSHHPTLHHSHHLQAAVTVHTVDAEC

SEQ ID NO: 18551 - protein, 978 aa, Homo sapiens
MSTFVSSVKSSDSPTQHAVGFQKAFQLIRSTNNNTKFQANTDMVIIYLSAGITSKDSSEEDKKATLQVINEENSFLNNSVMILTYALMNDGVTGLKELAFLRDLAEQNSGKYGVPDRMALPVIKGSMMVLNQLSNLETTVGRFYTNLPNRMIDEAVFSLPFSDEMGDGLIMTVSKPCYFGNLLLGIVGVDVNLAYILEDVTYYQDSLASYTFLIDDKGYTLMHPSLTRPYLLSEPPLHTDIIHYENIPKFELVRQNILSLPLGSQIIAVPVNSSLSWHINKLRETGKEAYNVSYAWKMVQDTSFILCIVVIQPEIPVKQLKNLNTVPSSKLLYHRLDLLGQPSACLHFKQLATLESPTIMLSAGSFSSPYEHLSQPETKRMVEHYTAYLSDNTRLIANPGLKFSVRNEVMATSHVTDEWMTQMEMSSLNTYIVRRYIATPNGVLRIYPGSLMDKAFDPTRRQWYLHAVANPGLISLTGPYLDVGGAGYVVTISHTIHSSSTQLSSGHTVAVMGIDFTLRYFYKVLMDLLPVCNQDGGNKIRCFIMEDRGYLVAHPTLIDPKGHAPVEQQHITHKEPLVANDILNHPNFVKKNLCNSFSDRTVQRFYKFNTSLAGDLTNLVHGSHCSKYRLARIPGTNAFVGIVNETCDSLAFCACSMVDRLCLNCHRMEQNECECPCECPLEVNECTGNLTNAENRNPSCEVHQEPVTYTAIDPGLQDALHQCVNSRCSQRLESGDCFGVLDCEWCMVDSDGKTHLDKPYCAPQKECFGGIVGAKSPYVDDMGAIGDEVITLNMIKSAPVGPVAGGIMGCIMVLVLAVYAYRHQIHRRSHQHMSPLAAQEMSVRMSNLENDRDERDDDSHEDRGIISNTRFIAAVIERHAHSPERRRRYWGRSGTESDHGYSTMSPQEDSENPPCNNDPLSAGVDVGNHDEDLDLDTPPQTAALLSHKFHHYRSHHPTLHHSHHLQAAVTVHTVDAEC

SEQ ID NO: 18552 - protein, 283 aa, Homo sapiens
MAGAVSLLGVVGLLLVSALSGVLGDRANPDLRAHPGNAAHPGSGATEPRRRPPLKDQRERTRAGSLPLGALYTAAVAAFVLYKCLQGKDETAVLHEEASKQQPLQSEQQLAQLTQQLAQTEQHLNNLMAQLDPLFERVTTLAGAQQELLNMKLWTIHELLQDSKPDKDMEASEPGEGSGGESAGGGDKVSETGTFLISPHTEASRPLPEDFCLKEDEEEIGDSQAWEEPTNWSTETWNLATSWEVGRGLRRRCSQAVAKGPSHSLGWEGGTTAEGRLKQSLFS

SEQ ID NO: 18553 - protein, 155 aa, Homo sapiens
MAGAVSLLGVVGLLLVSALSGVLGDRANPDLRAHPGNAAHPGSGATEPRRRPPLKDQRERTRAGSLPLGALYTAAVAAFVLYKCLQGKDETAVLHEEASKQQPLQSEQQLAQLTQQLAQTEQHLNNLMAQLDPLFERPAGASEHEAMDHPRAAAR

SEQ ID NO: 18554 - protein, 139 aa, Homo sapiens
MAGAVSLLGVVGLLLVSALSGVLGDRANPDLRAHPGNAAHPGSGATEPRRRPPLKDQRERTRAGSLPLGALYTAAVAAFVLYKCLQGKDETAVLHEEASKQQPLQSEQQLAQLTQQLAQTEQHLNNLMAQLDPLFERSF

SEQ ID NO: 18555 - protein, 119 aa, Homo sapiens
MAGAVSLLGVVGLLLVSALSGVLGDRANPDLRAHPGNAAHPGSGATEPRRRPPLKDQRERTRAGSLPLGALYTAAVAAFVLYKCLQGKDETAVLHEEASKQQPLQSGGFSRSLCWVGGV

SEQ ID NO: 18556 - protein, 256 aa, Homo sapiens
MAGAVSLLGVVGLLLVSALSGVLGDRANPDLRAHPGNAAHPGSGATEPRRRPPLKDQRERTRAGSLPLGALYTAAVAAFVLYKCLQGKDETAVLHEEASKQQPLQSEQQLAQLTQQLAQTEQHLNNLMAQLDPLFERVTTLAGAQQELLNMKLWTIHELLQDSKPDKDMEASEPEASRPLPEDFCLKEDEEEIGDSQAWEEPTNWSTETWNLATSWEVGRGLRRRCSQAVAKGPSHSLGWEGGTTAEGRLKQSLFS

SEQ ID NO: 18557 - protein, 200 aa, Homo sapiens
MGNGLSDQTSILSNLPSFQSFHIVILGLDCAGKTTVLYRLQFNEFVNTVPTKGFNTEKIKVTLGNSKTVTFHFWDVGGQEKLRPLWKSYTRCTDGIVFVVDSVDVERMEEAKTELHKITRISENQGVPVLIVANKQDLRNSLSLSEIEKLLAMGELSSSTPWHLQPTCAIIGDGLKEGLEKLHDMIIKRRKMLRQQKKKR

SEQ ID NO: 18558 - protein, 518 aa, Homo sapiens
MLRVVSWNINGIRRPLQGVANQEPSNCAAVAVGRILDELDADIVCLQETKVTRDALTEPLAIVEGYNSYFSFSRNRSGYSGVATFCKDNATPVAAEEGLSGLFATQNGDVGCYGNMDEFTQEELRALDSEGRALLTQHKIRTWEGKEKTLTLINVYCPHADPGRPERLVFKMRFYRLLQIRAEALLAAGSHVIILGDLNTAHRPIDHWDAVNLECFEEDPGRKWMDSLLSNLGCQSASHVGPFIDSYRCFQPKQEGAFTCWSAVTGARHLNYGSRLDYVLGDRTLVIDTFQASFLLPEVMGSDHCPVGAVLSVSSVPAKQCPPLCTRFLPEFAGTQLKILRFLVPLEQSPVLEQSTLQHNNQTRVQTCQNKAQVRSTRPQPSQVGSSRGQKNLKSYFQPSPSCPQASPDIELPSLPLMSALMTPKTPEEKAVAKVVKGQAKTSEAKDEKELRTSFWKSVLAGPLRTPLCGGHREPCVMRTVKKPGPNLGRRFYMCARPRGPPTDPSSRCNFFLWSRPS

SEQ ID NO: 18559 - protein, 186 aa, Homo sapiens
MLALISRLLDWFRSLFWKEEMELTLVGLQYSGKTTFVNVIASGQFSEDMIPTVGFNMRKVTKGNVTIKIWDIGGQPRFRSMWERYCRGVNAIVYMIDAADREKIEASRNELHNLLDKPQLQGIPVLVLGNKRDLPNALDEKQLIEKMNLSAIQDREICCYSISCKEKDNIDITLQWLIQHSKSRRS

SEQ ID NO: 18560 - protein, 163 aa, Homo sapiens
MLALISRLLDWFRSLFWKEEMELTLVGLQYSGKTTFVNVIASGQFSEDMIPTVGFNMRKVTKGNVTIKIWDIGGQPRFRSMWERYCRGVNAIVYMIDAADREKIEASRNELHNLLDKPQLQGIPISHFSGLFSIQNLEEAEASPEVFQSFLAIILELLSVPLK

SEQ ID NO: 18561 - protein, 187 aa, Homo sapiens
MRPTWKALSHPAWPEEKNKQILVLGLDGAGKTSVLHSLASNRVQHSVAPTQGFHAVCINTEDSQMEFLEIGGSKPFRSYWEMYLSKGLLLIFVVDSADHSRLPEAKKYLHQLIAANPVLPLVVFANKQDLEAAYHITDIHEALALSEVGNDRKMFLFGTYLTKNGSEIPSTMQDAKDLIAQLAADVQ

SEQ ID NO: 18562 - protein, 123 aa, Homo sapiens
MEFLEIGGSKPFRSYWEMYLSKGLLLIFVVDSADHSRLPEAKKYLHQLIAANPVLPLVVFANKQDLEAAYHITDIHEALALSEVGNDRKMFLFGTYLTKNGSEIPSTMQDAKDLIAQLAADVQ

SEQ ID NO: 18563 - protein, 433 aa, Homo sapiens
MATSGDCPRSESQGEEPAECSEAGLLQEGVQPEEFVAIADYAATDETQLSFLRGEKILILRQTTADWWWGERAGCCGYIPANHVGKHVDEYDPEDTWQDEEYFGSYGTLKLHLEMLADQPRTTKYHSVILQNKESLTDKVILDVGCGTGIISLFCAHYARPRAVYAVEASEMAQHTGQLVLQNGFADIITVYQQKVEDVVLPEKVDVLVSEWMGTCLLFEFMIESILYARDAWLKEDGVIWPTMAALHLVPCSADKDYRSKVLFWDNAYEFNLSALKSLAVKEFFSKPKYNHILKPEDCLSEPCTILQLDMRTVQISDLETLRGELRFDIRKAGTLHGFTAWFSVHFQSLQEGQPPQVLSTGPFHPTTHWKQTLFMMDDPVPVHTGDVVTGSVVLQRNPVWRRHMSVALSWAVTSRQDPTSQKVGEKVFPIWR

SEQ ID NO: 18564 - protein, 284 aa, Homo sapiens
MATSGDCPRSESQGEEPAECSEAGLLQEGVQPEEFVAIADYAATDETQLSFLRGEKILILRQTTADWWWGERAGCCGYIPANHVGKHVDEYDPEDTWQDEEYFGSYGTLKLHLEMLADQPRTTKYHSVILQNKESLTDKVILDVGCGTGIISLFCAHYARPRAVYAVEASEMAQHTGQLVLQNGFADIITVYQQKVEDVVLPEKVDVLVSEWMGTCLLAAPLLSCRILPCTCASGPLHVLLACCLPLPCTCASVPLHVLLACCLPVLRAPQPSGLHLSWPIFLL

SEQ ID NO: 18565 - protein, 331 aa, Homo sapiens
MATSGDCPRSESQGEEPAECSEAGLLQEGVQPEEFVAIADYAATDETQLSFLRGEKILILRQTTADWWWGERAGCCGYIPANHVGKHVDEYDPEDTWQDEEYFGSYGTLKLHLEMLADQPRTTKYHSVILQNKESLTDKVILDVGCGTGIISLFCAHYARPRAVYAVEASEMAQHTGQLVLQNGFADIITVYQQKVEDVVLPEKVDVLVSEWMGTCLLTLRGELRFDIRKAGTLHGFTAWFSVHFQSLQEGQPPQVLSTGPFHPTTHWKQTLFMMDDPVPVHTGDVVTGSVVLQRNPVWRRHMSVALSWAVTSRQDPTSQKVGEKVFPIWR

SEQ ID NO: 18566 - protein, 289 aa, Homo sapiens
MATSGDCPRSESQGEEPAECSEAGLLQEGVQPEEFVAIADYAATDETQLSFLRGEKILILRQTTADWWWGERAGCCGYIPANHVGKHVDEYDPEDTWQDEEYFGSYGTLKLHLEMLADQPRTTKYHSVILQNKESLTDKVILDVGCGTGIISLFCAHYARPRAVYAVEASEMAQHTGQLVLQNGFADIITVYQQKVEDVVLPEKVDVLVSEWMGTCLLFEFMIESILYARDAWLKEDGVIWPTMAALHLVPCSADKDYRSKVLFWDNAYEFNLSALKLEKKSSPSGDDS

SEQ ID NO: 18567 - protein, 301 aa, Homo sapiens
MATSGDCPRSESQGEEPAECSEAGLLQEGVQPEEFVAIADYAATDETQLSFLRGEKILILRQTTADWWWGERAGCCGYIPANHVGKHVDEYDPEDTWQDEEYFGSYGTLKLHLEMLADQPRTTKYHSVILQNKESLTDKVILDVGCGTGIISLFCAHYARPRAVYAVEASEMAQHTGQLVLQNGFADIITVYQQKVEDVVLPEKVDVLVSEWMGTCLLHHTLEADAVHDGRPSPCPYRRRGHGFSCVAEKPSVEKAHVCGSELGCHFQTRPHISKSWRKSLPHLEMTVDALFGKQCAYLEG

SEQ ID NO: 18568 - protein, 228 aa, Homo sapiens
MATSGDCPRSESQGEEPAECSEAGLLQEGVQPEEFVAIADYAATDETQLSFLRGEKILILRQTTADWWWGERAGCCGYIPANHVGKHVDEYDPEDTWQDEEYFGSYGTLKLHLEMLADQPRTTKYHSVILQNKESLTDKVILDVGCGTGIISLFCAHYARPRAVYAVEASEMAQHTGQLVLQNGFADIITVYQQKVEDVVLPEKVDVLVSEWMGTCLLVGEKVFPIWR

SEQ ID NO: 18569 - protein, 277 aa, Homo sapiens
MATSGDCPRSESQGEEPAECSEAGLLQEGVQPEEFVAIADYAATDETQLSFLRGEKILILRQTTADWWWGERAGCCGYIPANHVGKHVDEYDPEDTWQDEEYFGSYGTLKLHLEMLADQPRTTKYHSVILQNKESLTDKVILDVGCGTGIISLFCAHYARPRAVYAVEASEMAQHTGQLVLQNGFADIITVYQQKVEDVVLPEKVDVLVSEWMGTCLLFEFMIESILYARDAWLKEDGVIWPTMAALHLVPCSADKDYRSKVLFWDNAYEFNLSALK

SEQ ID NO: 18570 - protein, 597 aa, Homo sapiens
MHPPKTPSGALHRKRKMAAWPFSRLWKVSDPILFQMTLIAALLPAVLGNCGPPPTLSFAAPMDITLTETRFKTGTTLKYTCLPGYVRSHSTQTLTCNSDGEWVYNTFCIYKRCRHPGELRNGQVEIKTDLSFGSQIEFSCSEGFFLIGSTTSRCEVQDRGVGWSHPLPQCEIVKCKPPPDIRNGRHSGEENFYAYGFSVTYSCDPRFSLLGHASISCTVENETIGVWRPSPPTCEKITCRKPDVSHGEMVSGFGPIYNYKDTIVFKCQKGFVLRGSSVIHCDADSKWNPSPPACEPNSCINLPDIPHASWETYPRPTKEDVYVVGTVLRYRCHPGYKPTTDEPTTVICQKNLRWTPYQGCEALCCPEPKLNNGEITQHRKSRPANHCVYFYGDEISFSCHETSRFSAICQGDGTWSPRTPSCGDICNFPPKIAHGHYKQSSSYSFFKEEIIYECDKGYILVGQAKLSCSYSHWSAPAPQCKALCRKPELVNGRLSVDKDQYVEPENVTIQCDSGYGVVGPQSITCSGNRTWYPEVPKCEWETPEGCEQVLTGKRLMQCLPNPEDVKMALEVYKLSLEIEQLELQRDSARQSTLDKEL

SEQ ID NO: 18571 - protein, 511 aa, Homo sapiens; identical to SEQ ID NO: 11699

SEQ ID NO: 18572 - protein, 665 aa, Homo sapiens
MEPRVVKPPGQDLVVESLKSRYGLGGSCPDEYDFSNFYQSKYKRRTLTSPGDLDIYSGDKVGSSLKYSDESKHCRTPLGSLFKHVNVNCLDDELDSFHDLKKQETEEELIENDYRVSTSKITKQSFKEIEKVALPTNTTSSRPRTECCSDAGDSPLKPVSCPKSKASDKRSLLPHQISQIYDELFQIHLKLQCETAAQQKFAEELQKRERFLLEREQLLFRHENALSKIKGVEEEVLTRFQIIKEQHDAEVEHLTEVLKEKNKETKRLRSSFDALKELNDTLKKQLNEASEENRKIDIQAKRVQARLDNLQRKYEFMTIQRLKGSSHAVHEMKSLKQEKAPVSKTYKVPLNGQVYELLTVFMDWISDHHLSKVKHEESGMDGKKPQLKFASQRNDIQEKCVKLLPLMTEQLQWMPFVNIKLHEPFVKFIYWSLRQLDAGAQHSTMTSTLRRLGEDIFKGVVTKGIQDNSPQHSVENKPKTAAFFKSSNLPLRFLSTLIVLKTVTQADYLAQAFDSLCLDLKTEEGKTLFLEYQAVPVILSHLRISSKGLLSNVIDSLLQMTVESKSLQPFLEACSNSLFFRTCSVLLRAPKLDLQILEKLSIILQKLSKIKSNKKLFELFTIHLMLQEIQRTTNPEHAFLCINLNSTLFNLGLTKCNSLVSSASP

SEQ ID NO: 18573 - protein, 577 aa, Homo sapiens
MEPRVVKPPGQDLVVESLKSRYGLGGSCPDEYDFSNFYQSKYKRRTLTSPGDLDIYSGDKVGSSLKYSDESKHCRTPLGSLFKHVNVNCLDDELDSFHDLKKQETEEELIENDYRVSTSKITKQSFKEIEKVALPTNTTSSRPRTECCSDAGDSPLKPVSCPKSKASDKRSLLPHQISQIYDELFQIHLKLQCETAAQQKFAEELQKRERFLLEREQLLFRHENALSKIKGVEEEVLTRFQIIKEQHDAEVEHLTEVLKEKNKETKRLRSSFDALKELNDTLKKQLNEASEENRKIDIQAKRVQARLDNLQRKYEFMTIQRLKGSSHAVHEMKSLKQEKAPVSKTYKVPLNGQVYELLTVFMDWISDHHLSKVKHEESGMDGKKPQLKFASQRNDIQEKCVKLLPLMTEQLQWMPFVNIKLHEPFVKFIYWSLRQLDAGAQHSTMTSTLRRLGEDIFKGVVTKGIQDNSPQHSVENKPKTAAFFKSSNLPLRFLSTLIVLKTVTQADYLAQAFDSLCLDLKTEEGKTLFLEYQAVPVILSHLRISSKGLLSNVIDSLLQMTVESRVIRSSLNFLRFI

SEQ ID NO: 18574 - protein, 467 aa, Homo sapiens
MSVVVQHVEEKAVHSWSRISTAGKKALEEALLVFNPMSQDLSATEAQLVAFLQGLRDDGFQPTILRSGDVYGYSSCTANPPSQTKLQARAPNPTATSPPASAPRTAMRLPAGRATLLPMPLSGRLAKASTPALAKHATTNLLLSSLKQSSASHARGAAVGFPTHLYPGVYPAMRLSVVLEALVPLKTPMPCLGAKHKAQSLQLSLADSPLKLRKSSGKGPGNPRPKAPRKTTSKGPKCLTRKGPGAGPRRGSGHQSKTNRATGSPSVRRMKGGSALGTKTAQAKVARTLAKAARAQAKVARTQAKAAKARAKAKAAQVKAKAKAKAAQVKAKAKVMAAWAKAKAKAKAVRAKAKVARTQPRGRGRPKGSAKARTTRKGQKNRPETVGQKRKRAEEAKDLPPKKRTRLGPRSPKAWLGPGTAKLLKFRAIKVDRRSSDDEVRQRAQRILRVNLSPVIRLQPLLPYSAV

SEQ ID NO: 18575 - protein, 245 aa, Homo sapiens
MEGPRGWLVLCVLAISLASMVTEDLCRAPDGKKGEAGRPGRRGRPGLKGEQGEPGAPGIRTGIQGLKGDQGEPGPSGNPGKVGYPGPSGPLGARGIPGIKGTKGSPGNIKDQPRPAFSAIRRNPPMGGNVVIFDTVITNQEEPYQNHSGRFVCTVPGYYYFTFQVLSQWEICLSIVSSSRGQVRRSLGFCDTTNKGLFQVVSGGMVLQLQQGDQVWVEKDPKKGHIYQGSEADSVFSGFLIFPSA

SEQ ID NO: 18576 - protein, 163 aa, Homo sapiens
MGDECSNPDLLAEPGSSPPWDHGNQRQEAANESNTRVPRVLKAHLGPETAQPTKRSKRNRWRRQSCQGPSPARSGQFLGSADLGLQRGVLKSAARTCLSEISNSTRASPESAQSTDPGRAARPRTRTLPTPHSFKIGEEAEEMKKKKERKRRKERKKERNFKK

SEQ ID NO: 18577 - protein, 1450 aa, Homo sapiens
MSSQGSPSVALSTTTVSSVAVQAGDSKIVIAVIKCGKWVQLQLAESQPNLLEIGSSQDETKKLLHDHELLLAKLKALEDRVWELLQEADKTAEENKDQSQVYDAMAETLGEAWAALVSMLERRTELLRLTSEFFENALEFAIKIDQAEDFLQNTHEFESAESLKSLLQLHEHHTKELLERSLALLNKSQQLTDFIEKFKCEGPNVNPELTQGAHSSCLKVDRLLELLQDRRRQLDKYLKQQWQELSQVLQICQWDQQENQVTCWFQKTIRNLQEQSLGSSLSDNEDRIHKQEELIIKAKEWNSAVEKLKSEALRILLSKDYVEKEHLQLSHQKLSQLQEEFGQLMVERNTWLKKANEFFNSANKAFDVLGRVEAYLKLLKSEGLSLAVLAVRHEELHRKIKDCTTDALQKGQTLISQVDSCSSQVSGIHEMMGCIKRRVDHLTEQCSAHKEYALKKQQLTASVEGYLRKVEMSIQKISPVLSNAMDVGSTRSESEKILNKYLELDIQAKETSHELEAAAKTMMEKNEFVSDEMVSLSSKARWLAEELNLFGQSIDYRSQVLQTYVAFLKSSEEVEMQFQSLKEFYETEIPQKEQDDAKAKHCSDSAEKQWQLFLKKSFITQDLGLEFLNLINMAKENEILDVKNEVYLMKNTMENQKAEREELSLLRLAWQLKATESKPGKQQWAAFKEQLKKTSHNLKLLQEALMPVSALDLGGSLQFILDLRQKWNDMKPQFQQLNDEVQYIMKESEELTGRGAPVKEKSQQLKDLIHFHQKQKERIQDYEDILYKVVQFHQVKEELGRLIKSRELEFVEQPKELGDAHDVQIHLRCSQEKQARVDHLHRLALSLGVDIISSVQRPHCSNVSAKNLQQQLELLEEDSMKWRAKAEEYGRTLSRSVEYCAMRDEINELKDSFKDIKKKFNNLKFNYTKKNEKSRNLKALKYQIQQVDMYAEKMQALKRKMEKVSNKTSDSFLNYPSDKVNVLLEVMKDLQKHVDDFDKVVTDYKKNLDLTEHFQEVIEECHFWYEDASATVVRVGKYSTECKTKEAVKILHQQFNKFIAPSVPQQEERIQEATDLAQHLYGLEEGQKYIEKIVTKHKEVLESVTELCESLTELEEKLKQGDVLKMNPNLEDFHYDYIDLLKEPAKNKQTIFNEERNKGQVQVADLLGINGTGEERLPQDLKVSTDKEGGVQDLLLPEDMLSGEEYECVSPDDISLPPLPGSPESPLAPSDMEVEEPVSSSLSLHISSYGVQAGTSSPGDAQESVLPPPVAFADACNDKRETFSSHFERPYLQFKAEPPLTSRGFVEKSTALHRISAEHPESMMSEVHERALQQHPQAQGGLLETREKMHADNNFTKTQDRLHASSDAFSGLRFQSGTSRGYQRQMVPREEIKSTSAKSSVVSLADQAPNFSRLLSNVTVMEGSPVTLEVEVTGFPEPTLTWWVAYNDKP

SEQ ID NO: 18578 - protein, 1530 aa, Homo sapiens
MSSQGSPSVALSTTTVSSVAVQAGDSKIVIAVIKCGKWVQLQLAESQPNLLEIGSSQDETKKLLHDHELLLAKLKALEDRVWELLQEADKTAEENKDQSQVYDAMAETLGEAWAALVSMLERRTELLRLTSEFFENALEFAIKIDQAEDFLQNTHEFESAESLKSLLQLHEHHTKELLERSLALLNKSQQLTDFIEKFKCEGPNVNPELTQGAHSSCLKVDRLLELLQDRRRQLDKYLKQQWQELSQVLQICQWDQQENQVTCWFQKTIRNLQEQSLGSSLSDNEDRIHKQEELIIKAKEWNSAVEKLKSEALRILLSKDYVEKEHLQLSHQKLSQLQEEFGQLMVERNTWLKKANEFFNSANKAFDVLGRVEAYLKLLKSEGLSLAVLAVRHEELHRKIKDCTTDALQKGQTLISQVDSCSSQVSGIHEMMGCIKRRVDHLTEQCSAHKEYALKKQQLTASVEGYLRKVEMSIQKISPVLSNAMDVGSTRSESEKILNKYLELDIQAKETSHELEAAAKTMMEKNEFVSDEMVSLSSKARWLAEELNLFGQSIDYRSQVLQTYVAFLKSSEEVEMQFQSLKEFYETEIPQKEQDDAKAKHCSDSAEKQWQLFLKKSFITQDLGLEFLNLINMAKENEILDVKNEVYLMKNTMENQKAEREELSLLRLAWQLKATESKPGKQQWAAFKEQLKKTSHNLKLLQEALMPVSALDLGGSLQFILDLRQKWNDMKPQFQQLNDEVQYIMKESEELTGRGAPVKEKSQQLKDLIHFHQKQKERIQDYEDILYKVVQFHQVKEELGRLIKSRELEFVEQPKELGDAHDVQIHLRCSQEKQARVDHLHRLALSLGVDIISSVQRPHCSNVSAKNLQQQLELLEEDSMKWRAKAEEYGRTLSRSVEYCAMRDEINELKDSFKDIKKKFNNLKFNYTKKNEKSRNLKALKYQIQQVDMYAEKMQALKRKMEKVSNKTSDSFLNYPSDKVNVLLEVMKDLQKHVDDFDKVVTDYKKNLDLTEHFQEVIEECHFWYEDASATVVRVGKYSTECKTKEAVKILHQQFNKFIAPSVPQQEERIQEATDLAQHLYGLEEGQKYIEKIVTKHKEVLESVTELCESLTELEEKLKQGDVLKMNPNLEDFHYDYIDLLKEPAKNKQTIFNEERNKGQVQVADLLGINGTGEERLPQDLKVSTDKEGGVQDLLLPEDMLSGEEYECVSPDDISLPPLPGSPESPLAPSDMEVEEPVSSSLSLHISSYGVQAGTSSPGDAQESVLPPPVAFADACNDKRETFSSHFERPYLQFKAEPPLTSRGFVEKSTALHRISAEHPESMMSEVHERALQQHPQAQGGLLETREKMHADNNFTKTQDRLHASSDAFSGLRFQSGTSRGYQRQMVPREEIKSTSAKSSVVSLADQAPNFSRLLSNVTVMEGSPVTLEVEVTGFPEPTLTWYKKGQKLSADGHLQVLHKETRHSVFIPKVCKADAGLYVARAQNSSGALSSNVILHVTGNCRLPITRVNWITLCVVYVSVSLMYWLLTQ

SEQ ID NO: 18579 - protein, 598 aa, Homo sapiens
MVQKTSMSRGPYPPSQEIPMEVFDPSPQGKYSKRKGRFKRSDGSTSSDTTSNSFVRQGSAESYTSRPSDSDVSLEEDREALRKEAERQALAQLEKAKTKPVAFAVRTNVGYNPSPGDEVPVQGVAITFEPKDFLHIKEKYNNDWWIGRLVKEGCEVGFIPSPVKLDSLRLLQEQKLRQNRLGSSKSGDNSSSSLGDVVTGTRRPTPPASAKQKQKSTEHVPPYDVVPSMRPIILVGPSLKGYEVTDMMQKALFDFLKHRFDGRISITRVTADISLAKRSVLNNPSKHIIIERSNTRSSLAEVQSEIERIFELARTLQLVALDADTINHPAQLSKTSLAPIIVYIKITSPKVLQRLIKSRGKSQSKHLNVQIAASEKLAQCPPEMFDIILDENQLEDACEHLAEYLEAYWKATHPPSSTPPNPLLNRTMATAALAASPAPVSNLQGPYLASGDQPLERATGEHASMHEYPGELGQPPGLYPSSHPPGRAGTLRALSRQDTFDADTPGSRNSAYTELGDSCVDMETDPSEGPGLGDPAGGGTPPARQGSWEDEEEDYEEELTDNRNRGRNKARYCAEGGGPVLGRNKNELEGWGRGVYIR

SEQ ID NO: 18580 - protein, 523 aa, Homo sapiens
MVQKTSMSRGPYPPSQEIPMEVFDPSPQGKYSKRKGRFKRSDGSTSSDTTSNSFVRQGSAESYTSRPSDSDVSLEEDREALRKEAERQALAQLEKAKTKPVAFAVRTNVGYNPSPGDEVPVQGVAITFEPKDFLHIKEKYNNDWWIGRLVKEGCEVGFIPSPVKLDSLRLLQEQKLRQNRLGSSKSGDNSSSSLGDVVTGTRRPTPPASGNEMTNLAFELDPLELEEEEAELGEQSGSAKTSVSSVTTPPPHGKRIPFFKKTEHVPPYDVVPSMRPIILVGPSLKGYEVTDMMQKALFDFLKHRFDGRISITRVTADISLAKRSVLNNPSKHIIIERSNTRSSLAEVQSEIERIFELARTLQLVALDADTINHPAQLSKTSLAPIIVYIKITSPKVLQRLIKSRGKSQSKHLNVQIAASEKLAQCPPEMFDIILDENQLEDACEHLAEYLEAYWKATHPPSSTPPNPLLNRTMATAALAASPAPVSNLQVQVLTSLRRNLGFWGGLESSQRGSVVPQEQEHAM

SEQ ID NO: 18581 - protein, 478 aa, Homo sapiens
MVQKTSMSRGPYPPSQEIPMEVFDPSPQGKYSKRKGRFKRSDGSTSSDTTSNSFVRQGSAESYTSRPSDSDVSLEEDREALRKEAERQALAQLEKAKTKPVAFAVRTNVGYNPSPGDEVPVQGVAITFEPKDFLHIKEKYNNDWWIGRLVKEGCEVGFIPSPVKLDSLRLLQEQKLRQNRLGSSKSGDNSSSSLGDVVTGTRRPTPPASAKQKQKSTEHVPPYDVVPSMRPIILVGPSLKGYEVTDMMQKALFDFLKHRFDGRISITRVTADISLAKRSVLNNPSKHIIIERSNTRSSLAEVQSEIERIFELARTLQLVALDADTINHPAQLSKTSLAPIIVYIKITSPKVLQRLIKSRGKSQSKHLNVQIAASEKLAQCPPEMFDIILDENQLEDACEHLAEYLEAYWKATHPPSSTPPNPLLNRTMATAALAASPAPVSNLQVQVLTSLRRNLGFWGGLESSQRGSVVPQEQEHAM

SEQ ID NO: 18582 - protein, 437 aa, Homo sapiens
MPKFKAARGVGGQEKHAPLADQILAGNAVRAGVREKRRGRGTGEAEEEYVGPRLSRRILQQARQQQEELEAEHGTGDKPAAPRERTTRLGPRMPQDGSDDEDEEWPTLEKAATMTAAGHHAEVVVDPEDERAIEMFMNKNPPARRTLADIIMEKLTEKQTEVETVMSEVSGFPMPQLDPRVLEVYRGVREVLSKYRSGKLPKAFKIIPALSNWEQILYVTEPEAWTAAAMYQATRIFASNLKERMAQRFYNLVLLPRVRDDVAEYKRLNFHLYMALKKALFKPGAWFKGILIPLCESGTCTLREAIIVGSIITKCSIPVLHSSAAMLKIAEMEYSGANSIFLRLLLDKKYALPYRVLDALVFHFLGFRTEKRELPVLWHQCLLTLVQRYKADLATDQKEALLELLRLQPHPQLSPEIRRELQSAVPRDVEDVPITVE

SEQ ID NO: 18583 - protein, 845 aa, Homo sapiens
MSNSRPRSRRDAGGGAGAAGRDELVSRSLQSAEHCLGVQDFGTAYAHYLLVLSLAPELKHDVKETFQYTLFRWAEELDALSRIQDLLGCYEQALELFPDDEVICNSMGEHLFRMGFRDEAAGYFHKAVKLNPDFSDAKENFYRVANWLVERWHFIMLNDTKRNTIYNAAIQKAVCLGSKSVLDIGAGTGILSMFAKKAGAHSVYACELSKTMYELACDVVAANKMEAGIKLLHTKSLDIEIPKHIPERVSLVVTETVDAGLFGEGIVESLIHAWEHLLLQPKTKGESANCEKYGKVIPASAVIFGMAVECAEIRRHHRVGIKDIAGIHLPTNVKFQSPAYSSVDTEETIEPYTTEKMSRVPGGYLALTECFEIMTVDFNNLQELKSLATKKPDKIGIPVIKEGILDAIMVWFVLQLDDEHSLSTSPSEETCWEQAVYPVQDLADYWIKPGDHVMMEVSCQDCYLRIQSISVLGLECEMDVAKSFTQNKDLLSLGNEAELCSALANLQTSKPDAVEQTCILESTEIALLNNIPYHEGFKMAMSKVLSSLTPEKLYQTMDTHCQNEMSSGTGQSNTVQNILEPFYVLDVSEGFSVLPVIAGTLGQVKPYSSVEKDQHRIALDLISEANHFPKETLEFWLRHVEDESAMLQRPKSDKLWSIIILDVIEPSGLIQQEIMEKAAISRCLLQSGGKIFPQYVLMFGLLVESQTLLEENAVQGTERTLGLNIAPFINQFQVPIRVFLDLSSLPCIPLSKPVELLRLDLMTPYLNTSNREVKVYVCKSGRLTAIPFWYHMYLDEEIRLDTSSEASHWKQAAVVLDNPIQVEMGEELVLSIQHHKSNVSITVKQ

SEQ ID NO: 18584 - protein, 732 aa, Homo sapiens
MGFRDEAAGYFHKAVKLNPDFSDAKENFYRVANWLVERWHFIMLNDTKRNTIYNAAIQKAVCLGSKSVLDIGAGTGILSMFAKKAGAHSVYACELSKTMYELACDVVAANKMEAGIKLLHTKSLDIEIPKHIPERVSLVVTETVDAGLFGEGIVESLIHAWEHLLLQPKTKGESANCEKYGKVIPASAVIFGMAVECAEIRRHHRVGIKDIAGIHLPTNVKFQSPAYSSVDTEETIEPYTTEKMSRVPGGYLALTECFEIMTVDFNNLQELKSLATKKPDKIGIPVIKEGILDAIMVWFVLQLDDEHSLSTSPSEETCWEQAVYPVQDLADYWIKPGDHVMMEVSCQDCYLRIQSISVLGLECEMDVAKSFTQNKDLLSLGNEAELCSALANLQTSKPDAVEQTCILESTEIALLNNIPYHEGFKMAMSKVLSSLTPEKLYQTMDTHCQNEMSSGTGQSNTVQNILEPFYVLDVSEGFSVLPVIAGTLGQVKPYSSVEKDQHRIALDLISEANHFPKETLEFWLRHVEDESAMLQRPKSDKLWSIIILDVIEPSGLIQQEIMEKAAISRCLLQSGGKIFPQYVLMFGLLVESQTLLEENAVQGTERTLGLNIAPFINQFQVPIRVFLDLSSLPCIPLSKPVELLRLDLMTPYLNTSNREVKVYVCKSGRLTAIPFWYHMYLDEEIRLDTSSEASHWKQAAVVLDNPIQVEMGEELVLSIQHHKSNVSITVKQ

SEQ ID NO: 18585 - protein, 333 aa, Homo sapiens
MLFLQFLLLALLLPGGDNADASQEHVSFHVIQIFSFVNQSWARGQGSGWLDELQTHGWDSESGTIIFLHNWSKGNFSNEELSDLELLFRFYLFGLTREIQDHASQDYSKYPFEVQVKAGCELHSGKSPEGFFQVAFNGLDLLSFQNTTWVPSPGCGSLAQSVCHLLNHQYEGVTETVYNLIRSTCPRFLLGLLDAGKMYVHRQVRPEAWLSSRPSLGSGQLLLVCHASGFYPKPVWVTWMRNEQEQLGTKHGDILPNADGTWYLQVILEVASEEPAGLSCRVRHSSLGGQDIILYWGHHFSMNWIALVVIVPLVILIVLVLWFKKHCSYQDIL

SEQ ID NO: 18586 - protein, 500 aa, Homo sapiens
MAAASVSAASGSHLSNSFAEPSRSNGSMVRHSSSPYVVYPSDKPFLNSDLRRSPSKPTLAYPESNSRAIFSALKNLQDKIRRLELERIQAEESVKTLSRETIEYKKVLDEQIQERENSKNEESKHNQELTSQLLAAENKCNLLEKQLEYMRNMIKHAEMERTSVLEKQVSLERERQHDQTHVQSQLEKLDLLEQEYNKLTTMQALAEKKMQELEAKLHEEEQERKRMQAKAAELQTGLETNRLIFEDKATPCVPNARRIKKKKSKPPEKKSSRNYFGAQPHYRLCLGDMPFVAGKSTSPSHAVVANVQLVLHLMKQHSKALCNDRVINSIPLAKQVSSRGGKSKKLSVTPPSSNGINEELSEVLQTLQDEFGQMSFDHQQLAKLIQESPTVELKDKLECELEALVGRMEAKANQITKVRKYQAQLEKQKLEKQKKELKATKKTLDEERNSSSRSGITGTTNKKDFMKLRPGEKRRKNLQLLKDMQSIQNSLQSSSLCWDY

SEQ ID NO: 18587 - protein, 474 aa, Homo sapiens
MAAASVSAASGSHLSNSFAEPSRSNGSMVRHSSSPYVVYPSDKPFLNSDLRRSPSKPTLAYPESNSRAIFSALKNLQDKIRRLELERIQAEESVKTLSRETIEYKKVLDEQIQERENSKNEESKHNQELTSQLLAAENKCNLLEKQLEYMRNMIKHAEMERTSVLEKQVSLERERQHDQTHVQSQLEKLDLLEQEYNKLTTMQALAEKKMQELEAKLHEEEQERKRMQAKAAELQTGLETNRLIFEDKATPCVPNARRIKKKKSKPPEKSTSPSHAVVANVQLVLHLMKQHSKALCNDRVINSIPLAKQVSSRGGKSKKLSVTPPSSNGINEELSEVLQTLQDEFGQMSFDHQQLAKLIQESPTVELKDKLECELEALVGRMEAKANQITKVRKYQAQLEKQKLEKQKKELKATKKTLDEERNSSSRSGITGTTNKKDFMKLRPGEKRRKNLQLLKDMQSIQNSLQSSSLCWDY

SEQ ID NO: 18588 - protein, 270 aa, Homo sapiens
MAAASVSAASGSHLSNSFAEPSRSNGSMVRHSSSPYVVYPSDKPFLNSDLRRSPSKPTLAYPESNSRAIFSALKNLQDKIRRLELERIQAEESVKTLSRETIEYKKVLDEQIQERENSKNEESKHNQELTSQLLAAENKCNLLEKQLEYMRNMIKHAEMERTSVLEKQVSLERERQHDQTHVQSQLEKLDLLEQEYNKLTTMQALAEKKMQELEAKLHEEEQERKRMQAKAAELQTGLETNRLIFEDKATPCVPNARRIKKKKSKPPEKV

SEQ ID NO: 18589 - protein, 488 aa, Homo sapiens
MLTRIDNSFAEPSRSNGSMVRHSSSPYVVYPSDKPFLNSDLRRSPSKPTLAYPESNSRAIFSALKNLQDKIRRLELERIQAEESVKTLSRETIEYKKVLDEQIQERENSKNEESKHNQELTSQLLAAENKCNLLEKQLEYMRNMIKHAEMERTSVLEKQVSLERERQHDQTHVQSQLEKLDLLEQEYNKLTTMQALAEKKMQELEAKLHEEEQERKRMQAKAAELQTGLETNRLIFEDKATPCVPNARRIKKKKSKPPEKKSSRNYFGAQPHYRLCLGDMPFVAGKSTSPSHAVVANVQLVLHLMKQHSKALCNDRVINSIPLAKQVSSRGGKSKKLSVTPPSSNGINEELSEVLQTLQDEFGQMSFDHQQLAKLIQESPTVELKDKLECELEALVGRMEAKANQITKVRKYQAQLEKQKLEKQKKELKATKKTLDEERNSSSRSGITGTTNKKDFMKLRPGEKRRKNLQLLKDMQSIQNSLQSSSLC

SEQ ID NO: 18590 - protein, 491 aa, Homo sapiens
MLTRIDNSFAEPSRSNGSMVRHSSSPYVVYPSDKPFLNSDLRRSPSKPTLAYPESNSRAIFSALKNLQDKIRRLELERIQAEESVKTLSRETIEYKKVLDEQIQERENSKNEESKHNQELTSQLLAAENKCNLLEKQLEYMRNMIKHAEMERTSVLEKQVSLERERQHDQTHVQSQLEKLDLLEQEYNKLTTMQALAEKKMQELEAKLHEEEQERKRMQAKAAELQTGLETNRLIFEDKATPCVPNARRIKKKKSKPPEKKSSRNYFGAQPHYRLCLGDMPFVAGKSTSPSHAVVANVQLVLHLMKQHSKALCNDRVINSIPLAKQVSSRGGKSKKLSVTPPSSNGINEELSEVLQTLQDEFGQMSFDHQQLAKLIQESPTVELKDKLECELEALVGRMEAKANQITKVRKYQAQLEKQKLEKQKKELKATKKTLDEERNSSSRSGITGTTNKKDFMKLRPGEKRRKNLQLLKDMQSIQNSLQSSSLCWDY

SEQ ID NO: 18591 - protein, 388 aa, Homo sapiens
MLLLFLLFEGLCCPGENTAAPQALQSYHLAAEEQLSFRMLQTSSFANHSWAHSEGSGWLGDLQTHGWDTVLGTIRFLKPWSHGNFSKQELKNLQSLFQLYFHSFIQIVQASAGQFQLEYPFEIQILAGCRMNAPQIFLNMAYQGSDFLSFQGISWEPSPGAGIRAQNICKVLNRYLDIKEILQSLLGHTCPRFLAGLMEAGESELKRKVKPEAWLSCGPSPGPGRLQLVCHVSGFYPKPVWVMWMRGEQEQRGTQRGDVLPNADETWYLRATLDVAAGEAAGLSCRVKHSSLGGHDLIIHWGGYSIFLILICLTVIVTLVILVVVDSRLKKQSSNKNILSPHTPSPVFLMGANTQDTKNSRHQFCLAQVSWIKNRVLKKWKTRLNQLW

SEQ ID NO: 18592 - protein, 376 aa, Homo sapiens
MLLLFLLFEGLCCPGENTAAPQALQSYHLAAEEQLSFRMLQTSSFANHSWAHSEGSGWLGDLQTHGWDTVLGTIRFLKPWSHGNFSKQELKNLQSLFQLYFHSFIQIVQASAGQFQLEYPFEIQILAGCRMNAPQIFLNMAYQGSDFLSFQGISWEPSPGAGIRAQNICKVLNRYLDIKEILQSLLGHTCPRFLAGLMEAGESELKRKVKPEAWLSCGPSPGPGRLQLVCHVSGFYPKPVWVMWMRGEQEQRGTQRGDVLPNADETWYLRATLDVAAGEAAGLSCRVKHSSLGGHDLIIHWGGYSIFLILICLTVIVTLVILVVVDSRLKKQSPVFLMGANTQDTKNSRHQFCLAQVSWIKNRVLKKWKTRLNQLW

SEQ ID NO: 18593 - protein, 290 aa, Homo sapiens
MLLLFLLFEGLCCPGENTAAPQALQSYHLAAEEQLSFRMLQTSSFANHSWAHSEGSGWLGDLQTHGWDTVLGTIRFLKPWSHGNFSKQELKNLQSLFQLYFHSFIQIVQASAGQFQLEYPFEIQILAGCRMNAPQIFLNMAYQGSDFLSFQGISWEPSPGAGIRAQNICKVLNRYLDIKEILQSLLGHTCPRFLAGLMEAGESELKRKVKPEAWLSCGPSPGPGRLQLVCHVSGFYPKPVWVMWMRGEQEQRGTQRGDVLPNADETWWIFHLSHPDLFDCDSYPGHIGCS

SEQ ID NO: 18594 - protein, 321 aa, Homo sapiens
MLLLFLLFEGLCCPGENTAAPQALQSYHLAAEEQLSFRMLQTSSFANHSWAHSEGSGWLGDLQTHGWDTVLGTIRFLKPWSHGNFSKQELKNLQSLFQLYFHSFIQIVQASAGQFQLEYPFEIQILAGCRMNAPQIFLNMAYQGSDFLSFQGISWEPSPGAGIRAQNICKVLNRYLDIKEILQSLLGHTCPRFLAGLMEAGESELKRKVKPEAWLSCGPSPGPGRLQLVCHVSGFYPKPVWVMWMRGGYSIFLILICLTVIVTLVILVVVDSRLKKQSPVFLMGANTQDTKNSRHQFCLAQVSWIKNRVLKKWKTRLNQLW

SEQ ID NO: 18595 - protein, 298 aa, Homo sapiens
MLLLFLLFEGLCCPGENTAAPQALQSYHLAAEEQLSFRMLQTSSFANHSWAHSEGSGWLGDLQTHGWDTVLGTIRFLKPWSHGNFSKQELKNLQSLFQLYFHSFIQIVQASAGQFQLELKPEAWLSCGPSPGPGRLQLVCHVSGFYPKPVWVMWMRGEQEQRGTQRGDVLPNADETWYLRATLDVAAGEAAGLSCRVKHSSLGGHDLIIHWGGYSIFLILICLTVIVTLVILVVVDSRLKKQSSNKNILSPHTPSPVFLMGANTQDTKNSRHQFCLAQVSWIKNRVLKKWKTRLNQLW

SEQ ID NO: 18596 - protein, 286 aa, Homo sapiens
MLLLFLLFEGLCCPGENTAAPQALQSYHLAAEEQLSFRMLQTSSFANHSWAHSEGSGWLGDLQTHGWDTVLGTIRFLKPWSHGNFSKQELKNLQSLFQLYFHSFIQIVQASAGQFQLELKPEAWLSCGPSPGPGRLQLVCHVSGFYPKPVWVMWMRGEQEQRGTQRGDVLPNADETWYLRATLDVAAGEAAGLSCRVKHSSLGGHDLIIHWGGYSIFLILICLTVIVTLVILVVVDSRLKKQSPVFLMGANTQDTKNSRHQFCLAQVSWIKNRVLKKWKTRLNQLW

SEQ ID NO: 18597 - protein, 231 aa, Homo sapiens
MLLLFLLFEGLCCPGENTAAPQALQSYHLAAEEQLSFRMLQTSSFANHSWAHSEGSGWLGDLQTHGWDTVLGTIRFLKPWSHGNFSKQELKNLQSLFQLYFHSFIQIVQASAGQFQLELKPEAWLSCGPSPGPGRLQLVCHVSGFYPKPVWVMWMRGGYSIFLILICLTVIVTLVILVVVDSRLKKQSPVFLMGANTQDTKNSRHQFCLAQVSWIKNRVLKKWKTRLNQLW

SEQ ID NO: 18598 - protein, 199 aa, Homo sapiens
MLLLFLLFEGLCCPGENTAVKPEAWLSCGPSPGPGRLQLVCHVSGFYPKPVWVMWMRGEQEQRGTQRGDVLPNADETWYLRATLDVAAGEAAGLSCRVKHSSLGGHDLIIHWGGYSIFLILICLTVIVTLVILVVVDSRLKKQSSNKNILSPHTPSPVFLMGANTQDTKNSRHQFCLAQVSWIKNRVLKKWKTRLNQLW

SEQ ID NO: 18599 - protein, 187 aa, Homo sapiens
MLLLFLLFEGLCCPGENTAVKPEAWLSCGPSPGPGRLQLVCHVSGFYPKPVWVMWMRGEQEQRGTQRGDVLPNADETWYLRATLDVAAGEAAGLSCRVKHSSLGGHDLIIHWGGYSIFLILICLTVIVTLVILVVVDSRLKKQSPVFLMGANTQDTKNSRHQFCLAQVSWIKNRVLKKWKTRLNQLW

SEQ ID NO: 18600 - protein, 101 aa, Homo sapiens
MLLLFLLFEGLCCPGENTAVKPEAWLSCGPSPGPGRLQLVCHVSGFYPKPVWVMWMRGEQEQRGTQRGDVLPNADETWWIFHLSHPDLFDCDSYPGHIGCS

SEQ ID NO: 18601 - protein, 144 aa, Homo sapiens
MLLLFLLFEGLCCPGENTAVKPEAWLSCGPSPGPGRLQLVCHVSGFYPKPVWVMWMRGGYSIFLILICLTVIVTLVILVVVDSRLKKQSSNKNILSPHTPSPVFLMGANTQDTKNSRHQFCLAQVSWIKNRVLKKWKTRLNQLW

SEQ ID NO: 18602 - protein, 132 aa, Homo sapiens
MLLLFLLFEGLCCPGENTAVKPEAWLSCGPSPGPGRLQLVCHVSGFYPKPVWVMWMRGGYSIFLILICLTVIVTLVILVVVDSRLKKQSPVFLMGANTQDTKNSRHQFCLAQVSWIKNRVLKKWKTRLNQLW

SEQ ID NO: 18603 - protein, 289 aa, Homo sapiens
MLLLFLLFEGLCCPGENTADPFEIQILAGCRMNAPQIFLNMAYQGSDFLSFQGISWEPSPGAGIRAQNICKVLNRYLDIKEILQSLLGHTCPRFLAGLMEAGESELKRKVKPEAWLSCGPSPGPGRLQLVCHVSGFYPKPVWVMWMRGEQEQRGTQRGDVLPNADETWYLRATLDVAAGEAAGLSCRVKHSSLGGHDLIIHWGGYSIFLILICLTVIVTLVILVVVDSRLKKQSSNKNILSPHTPSPVFLMGANTQDTKNSRHQFCLAQVSWIKNRVLKKWKTRLNQLW

SEQ ID NO: 18604 - protein, 527 aa, Homo sapiens
MENQEKASIAGHMFDVVVIGGGISGLSAAKLLTEYGVSVLVLEARDRVGGRTYTIRNEHVDYVDVGGAYVGPTQNRILRLSKELGIETYKVNVSERLVQYVKGKTYPFRGAFPPVWNPIAYLDYNNLWRTIDNMGKEIPTDAPWEAQHADKWDKMTMKELIDKICWTKTARRFAYLFVNINVTSEPHEVSALWFLWYVKQCGGTTRIFSVTNGGQERKFVGGSGQVSERIMDLLGDQVKLNHPVTHVDQSSDNIIIETLNHEHYECKYVINAIPPTLTAKIHFRPELPAERNQLIQRLPMGAVIKCMMYYKEAFWKKKDYCGCMIIEDEDAPISITLDDTKPDGSLPAIMGFILARKADRLAKLHKEIRKKKICELYAKVLGSQEALHPVHYEEKNWCEEQYSGGCYTAYFPPGIMTQYGRVIRQPVGRIFFAGTETATKWSGYMEGAVEAGERAAREVLNGLGKVTEKDIWVQEPESKDVPAVEITHTFWERNLPSVSGLLKIIGFSTSVTALGFVLYKYKLLPRS

SEQ ID NO: 18605 - protein, 394 aa, Homo sapiens
MGKEIPTDAPWEAQHADKWDKMTMKELIDKICWTKTARRFAYLFVNINVTSEPHEVSALWFLWYVKQCGGTTRIFSVTNGGQERKFVGGSGQVSERIMDLLGDQVKLNHPVTHVDQSSDNIIIETLNHEHYECKYVINAIPPTLTAKIHFRPELPAERNQLIQRLPMGAVIKCMMYYKEAFWKKKDYCGCMIIEDEDAPISITLDDTKPDGSLPAIMGFILARKADRLAKLHKEIRKKKICELYAKVLGSQEALHPVHYEEKNWCEEQYSGGCYTAYFPPGIMTQYGRVIRQPVGRIFFAGTETATKWSGYMEGAVEAGERAAREVLNGLGKVTEKDIWVQEPESKDVPAVEITHTFWERNLPSVSGLLKIIGFSTSVTALGFVLYKYKLLPRS

SEQ ID NO: 18606 - protein, 763 aa, Homo sapiens
MNQKTILVLLILAVITIFALVCVLLVGRGGDGGEPSQLPHCPSVSPSAQPWTHPGQSQLFADLSREELTAVMRFLTQRLGPGLVDAAQARPSDNCVFSVELQLPPKAAALAHLDRGSPPPAREALAIVFFGRQPQPNVSELVVGPLPHPSYMRDVTVERHGGPLPYHRRPVLFQEYLDIDQMIFNRELPQASGLLHHCCFYKHRGRNLVTMTTAPRGLQSGDRATWFGLYYNISGAGFFLHHVGLELLVNHKALDPARWTIQKVFYQGRYYDSLAQLEAQFEAGLVNVVLIPDNGTGGSWSLKSPVPPGPAPPLQFYPQGPRFSVQGSRVASSLWTFSFGLGAFSGPRIFDVRFQGERLVYEISLQEALAIYGGNSPAAMTTRYVDGGFGMGKYTTPLTRGVDCPYLATYVDWHFLLESQAPKTIRDAFCVFEQNQGLPLRRHHSDLYSHYFGGLAETVLVVRSMSTLLNYDYVWDTVFHPSGAIEIRFYATGYISSAFLFGATGKYGNQVSEHTLGTVHTHSAHFKVDLDVAGLENWVWAEDMVFVPMAVPWSPEHQLQRLQVTRKLLEMEEQAAFLVGSATPRYLYLASNHSNKWGHPRGYRIQMLSFAGEPLPQNSSMARGFSWERYQLAVTQRKEEEPSSSSVFNQNDPWAPTVDFSDFINNETIAGKDLVAWVTAGFLHIPHAEDIPNTVTVGNGVGFFLRPYNFFDEDPSFYSADSIYFRGDQDAGACEVNPLACLPQAAACAPDLPAFSHGGFSHN

SEQ ID NO: 18607 - protein, 634 aa, Homo sapiens
MNQKTILVLLILAVITIFALVCVLLVGRGGDGGEPSQLPHCPSVSPSAQPWTHPGQSQLFADLSREELTAVMRFLTQRLGPGLVDAAQARPSDNCVFSVELQLPPKAAALAHLDRGSPPPAREALAIVFFGRQPQPNVSELVVGPLPHPSYMRDVTVERHGGPLPYHRRPVLFQEYLDIDQMIFNRELPQASGLLHHCCFYKHRGRNLVTMTTAPRGLQSGDRATWFGLYYNISGAGFFLHHVGLELLVNHKALDPARWTIQKVFYQGRYYDSLAQLEAQFEAGLVNVVLIPDNGTGGSWSLKSPVPPGPAPPLQFYPQGPRFSVQGSRVASSLWTFSFGLGAFSGPRIFDVRFQGERLVYEISLQEALAIYGGNSPAAMTTRYVDGGFGMGKYTTPLTRGVDCPYLATYVDWHFLLESQAPKTIRDAFCVFEQNQGLPLRRHHSDLYSHYFGGLAETVLVVRSMSTLLNYDYVWDTVFHPSGAIEIRFYATGYISSAFLFGATGKYGNQVSEHTLGTVHTHSAHFKVDLDVAGLENWVWAEDMVFVPMAVPWSPEHQLQRLQVTRKLLEMEEQAAFLVGSATPRYLYLASNHSNKWGHPRGYRIQMLSFAGEPLPQNSSMARGFSWERIWWPG

SEQ ID NO: 18608 - protein, 220 aa, Homo sapiens
MVFVPMAVPWSPEHQLQRLQVTRKLLEMEEQAAFLVGSATPRYLYLASNHSNKWGHPRGYRIQMLSFAGEPLPQNSSMARGFSWERYQLAVTQRKEEEPSSSSVFNQNDPWAPTVDFSDFINNETIAGKDLVAWVTAGFLHIPHAEDIPNTVTVGNGVGFFLRPYNFFDEDPSFYSADSIYFRGDQDAGACEVNPLACLPQAAACAPDLPAFSHGGFSHN

SEQ ID NO: 18609 - protein, 260 aa, Homo sapiens
MARPHPWWLCVLGTLVGLSATPAPKSCPERHYWAQGKLCCQMCEPGTFLVKDCDQHRKAAQCDPCIPGVSFSPDHHTRPHCESCRHCNSGLLVRNCTITANAECACRNGWQCRDKECTECDPLPNPSLTARSSQALSPHPQPTHLPYVSEMLEARTAGHMQTLADFRQLPARTLSTHWPPQRSLCSSDFIRILVIFSGMFLVFTLAGALFLHQRRKYRSNKGESPVEPAEPCHYSCPREEEGSTIPIQEDYRKPEPACSP

SEQ ID NO: 18610 - protein, 350 aa, Homo sapiens
MAAAGPAAGPTGPEPMPSYAQLVQRGWGSALAAARGCTDCGWGLARRGLAEHAHLAPPELLLLALGALGWTALRSAATARLFRPLAKRCCLQPRDAAKMPESAWKFLFYLGSWSYSAYLLFGTDYPFFHDPPSVFYDWTPGMAVPRDIAAAYLLQGSFYGHSIYATLYMDTWRKDSVVMLLHHVVTLILIVSSYAFRYHNVGILVLFLHDISDVQLEFTKLNIYFKSRGGSYHRLHALAADLGCLSFGFSWFWFRLYWFPLKVLYATSHCSLRTVPDIPFYFFFNALLLLLTLMNLYWFLYIVAFAAKVLTGQVHELKDLREYDTAEAQSLKPSKAEKPLRNGLVKDKRF

SEQ ID NO: 18611 - protein, 337 aa, Homo sapiens
MAAAGPAAGPTGPEPMPSYAQLVQRGWGSALAAARGCTDCGWGLARRGLAEHAHLAPPELLLLALGALGWTALRSAATARLFRPLAKRCCLQPRDAAKMPESAWKFLFYLGSWSYSAYLLFGTDYPFFHDPPSVFYDWTPGMAVPRDIAAAYLLQGSFYGHSIYATLYMDTWRKDSVVMLLHHVVTLILIVSSYAFRYHNVGILVLFLHDISDVQLEFTKLNIYFKSRGGSYHRLHALAADLGCLSFGFSWFWFRLYWFPLKVLYATSHCSLRTVPDIPFYFFFNALLLLLTLMNLYWFLYIVAFAAKVLTGQVHELKDLREYDTAEAQSLKPSKAE

SEQ ID NO: 18612 - protein, 198 aa, Homo sapiens
MSNVRVSNGSPSLERMDARQAEHPKPSACRNLFGPVDHEELTRDLEKHCRDMEEASQRKWNFDFQNHKPLEGKYEWQEVEKGSLPEFYYRPPRPPKGACKVPAQESQDVSGSRPAAPLIGAPANSEDTHLVDPKTDPSDSQTGLAEQCAGIRKRPATDDSSTQNKRANRTEENVSDGSPNAGSVEQTPKKPGLRRRQT

SEQ ID NO: 18613 - protein, 650 aa, Homo sapiens
MASGEHSPGSGAARRPLHSAQAVDVASASNFRAFELLHLHLDLRAEFGPPGPGAGSRGLSGTAVLDLRCLEPEGAAELRLDSHPCLEVTAAALRRERPGSEEPPAEPVSFYTQPFSHYGQALCVSFPQPCRAAERLQVLLTYRVGEGPGVCWLAPEQTAGKKKPFVYTQGQAVLNRAFFPCFDTPAVKYKYSALIEVPDGFTAVMSASTWEKRGPNKFFFQMCQPIPSYLIALAIGDLVSAEVGPRSRVWAEPCLIDAAKEEYNGVIEEFLATGEKLFGPYVWGRYDLLFMPPSFPFGGMENPCLTFVTPCLLAGDRSLADVIIHEISHSWFGNLVTNANWGEFWLNEGFTMYAQRRISTILFGAAYTCLEAATGRALLRQHMDITGEENPLNKLRVKIEPGVDPDDTYNETPYEKGFCFVSYLAHLVGDQDQFDSFLKAYVHEFKFRSILADDFLDFYLEYFPELKKKRVDIIPGFEFDRWLNTPGWPPYLPDLSPGDSLMKPAEELAQLWAAEELDMKAIEAVAISPWKTYQLVYFLDKILQKSPLPPGNVKKLGDTYPSISNARNAELRLRWGQIVLKNDHQEDFWKVKEFLHNQGKQKYTLPLYHAMMGGSEVAQTLAKETFASTASQLHSNVVNYVQQIVAPKGS

SEQ ID NO: 18614 - protein, 879 aa, Homo sapiens
MRNRGQGLFRLRSRCFLHQSLPLGAGRRKGLDVAEPGPSRCRSDSPAVAAVVPAMASYPSGSGKPKAKYPFKKRASLQASTAAPEARGGLGAPPLQSARSLPGPAPCLKHFPLDLRTSMDGKCKEIAEELFTRSLAESELRSAPYEFPEESPIEQLEERRQRLERQISQDVKLEPDILLRAKQDFLKTDSDSDLQLYKEQGEGQGDRSLRERDVLEREFQRVTISGEEKCGVPFTDLLDAAKSVVRALFIREKYMALSLQSFCPTTRRYLQQLAEKPLETRTYEQGPDTPVSADAPVHPPALEQHPYEHCEPSTMPGDLGLGLRMVRGVVHVYTRREPDEHCSEVELPYPDLQEFVADVNVLMALIINGPIKSFCYRRLQYLSSKFQMHVLLNEMKELAAQKKVPHRDFYNIRKVDTHIHASSCMNQKHLLRFIKRAMKRHLEEIVHVEQGREQTLREVFESMNLTAYDLSVDTLDVHADRNTFHRFDKFNAKYNPIGESVLREIFIKTDNRVSGKYFAHIIKEVMSDLEESKYQNAELRLSIYGRSRDEWDKLARWAVMHRVHSPNVRWLVQVPRLFDVYRTKGQLANFQEMLENIFLPLFEATVHPASHPELHLFLEHVDGFDSVDDESKPENHVFNLESPLPEAWVEEDNPPYAYYLYYTFANMAMLNHLRRQRGFHTFVLRPHCGEAGPIHHLVSAFMLAENISHGLLLRKAPVLQYLYYLAQIGIAMSPLSNNSLFLSYHRNPLPEYLSRGLMVSLSTDDPLQFHFTKEPLMEEYSIATQVWKLSSCDMCELARNSVLMSGFSHKVKSHWLGPNYTKEGPEGNDIRRTNVPDIRVGYRYETLCQELALITQAVQSEMLETIPEEAGITMSPGPQ

SEQ ID NO: 18615 - protein, 798 aa, Homo sapiens
MASEARGGLGAPPLQSARSLPGPAPCLKHFPLDLRTSMDGKCKEIAEELFTRSLAESELRSAPYEFPEESPIEQLEERRQRLERQISQDVKLEPDILLRAKQDFLKTDSDSDLQLYKEQGEGQGDRSLRERDVLEREFQRVTISGEEKCGVPFTDLLDAAKSVVRALFIREKYMALSLQSFCPTTRRYLQQLAEKPLETRTYEQGPDTPVSADAPVHPPALEQHPYEHCEPSTMPGDLGLGLRMVRGVVHVYTRREPDEHCSEVELPYPDLQEFVADVNVLMALIINGPIKSFCYRRLQYLSSKFQMHVLLNEMKELAAQKKVPHRDFYNIRKVDTHIHASSCMNQKHLLRFIKRAMKRHLEEIVHVEQGREQTLREVFESMNLTAYDLSVDTLDVHADRNTFHRFDKFNAKYNPIGESVLREIFIKTDNRVSGKYFAHIIKEVMSDLEESKYQNAELRLSIYGRSRDEWDKLARWAVMHRVHSPNVRWLVQVPRLFDVYRTKGQLANFQEMLENIFLPLFEATVHPASHPELHLFLEHVDGFDSVDDESKPENHVFNLESPLPEAWVEEDNPPYAYYLYYTFANMAMLNHLRRQRGFHTFVLRPHCGEAGPIHHLVSAFMLAENISHGLLLRKAPVLQYLYYLAQIGIAMSPLSNNSLFLSYHRNPLPEYLSRGLMVSLSTDDPLQFHFTKEPLMEEYSIATQVWKLSSCDMCELARNSVLMSGFSHKVKSHWLGPNYTKEGPEGNDIRRTNVPDIRVGYRYETLCQELALITQAVQSEMLETIPEEAGITMSPGPQ

SEQ ID NO: 18616 - protein, 760 aa, Homo sapiens
MLTFLPSPQELFTRSLAESELRSAPYEFPEESPIEQLEERRQRLERQISQDVKLEPDILLRAKQDFLKTDSDSDLQLYKEQGEGQGDRSLRERDVLEREFQRVTISGEEKCGVPFTDLLDAAKSVVRALFIREKYMALSLQSFCPTTRRYLQQLAEKPLETRTYEQGPDTPVSADAPVHPPALEQHPYEHCEPSTMPGDLGLGLRMVRGVVHVYTRREPDEHCSEVELPYPDLQEFVADVNVLMALIINGPIKSFCYRRLQYLSSKFQMHVLLNEMKELAAQKKVPHRDFYNIRKVDTHIHASSCMNQKHLLRFIKRAMKRHLEEIVHVEQGREQTLREVFESMNLTAYDLSVDTLDVHADRNTFHRFDKFNAKYNPIGESVLREIFIKTDNRVSGKYFAHIIKEVMSDLEESKYQNAELRLSIYGRSRDEWDKLARWAVMHRVHSPNVRWLVQVPRLFDVYRTKGQLANFQEMLENIFLPLFEATVHPASHPELHLFLEHVDGFDSVDDESKPENHVFNLESPLPEAWVEEDNPPYAYYLYYTFANMAMLNHLRRQRGFHTFVLRPHCGEAGPIHHLVSAFMLAENISHGLLLRKAPVLQYLYYLAQIGIAMSPLSNNSLFLSYHRNPLPEYLSRGLMVSLSTDDPLQFHFTKEPLMEEYSIATQVWKLSSCDMCELARNSVLMSGFSHKVKSHWLGPNYTKEGPEGNDIRRTNVPDIRVGYRYETLCQELALITQAVQSEMLETIPEEAGITMSPGPQ

SEQ ID NO: 18617 - protein, 804 aa, Homo sapiens
MWQSQAPAGAAQTPPLSPPWSQPWHPIHLALASPRPNIPLRSGPACRPPLQLQELFTRSLAESELRSAPYEFPEESPIEQLEERRQRLERQISQDVKLEPDILLRAKQDFLKTDSDSDLQLYKEQGEGQGDRSLRERDVLEREFQRVTISGEEKCGVPFTDLLDAAKSVVRALFIREKYMALSLQSFCPTTRRYLQQLAEKPLETRTYEQGPDTPVSADAPVHPPALEQHPYEHCEPSTMPGDLGLGLRMVRGVVHVYTRREPDEHCSEVELPYPDLQEFVADVNVLMALIINGPIKSFCYRRLQYLSSKFQMHVLLNEMKELAAQKKVPHRDFYNIRKVDTHIHASSCMNQKHLLRFIKRAMKRHLEEIVHVEQGREQTLREVFESMNLTAYDLSVDTLDVHADRNTFHRFDKFNAKYNPIGESVLREIFIKTDNRVSGKYFAHIIKEVMSDLEESKYQNAELRLSIYGRSRDEWDKLARWAVMHRVHSPNVRWLVQVPRLFDVYRTKGQLANFQEMLENIFLPLFEATVHPASHPELHLFLEHVDGFDSVDDESKPENHVFNLESPLPEAWVEEDNPPYAYYLYYTFANMAMLNHLRRQRGFHTFVLRPHCGEAGPIHHLVSAFMLAENISHGLLLRKAPVLQYLYYLAQIGIAMSPLSNNSLFLSYHRNPLPEYLSRGLMVSLSTDDPLQFHFTKEPLMEEYSIATQVWKLSSCDMCELARNSVLMSGFSHKVKSHWLGPNYTKEGPEGNDIRRTNVPDIRVGYRYETLCQELALITQAVQSEMLETIPEEAGITMSPGPQ

SEQ ID NO: 18618 - protein, 761 aa, Homo sapiens
MDGKCKEIAEELFTRSLAESELRSAPYEFPEESPIEQLEERRQRLERQISQDVKLEPDILLRAKQDFLKTDSDSDLQLYKEQGEGQGDRSLRERDVLEREFQRVTISGEEKCGVPFTDLLDAAKSVVRALFIREKYMALSLQSFCPTTRRYLQQLAEKPLETRTYEQGPDTPVSADAPVHPPALEQHPYEHCEPSTMPGDLGLGLRMVRGVVHVYTRREPDEHCSEVELPYPDLQEFVADVNVLMALIINGPIKSFCYRRLQYLSSKFQMHVLLNEMKELAAQKKVPHRDFYNIRKVDTHIHASSCMNQKHLLRFIKRAMKRHLEEIVHVEQGREQTLREVFESMNLTAYDLSVDTLDVHADRNTFHRFDKFNAKYNPIGESVLREIFIKTDNRVSGKYFAHIIKEVMSDLEESKYQNAELRLSIYGRSRDEWDKLARWAVMHRVHSPNVRWLVQVPRLFDVYRTKGQLANFQEMLENIFLPLFEATVHPASHPELHLFLEHVDGFDSVDDESKPENHVFNLESPLPEAWVEEDNPPYAYYLYYTFANMAMLNHLRRQRGFHTFVLRPHCGEAGPIHHLVSAFMLAENISHGLLLRKAPVLQYLYYLAQIGIAMSPLSNNSLFLSYHRNPLPEYLSRGLMVSLSTDDPLQFHFTKEPLMEEYSIATQVWKLSSCDMCELARNSVLMSGFSHKVKSHWLGPNYTKEGPEGNDIRRTNVPDIRVGYRYETLCQELALITQAVQSEMLETIPEEAGITMSPGPQ

SEQ ID NO: 18619 - protein, 272 aa, Homo sapiens
MSCHNCSDPQVLCSSGQLFLQPLWDHLRSWEALLQSPFFPVIFSITTYVGFCLPFVVLDILCSWVPALRRYKIHPDFSPSAQQLLPCLGQTLYQHVMFVFPVTLLHWARSPALLPHEAPELLLLLHHILFCLLLFDMEFFVWHLLHHKVPWLYRTFHKVHHQNSSSFALATQYMSVWELFSLGFFDMMNVTLLGCHPLTTLTFHVVNIWLSVEDHSGYNFPWSTHRLVPFGWYGGVVHHDLHHSHFNCNFAPYFTHWDKILGTLRTASVPAR

SEQ ID NO: 18620 - protein, 949 aa, Homo sapiens; identical to SEQ ID NO: 219

SEQ ID NO: 18621 - protein, 942 aa, Homo sapiens; identical to SEQ ID NO: 220

SEQ ID NO: 18622 - protein, 939 aa, Homo sapiens; identical to SEQ ID NO: 221

SEQ ID NO: 18623 - protein, 919 aa, Homo sapiens; identical to SEQ ID NO: 222

SEQ ID NO: 18624 - protein, 251 aa, Homo sapiens
MDMKRRIHLELRNRTPAAVRELVLDNCKSNDGKIEGLTAEFVNLEFLSLINVGLISVSNLPKLPKLKKLELSENRIFGGLDMLAEKLPNLTHLNLSGNKLKDISTLEPLKKLECLKSLDLFNCEVTNLNDYRESVFKLLPQLTYLDGYDREDQEAPDSDAEVDGVDEEEEDEEGEDEEDEDDEDGEEEEFDEEDDEDEDVEGDEDDDEVSEEEEEFGLDEEDEDEDEDEEEEEGGKGEKRKRETDDEGEDD

SEQ ID NO: 18625 - protein, 195 aa, Homo sapiens
MDMKRRIHLELRNRTPAAVRELVLDNCKSNDGKIEGLTAEFVNLEFLSLINVGLISVSNLPKLPKLKKLELSENRIFGGLDMLAEKLPNLTHLNLSGNKLKDISTLEPLKKLECLKSLDLFNCEVTNLNDYRESVFKLLPQLTYLDGYDREDQEAPDSDAEVDGVDEEEEDEEGEDEEDEDDEDGEEEEFDEEDD

SEQ ID NO: 18626 - protein, 378 aa, Homo sapiens
MVDYSVWDHIEVSDDEDETHPNIDTASLFRWRHQARVERMEQFQKEKEELDRGCRECKRKVAECQRKLKELEVAEGGKAELERLQAEAQQLRKEERSWEQKLEEMRKKEKSMPWNVDTLSKDGFSKSMVNTKPEKTEEDSEEVREQKHKTFVEKYEKQIKHFGMLRRWDDSQKYLSDNVHLVCEETANYLVIWCIDLEVEEKCALMEQVAHQTIVMQFILELAKSLKVDPRACFRQFFTKIKTADRQYMEGFNDELEAFKERVRGRAKLRIEKAMKEYEEEERKKRLGPGGLDPVEVYESLPEELQKCFDVKDVQMLQDAISKMDPTDAKYHMQRCIDSGLWVPNSKASEAKEGEEAGPGDPLLEAVPKTGDEKDVSV

SEQ ID NO: 18627 - protein, 977 aa, Homo sapiens
MPAVSKGDGMRGLAVFISDIRNCKSKEAEIKRINKELANIRSKFKGDKALDGYSKKKYVCKLLFIFLLGHDIDFGHMEAVNLLSSNKYTEKQIGYLFISVLVNSNSELIRLINNAIKNDLASRNPTFMCLALHCIANVGSREMGEAFAADIPRILVAGDSMDSVKQSAALCLLRLYKASPDLVPMGEWTARVVHLLNDQHMGVVTAAVSLITCLCKKNPDDFKTCVSLAVSRLSRIVSSASTDLQDYTYYFVPAPWLSVKLLRLLQCYPPPEDAAVKGRLVECLETVLNKAQEPPKSKKVQHSNAKNAILFETISLIIHYDSEPNLLVRACNQLGQFLQHRETNLRYLALESMCTLASSEFSHEAVKTHIDTVINALKTERDVSVRQRAADLLYAMCDRSNAKQIVSEMLRYLETADYAIREEIVLKVAILAEKYAVDYSWYVDTILNLIRIAGDYVSEEVWYRVLQIVTNRDDVQGYAAKTVFEALQAPACHENMVKVGGYILGEFGNLIAGDPRSSPPVQFSLLHSKFHLCSVATRALLLSTYIKFINLFPETKATIQGVLRAGSQLRNADVELQQRAVEYLTLSSVASTDVLATVLEEMPPFPERESSILAKLKRKKGPGAGSALDDGRRDPSSNDINGGMEPTPSTVSTPSPSADLLGLRAAPPPAAPPASAGAGNLLVDVFDGPAAQPSLGPTPEEAFLSELEPPAPESPMALLADPAPAADPGPEDIGPPIPEADELLNKFVCKNNGVLFENQLLQIGVKSEFRQNLGRMYLFYGNKTSVQFQNFSPTVVHPGDLQTQLAVQTKRVAAQVDGGAQVQQVLNIECLRDFLTPPLLSVRFRYGGAPQALTLKLPVTINKFFQPTEMAAQDFFQRWKQLSLPQQEAQKIFKANHPMDAEVTKAKLLGFGSALLDNVDPNPENFVGAGIIQTKALQVGCLLRLEPNAQAQMYRLTLRTSKEPVSRHLCELLAQQF

SEQ ID NO: 18628 - protein, 955 aa, Homo sapiens
MPAVSKGDGMRGLAVFISDIRNCKSKEAEIKRINKELANIRSKFKGDKALDGYSKKKYVCKLLFIFLLGHDIDFGHMEAVNLLSSNKYTEKQIGYLFISVLVNSNSELIRLINNAIKNDLASRNPTFMCLALHCIANVGSREMGEAFAADIPRILVAGDSMDSVKQSAALCLLRLYKASPDLVPMGEWTARVVHLLNDQHMGVVTAAVSLITCLCKKNPDDFKTCVSLAVSRLSRIVSSASTDLQDYTYYFVPAPWLSVKLLRLLQCYPPPEDAAVKGRLVECLETVLNKAQEPPKSKKVQHSNAKNAILFETISLIIHYDSEPNLLVRACNQLGQFLQHRETNLRYLALESMCTLASSEFSHEAVKTHIDTVINALKTERDVSVRQRAADLLYAMCDRSNAKQIVSEMLRYLETADYAIREEIVLKVAILAEKYAVDYSWYVDTILNLIRIAGDYVSEEVWYRVLQIVTNRDDVQGYAAKTVFEALQAPACHENMVKVGGYILGEFGNLIAGDPRSSPPVQFSLLHSKFHLCSVATRALLLSTYIKFINLFPETKATIQGVLRAGSQLRNADVELQQRAVEYLTLSSVASTDVLATVLEEMPPFPERESSILAKLKRKKGPGAGSALDDGRRDPSSNDINGGMEPTPSTVSTPSPSADLLGLRAAPPPAAPPASAGAGNLLVDVFDGPAAQPSLGPTPEEAFLSPGPEDIGPPIPEADELLNKFVCKNNGVLFENQLLQIGVKSEFRQNLGRMYLFYGNKTSVQFQNFSPTVVHPGDLQTQLAVQTKRVAAQVDGGAQVQQVLNIECLRDFLTPPLLSVRFRYGGAPQALTLKLPVTINKFFQPTEMAAQDFFQRWKQLSLPQQEAQKIFKANHPMDAEVTKAKLLGFGSALLDNVDPNPENFVGAGIIQTKALQVGCLLRLEPNAQAQMYRLTLRTSKEPVSRHLCELLAQQF

SEQ ID NO: 18629 - protein, 326 aa, Homo sapiens
MTGLCGYSAPDMRGLRLIMIPVELLLCYLLLHPVDATSYGKQTNVLMHFPLSLESQTPSSDPLSCQFLHPKSLPGFSHMAPLPKFLVSLALRNALEEAGCQADVWALQLQLYRQGGVNATQVLIQHLRGLQKGRSTERNVSVEALASALQLLAREQQSTGRVGRSLPTEDCENEKEQAVHNVVQLLPGVGTFYNLGTALYYATQNCLGKARERGRDGAIDLGYDLLMTMAGMSGGPMGLAISAALKPALRSGVQQLIQYYQDQKDANISQPETTKEGLRAISDVSDLEETTTLASFISEVVSSAPYWGWAIIKSYDLDPGAGSLEI

SEQ ID NO: 18630 - protein, 917 aa, Homo sapiens
MEVRGSFLAACRRRMATWRKNRDKDGFSNPGYRVRQKDLGMIHKAAIAGDVNKVMESILLRLNDLNDRDKKNRTALLLACAHGRPGVVADLVARKCQLNLTDSENRTALIKAVQCQEEVCASILLEHGANPNVRDMYGNTALHYAIDNENISMARKLLAYGADIEARSQDGHTSLLLAVNRKKEQMVAFLLKKKPDLTAIDNFGRTALILAARNGSTSVVYQLLQHNIDVFCQDISGWTAEDYAVASKFQAIRGMISEYKANKRCKSLQNSNSEQDLEMTSEGEQERLEGCESSQPQVEEKMKKCRNKKMEVSRNVHADDSDNYNDDVDELIHKIKNRKPDNHQSPGKENGEFDRLARKTSNEKSKVKSQIYFTDDLNDISGSSEKTSEDDELPYSDDENFMLLIEQSGMECKDFVSLSKSKNATAACGRSIEDQKCYCERLKVKFQKMKNNISVLQKVLSETDKTKSQSEHQNLQGKKKLCNLRFILQQQEEERIKAEELYEKDIEELKIMEEQYRTQTEVKKQSKLTLKSLEVELKTVRSNSNQNFHTHERERDLWQENHLMRDEIARLRLEIDTIKHQNQETENKYFKDIEIIKENNEDLEKTLKRNEEALTKTITRYSKELNVLMDENTMLNSELQKEKQSMSRLETEMESYRCRLAAALCDHDQRQSSKRDLQLAFQSTVNEWCHLQEDTNSHIQILSQQLSKAESTSSGLETELHYEREALKEKTLHIEHMQGVLSRTQRRLEDIEHMYQNDQPILEKYVRKQQSVEDGLFQLQSQNLLYQQQCNDARKKADNQEKTIINIQVKCEDTVEKLQAECRKLEENNKGLMKECTLLKERQCQYEKEKEEREVVRRQLQREVDDALNKQLLLEAMLEISSERRINLEDEAQSLKKKLGQMRSQVCMKLSMSTVTL

SEQ ID NO: 18631 - protein, 639 aa, Homo sapiens
MTSEGEQERLEGCESSQPQVEEKMKKCRNKKMEVSRNVHADDSDNYNDDVDELIHKIKNRKPDNHQSPGKENGEFDRLARKTSNEKSKVKSQIYFTDDLNDISGSSEKTSEDDELPYSDDENFMLLIEQSGMECKDFVSLSKSKNATAACGRSIEDQKCYCERLKVKFQKMKNNISVLQKVLSETDKTKSQSEHQNLQGKKKLCNLRFILQQQEEERIKAEELYEKDIEELKIMEEQYRTQTEVKKQSKLTLKSLEVELKTVRSNSNQNFHTHERERDLWQENHLMRDEIARLRLEIDTIKHQNQETENKYFKDIEIIKENNEDLEKTLKRNEEALTKTITRYSKELNVLMDENTMLNSELQKEKQSMSRLETEMESYRCRLAAALCDHDQRQSSKRDLQLAFQSTVNEWCHLQEDTNSHIQILSQQLSKAESTSSGLETELHYEREALKEKTLHIEHMQGVLSRTQRRLEDIEHMYQNDQPILEKYVRKQQSVEDGLFQLQSQNLLYQQQCNDARKKADNQEKTIINIQVKCEDTVEKLQAECRKLEENNKGLMKECTLLKERQCQYEKEKEEREVVRRQLQREVDDALNKQLLLEAMLEISSERRINLEDEAQSLKKKLGQMRSQVCMKLSMSTVTL

SEQ ID NO: 18632 - protein, 188 aa, Homo sapiens
MFHQIWAALLYFYGIILNSIYQCPEHSQLTTLGVDGKEFPEVHLGQWYFIAGAAPTKEELATFDPVDNIVFNMAAGSAPMQLHLRATIRMKDGLCVPRKWIYHLTEGSTDLRTEGRPDMKTELFSSSCPGGIMLNETGQGYQRFLLYNRSPHPPEKCVEEFKSLTSCLDSKAFLLTPRNQEACELSNN

SEQ ID NO: 18633 - protein, 116 aa, Homo sapiens
MAAGSAPMQLHLRATIRMKDGLCVPRKWIYHLTEGSTDLRTEGRPDMKTELFSSSCPGGIMLNETGQGYQRFLLYNRSPHPPEKCVEEFKSLTSCLDSKAFLLTPRNQEACELSNN

SEQ ID NO: 18634 - protein, 1484 aa, Homo sapiens
MCPEEGGAAGLGELRSWWEVPAIAHFCSLFRTAFRLPDFEIEELEAALHRDDVEFISDLIACLLQGCYQRRDITPQTFHSYLEDIINYRWELEEGKPNPLREASFQDLPLRTRVEILHRLCDYRLDADDVFDLLKGLDADSLRVEPLGEDNSGALYWYFYGTRMYKEDPVQGKSNGELSLSRESEGQKNVSSIPGKTGKRRGRPPKRKKLQEEILLSEKQEENSLASEPQTRHGSQGPGQGTWWLLCQTEEEWRQVTESFRERTSLRERQLYKLLSEDFLPEICNMIAQKGKRPQRTKAELHPRWMSDHLSIKPVKQEETPVLTRIEKQKRKEEEEERQILLAVQKKEQEQMLKEERKRELEEKVKAVEGMCSVRVVWRGACLSTSRPVDRAKRRKLREERAWLLAQGKELPPELSHLDPNSPMREEKKTKDLFELDDDFTAMYKVLDVVKAHKDSWPFLEPVDESYAPNYYQIIKAPMDISSMEKKLNGGLYCTKEEFVNDMKTMFRNCRKYNGESSEYTKMSDNLERCFHRAMMKHFPGEDGDTDEEFWIREDEKREKRRSRAGRSGGSHVWTRSRDPEGSSRKQQPMENGGKSLPPTRRAPSSGDDQSSSSTQPPREVGTSNGRGFSHPLHCGGTPSQAPFLNQMRPAVPGTFGPLRGSDPATLYGSSGVPEPHPGEPVQQRQPFTMQPPVGINSLRGPRLGTPEEKQMCGGLTHLSNMGPHPGSLQLGQISGPSQDGSMYAPAQFQPGFIPPRHGGAPARPPDFPESSEIPPSHMYRSYKYLNRVHSAVWNGNHGATNQGPLGPDEKPHLGPGPSHQPRTLGHVMDSRVMRPPVPPNQWTEQSGFLPHGVPSSGYMRPPCKSAGHRLQPPPVPAPSSLFGAPAQALRGVQGGDSMMDSPEMIAMQQLSSRVCPPGVPYHPHQPAHPRLPGPFPQVAHPMSVTVSAPKPALGNPGRAPENSEAQEPENDQAEPLPGLEEKPPGVGTSEGVYLTQLPHPTPPLQTDCTRQSSPQERETVGPELKSSSSESADNCKAMKGKNPWPSDSSYPGPAAQGCVRDLSTVADRGALSENGVIGEASPCGSEGKGLGSSGSEKLLCPRGRTLQETMPCTGQNAATPPSTDPGLTGGTVSQFPPLYMPGLEYPNSAAHYHISPGLQGVGPVMGGKSPASHPQHFPPRGFQSNHPHSGGFPRYRPPQGMRYSYHPPPQPSYHHYQRTPYYACPQSFSDWQRPLHPQGSPSGPPASQPPPPRSLFSDKNAMASLQGCETLNAALTSPTRMDAVAAKVPNDGQNPGPEEEKLDESMERPESPKEFLDLDNHNAATKRQSSLSASEYLYGTPPPLSSGMGFGSSAFPPHSVMLQTGPPYTPQRPASHFQPRAYSSPVAALPPHHPGATQPNGLSQEGPIYRCQEEGLGHFQAVMMEQIGTRSGIRGPFQEMYRPSGMQMHPVQSQASFPKTPTAATSQEEVPPHKPPTLPLDQS

SEQ ID NO: 18635 - protein, 498 aa, Homo sapiens
MCPEEGGAAGLGELRSWWEVPAIAHFCSLFRTAFRLPDFEIEELEAALHRDDVEFISDLIACLLQGCYQRRDITPQTFHSYLEDIINYRWELEEGKPNPLREASFQDLPLRTRVEILHRLCDYRLDADDVFDLLKGLDADSLRVEPLGEDNSGALYWYFYGTRMYKEDPVQGKSNGELSLSRESEGQKNVSSIPGKTGKRRGRPPKRKKLQEEILLSEKQEENSLASEPQTRHGSQGPGQGTWWLLCQTEEEWRQVTESFRERTSLRERQLYKLLSEDFLPEICNMIAQKETPVLTRIEKQKRKEEEEERQILLAVQKKEQEQMLKEERKRELEEKVKAVEGMCSVRVVWRGACLSTSRPVDRAKRRKLREERAWLLAQGKELPPELSHLDPNSPMREEKKTKDLFELDDDFTAMYKVLDVVKAHKDSWPFLEPVDESYAPNYYQIIKAPMDISSMEKKLNGGLYCTKEEFVNDMKTMFRNCRKYNGESSGKQGRSLC

SEQ ID NO: 18636 - protein, 1464 aa, Homo sapiens
MCPEEGGAAGLGELRSWWEVPAIAHFCSLFRTAFRLPDFEIEELEAALHRDDVEFISDLIACLLQGCYQRRDITPQTFHSYLEDIINYRWELEEGKPNPLREASFQDLPLRTRVEILHRLCDYRLDADDVFDLLKGLDADSLRVEPLGEDNSGALYWYFYGTRMYKEDPVQGKSNGELSLSRESEGQKNVSSIPGKTGKRRGRPPKRKKLQEEILLSEKQEENSLASEPQTRHGSQGPGQGTWWLLCQTEEEWRQVTESFRERTSLRERQLYKLLSEDFLPEICNMIAQKGKRPQRTKAELHPRWMSDHLSIKPVKQEETPVLTRIEKQKRKEEEEERQILLAVQKKEQEQMLKEERKRELEEKVKAVEDRAKRRKLREERAWLLAQGKELPPELSHLDPNSPMREEKKTKDLFELDDDFTAMYKVLDVVKAHKDSWPFLEPVDESYAPNYYQIIKAPMDISSMEKKLNGGLYCTKEEFVNDMKTMFRNCRKYNGESSEYTKMSDNLERCFHRAMMKHFPGEDGDTDEEFWIREDEKREKRRSRAGRSGGSHVWTRSRDPEGSSRKQQPMENGGKSLPPTRRAPSSGDDQSSSSTQPPREVGTSNGRGFSHPLHCGGTPSQAPFLNQMRPAVPGTFGPLRGSDPATLYGSSGVPEPHPGEPVQQRQPFTMQPPVGINSLRGPRLGTPEEKQMCGGLTHLSNMGPHPGSLQLGQISGPSQDGSMYAPAQFQPGFIPPRHGGAPARPPDFPESSEIPPSHMYRSYKYLNRVHSAVWNGNHGATNQGPLGPDEKPHLGPGPSHQPRTLGHVMDSRVMRPPVPPNQWTEQSGFLPHGVPSSGYMRPPCKSAGHRLQPPPVPAPSSLFGAPAQALRGVQGGDSMMDSPEMIAMQQLSSRVCPPGVPYHPHQPAHPRLPGPFPQVAHPMSVTVSAPKPALGNPGRAPENSEAQEPENDQAEPLPGLEEKPPGVGTSEGVYLTQLPHPTPPLQTDCTRQSSPQERETVGPELKSSSSESADNCKAMKGKNPWPSDSSYPGPAAQGCVRDLSTVADRGALSENGVIGEASPCGSEGKGLGSSGSEKLLCPRGRTLQETMPCTGQNAATPPSTDPGLTGGTVSQFPPLYMPGLEYPNSAAHYHISPGLQGVGPVMGGKSPASHPQHFPPRGFQSNHPHSGGFPRYRPPQGMRYSYHPPPQPSYHHYQRTPYYACPQSFSDWQRPLHPQGSPSGPPASQPPPPRSLFSDKNAMASLQGCETLNAALTSPTRMDAVAAKVPNDGQNPGPEEEKLDESMERPESPKEFLDLDNHNAATKRQSSLSASEYLYGTPPPLSSGMGFGSSAFPPHSVMLQTGPPYTPQRPASHFQPRAYSSPVAALPPHHPGATQPNGLSQEGPIYRCQEEGLGHFQAVMMEQIGTRSGIRGPFQEMYRPSGMQMHPVQSQASFPKTPTAATSQEEVPPHKPPTLPLDQS

SEQ ID NO: 18637 - protein, 228 aa, Homo sapiens
MSYVFVNDSSQTNVPLLQACIDGDFNYSKRLLESGFDPNIRDSRGRTGLHLAAARGNVDICQLLHKFGADLLATDYQGNTALHLCGHVDTIQFLVSNGLKIDICNHQGATPLVLAKRRGVNKDVIRLLESLEEQEVKGFNRGTHSKLETMQTAESESAMESHSLLNPNLQQGEGVLSSFRTTWQEFVEDLGFWRVLLLIFVIALLSLGIAYYVSGVLPFVENQPELVH

SEQ ID NO: 18638 - protein, 232 aa, Homo sapiens
MSYVFVNDSSQTNVPLLQACIDGDFNYSKRLLESGFDPNIRDSRGRTGLHLAAARGNVDICQLLHKFGADLLATDYQGNTALHLCGHVDTIQFLVSNGLKIDICNHQGATPLVLAKRRGVNKDVIRLLESLEEQEVKGFNRGTHSKLETMQTAESESAMESHSLLNPNLQQGEGVLSSFRTTWQEFVEDLGFWRVLLLIFVIALLSLGIAYYRRTLRLGSFARQDRSRIQAI

SEQ ID NO: 18639 - protein, 943 aa, Homo sapiens
MAASGLDHLKNGYRRRFCRPSRARDINTEQGQNVLEILQDCFEEKSLANDFSTNSTKSVPNSTRKIKDTCIQSPSKECQKSHPKSVPVSSKKKEASLQFVVEPSEATNRSVQAHEVHQKILATDVSSKNTPDSKKISSRNINDHHSEADEEFYLSVGSPSVLLDAKTSVSQNVIPSSAQKRETYTFENSVNMLPSSTEVSVKTKKRLNFDDKVMLKKIEIDNKVSDEEDKTSEGQERKPSGSSQNRIRDSEYEIQRQAKKSFSTLFLETVKRKSESSPIVRHAATAPPHSCPPDDTKLIEDEFIIDESDQSFASRSWITIPRKAGSLKQRTISPAESTALLQGRKSREKHHNILPKTLANDKHSHKPHPVETSQPSDKTVLDTSYALIGETVNNYRSTKYEMYSKNAEKPSRSKRTIKQKQRRKFMAKPAEEQLDVGQSKDENIHTSHITQDEFQRNSDRNMEEHEEMGNDCVSKKQMPPVGSKKSSTRKDKEESKKKRFSSESKNKLVPEEVTSTVTKSRRISRRPSDWWVVKSEESPVYSNSSVRNELPMHHNSSRKSTKKTNQSSKNIRKKTIPLKRQKTATKGNQRVQKFLNAEGSGGIVGHDEISRCSLSEPLESDEADLAKKKNLDCSRSTRSSKNEDNIMTAQNVPLKPQTSGYTCNIPTESNLDSGEHKTSVLEESGPSRLNNNYLMSGKNDVDDEEVHGSSDDSKQSKVIPKNRIHHKLVLPSNTPNVRRTKRTRLKPLEYWRGERIDYQGRPSGGFVISGVLSPDTISSKRKAKENIGKVNKKSNKKRICLDNDERKTNLMVNLGIPLGDPLQPTRVKDPETREIILMDLVRPQDTYQFFVKHGELKVYKTLDTPFFSTGKLILGPQEEKGKQHVGQDILVFYVNFGDLLCTLHETPYILSTGDSFYVPSGNYYNIKNLRNEESVLLFTQIKR

SEQ ID NO: 18640 - protein, 542 aa, Homo sapiens
MAASGLDHLKNGYRRRFCRPSRARDINTEQGQNVLEILQDCFEEKSLANDFSTNSTKSVPNSTRKIKDTCIQSPSKECQKSHPKSVPVSSKKKEASLQFVVEPSEATNRSVQAHEVHQKILATDVSSKNTPDSKKISSRNINDHHSEADEEFYLSVGSPSVLLDAKTSVSQNVIPSSAQKRETYTFENSVNMLPSSTEVSVKTKKRLNFDDKVMLKKIEIDNKVSDEEDKTSEGQERKPSGSSQNRIRDSEYEIQRQAKKSFSTLFLETVKRKSESSPIVRHAATAPPHSCPPDDTKLIEDEFIIDESDQSFASRSWITIPRKAGSLKQRTISPAESTALLQGRKSREKHHNILPKTLANDKHSHKPHPVETSQPSDKTVLDTSYALIGETVNNYRSTKYEMYSKNAEKPSRSKRTIKQKQRRKFMAKPAEEQLDVGQSKDENIHTSHITQDEFQRNSDRNMEEHEEMGNDCVSKKQMPPVGSKKSSTRKDKEESKKKRFSSESKNKLVPEEVTSTVTKSRRISRRPSDWWVVKSEESCLKC

SEQ ID NO: 18641 - protein, 4563 aa, Homo sapiens
MDPPRPALLALLALPALLLLLLAGARAEEEMLENVSLVCPKDATRFKHLRKYTYNYEAESSSGVPGTADSRSATRINCKVELEVPQLCSFILKTSQCTLKEVYGFNPEGKALLKKTKNSEEFAAAMSRYELKLAIPEGKQVFLYPEKDEPTYILNIKRGIISALLVPPETEEAKQVLFLDTVYGNCSTHFTVKTRKGNVATEISTERDLGQCDRFKPIRTGISPLALIKGMTRPLSTLISSSQSCQYTLDAKRKHVAEAICKEQHLFLPFSYKNKYGMVAQVTQTLKLEDTPKINSRFFGEGTKKMGLAFESTKSTSPPKQAEAVLKTLQELKKLTISEQNIQRANLFNKLVTELRGLSDEAVTSLLPQLIEVSSPITLQALVQCGQPQCSTHILQWLKRVHANPLLIDVVTYLVALIPEPSAQQLREIFNMARDQRSRATLYALSHAVNNYHKTNPTGTQELLDIANYLMEQIQDDCTGDEDYTYLILRVIGNMGQTMEQLTPELKSSILKCVQSTKPSLMIQKAAIQALRKMEPKDKDQEVLLQTFLDDASPGDKRLAAYLMLMRSPSQADINKIVQILPWEQNEQVKNFVASHIANILNSEELDIQDLKKLVKEALKESQLPTVMDFRKFSRNYQLYKSVSLPSLDPASAKIEGNLIFDPNNYLPKESMLKTTLTAFGFASADLIEIGLEGKGFEPTLEALFGKQGFFPDSVNKALYWVNGQVPDGVSKVLVDHFGYTKDDKHEQDMVNGIMLSVEKLIKDLKSKEVPEARAYLRILGEELGFASLHDLQLLGKLLLMGARTLQGIPQMIGEVIRKGSKNDFFLHYIFMENAFELPTGAGLQLQISSSGVIAPGAKAGVKLEVANMQAELVAKPSVSVEFVTNMGIIIPDFARSGVQMNTNFFHESGLEAHVALKAGKLKFIIPSPKRPVKLLSGGNTLHLVSTTKTEVIPPLIENRQSWSVCKQVFPGLNYCTSGAYSNASSTDSASYYPLTGDTRLELELRPTGEIEQYSVSATYELQREDRALVDTLKFVTQAEGAKQTEATMTFKYNRQSMTLSSEVQIPDFDVDLGTILRVNDESTEGKTSYRLTLDIQNKKITEVALMGHLSCDTKEERKIKGVISIPRLQAEARSEILAHWSPAKLLLQMDSSATAYGSTVSKRVAWHYDEEKIEFEWNTGTNVDTKKMTSNFPVDLSDYPKSLHMYANRLLDHRVPQTDMTFRHVGSKLIVAMSSWLQKASGSLPYTQTLQDHLNSLKEFNLQNMGLPDFHIPENLFLKSDGRVKYTLNKNSLKIEIPLPFGGKSSRDLKMLETVRTPALHFKSVGFHLPSREFQVPTFTIPKLYQLQVPLLGVLDLSTNVYSNLYNWSASYSGGNTSTDHFSLRARYHMKADSVVDLLSYNVQGSGETTYDHKNTFTLSYDGSLRHKFLDSNIKFSHVEKLGNNPVSKGLLIFDASSSWGPQMSASVHLDSKKKQHLFVKEVKIDGQFRVSSFYAKGTYGLSCQRDPNTGRLNGESNLRFNSSYLQGTNQITGRYEDGTLSLTSTSDLQSGIIKNTASLKYENYELTLKSDTNGKYKNFATSNKMDMTFSKQNALLRSEYQADYESLRFFSLLSGSLNSHGLELNADILGTDKINSGAHKATLRIGQDGISTSATTNLKCSLLVLENELNAELGLSGASMKLTTNGRFREHNAKFSLDGKAALTELSLGSAYQAMILGVDSKNIFNFKVSQEGLKLSNDMMGSYAEMKFDHTNSLNIAGLSLDFSSKLDNIYSSDKFYKQTVNLQLQPYSLVTTLNSDLKYNALDLTNNGKLRLEPLKLHVAGNLKGAYQNNEIKHIYAISSAALSASYKADTVAKVQGVEFSHRLNTDIAGLASAIDMSTNYNSDSLHFSNVFRSVMAPFTMTIDAHTNGNGKLALWGEHTGQLYSKFLLKAEPLAFTFSHDYKGSTSHHLVSRKSISAALEHKVSALLTPAEQTGTWKLKTQFNNNEYSQDLDAYNTKDKIGVELTGRTLADLTLLDSPIKVPLLLSEPINIIDALEMRDAVEKPQEFTIVAFVKYDKNQDVHSINLPFFETLQEYFERNRQTIIVVLENVQRNLKHINIDQFVRKYRAALGKLPQQANDYLNSFNWERQVSHAKEKLTALTKKYRITENDIQIALDDAKINFNEKLSQLQTYMIQFDQYIKDSYDLHDLKIAIANIIDEIIEKLKSLDEHYHIRVNLVKTIHDLHLFIENIDFNKSGSSTASWIQNVDTKYQIRIQIQEKLQQLKRHIQNIDIQHLAGKLKQHIEAIDVRVLLDQLGTTISFERINDILEHVKHFVINLIGDFEVAEKINAFRAKVHELIERYEVDQQIQVLMDKLVELAHQYKLKETIQKLSNVLQQVKIKDYFEKLVGFIDDAVKKLNELSFKTFIEDVNKFLDMLIKKLKSFDYHQFVDETNDKIREVTQRLNGEIQALELPQKAEALKLFLEETKATVAVYLESLQDTKITLIINWLQEALSSASLAHMKAKFRETLEDTRDRMYQMDIQQELQRYLSLVGQVYSTLVTYISDWWTLAAKNLTDFAEQYSIQDWAKRMKALVEQGFTVPEIKTILGTMPAFEVSLQALQKATFQTPDFIVPLTDLRIPSVQINFKDLKNIKIPSRFSTPEFTILNTFHIPSFTIDFVEMKVKIIRTIDQMLNSELQWPVPDIYLRDLKVEDIPLARITLPDFRLPEIAIPEFIIPTLNLNDFQVPDLHIPEFQLPHISHTIEVPTFGKLYSILKIQSPLFTLDANADIGNGTTSANEAGIAASITAKGESKLEVLNFDFQANAQLSNPKINPLALKESVKFSSKYLRTEHGSEMLFFGNAIEGKSNTVASLHTEKNTLELSNGVIVKINNQLTLDSNTKYFHKLNIPKLDFSSQADLRNEIKTLLKAGHIAWTSSGKGSWKWACPRFSDEGTHESQISFTIEGPLTSFGLSNKINSKHLRVNQNLVYESGSLNFSKLEIQSQVDSQHVGHSVLTAKGMALFGEGKAEFTGRHDAHLNGKVIGTLKNSLFFSAQPFEITASTNNEGNLKVRFPLRLTGKIDFLNNYALFLSPSAQQASWQVSARFNQYKYNQNFSAGNNENIMEAHVGINGEANLDFLNIPLTIPEMRLPYTIITTPPLKDFSLWEKTGLKEFLKTTKQSFDLSVKAQYKKNKHRHSITNPLAVLCEFISQSIKSFDRHFEKNRNNALDFVTKSYNETKIKFDKYKAEKSHDELPRTFQIPGYTVPVVNVEVSPFTIEMSAFGYVFPKAVSMPSFSILGSDVRVPSYTLILPSLELPVLHVPRNLKLSLPDFKELCTISHIFIPAMGNITYDFSFKSSVITLNTNAELFNQSDIVAHLLSSSSSVIDALQYKLEGTTRLTRKRGLKLATALSLSNKFVEGSHNSTVSLTTKNMEVSVATTTKAQIPILRMNFKQELNGNTKSKPTVSSSMEFKYDFNSSMLYSTAKGAVDHKLSLESLTSYFSIESSTKGDVKGSVLSREYSGTIASEANTYLNSKSTRSSVKLQGTSKIDDIWNLEVKENFAGEATLQRIYSLWEHSTKNHLQLEGLFFTNGEHTSKATLELSPWQMSALVQVHASQPSSFHDFPDLGQEVALNANTKNQKIRWKNEVRIHSGSFQSQVELSNDQEKAHLDIAGSLEGHLRFLKNIILPVYDKSLWDFLKLDVTTSIGRRQHLRVSTAFVYTKNPNGYSFSIPVKVLADKFIIPGLKLNDLNSVLVMPTFHVPFTDLQVPSCKLDFREIQIYKKLRTSSFALNLPTLPEVKFPEVDVLTKYSQPEDSLIPFFEITVPESQLTVSQFTLPKSVSDGIAALDLNAVANKIADFELPTIIVPEQTIEIPSIKFSVPAGIVIPSFQALTARFEVDSPVYNATWSASLKNKADYVETVLDSTCSSTVQFLEYELNVLGTHKIEDGTLASKTKGTFAHRDFSAEYEEDGKYEGLQEWEGKAHLNIKSPAFTDLHLRYQKDKKGISTSAASPAVGTVGMDMDEDDDFSKWNFYYSPQSSPDKKLTIFKTELRVRESDEETQIKVNWEEEAASGLLTSLKDNVPKATGVLYDYVNKYHWEHTGLTLREVSSKLRRNLQNNAEWVYQGAIRQIDDIDVRFQKAASGTTGTYQEWKDKAQNLYQELLTQEGQASFQGLKDNVFDGLVRVTQEFHMKVKHLIDSLIDFLNFPRFQFPGKPGIYTREELCTMFIREVGTVLSQVYSKVHNGSEILFSYFQDLVITLPFELRKHKLIDVISMYRELLKDLSKEAQEVFKAIQSLKTTEVLRNLQDLLQFIFQLIEDNIKQLKEMKFTYLINYIQDEINTIFSDYIPYVFKLLKENLCLNLHKFNEFIQNELQEASQELQQIHQYIMALREEYFDPSIVGWTVKYYELEEKIVSLIKNLLVALKDFHSEYIVSASNFTSQLSSQVEQFLHRNIQEYLSILTDPDGKGKEKIAELSATAQEIIKSQAIATKKIISDYHQQFRYKLQDFSDQLSDYYEKFIAESKRLIDLSIQNYHTFLIYITELLKKLQSTTVMNPYMKLAPGELTIIL

SEQ ID NO: 18642 - protein, 396 aa, Homo sapiens
MFLKAVVLTLALVAVAGARAEVSADQVATVMWDYFSQLSNNAKEAVEHLQKSELTQQLNALFQDKLGEVNTYAGDLQKKLVPFATELHERLAKDSEKLKEEIGKELEELRARLLPHANEVSQKIGDNLRELQQRLEPYADQLRTQVSTQAEQLRRQLTPYAQRMERVLRENADSLQASLRPHADELKAKIDQNVEELKGRLTPYADEFKVKIDQTVEELRRSLAPYAQDTQEKLNHQLEGLTFQMKKNAEELKARISASAEELRQRLAPLAEDVRGNLRGNTEGLQKSLAELGGHLDQQVEEFRRRVEPYGENFNKALVQQMEQLRQKLGPHAGDVEGHLSFLEKDLRDKVNSFFSTFKEKESQDKTLSLPELEQQQEQQQEQQQEQVQMLAPLES

SEQ ID NO: 18643 - protein, 402 aa, Homo sapiens
MGLGQGWGWEASCFACLIRSCCQVVTFTFPFGFQGISQSLENVSGYYADARLEVGSTQLRTAGSCSHSFKRSFLEKKRFTEEATKYFRERVSPVHLQILLTNNEAWKRFVTAAELPRDEADALYEALKKLRTYAAIEDEYVQQKDEQFREWFLKEFPQVKRKIQESIEKLRALANGIEEVHRGCTISNVVSSSTGAASGIMSLAGLVLAPFTAGTSLALTAAGVGLGAASAVTGITTSIVEHSYTSSAEAEASRLTATSIDRLKVFKEVMRDITPNLLSLLNNYYEATQTIGSEIRAIRQARARARLPVTTWRISAGSGGQAERTIAGTTRAVSRGARILSATTSGIFLALDVVNLVYESKHLHEGAKSASAEELRRQAQELEENLMELTQIYQRLNPCHTH

SEQ ID NO: 18644 - protein, 331 aa, Homo sapiens
MDSEKKRFTEEATKYFRERVSPVHLQILLTNNEAWKRFVTAAELPRDEADALYEALKKLRTYAAIEDEYVQQKDEQFREWFLKEFPQVKRKIQESIEKLRALANGIEEVHRGCTISNVVSSSTGAASGIMSLAGLVLAPFTAGTSLALTAAGVGLGAASAVTGITTSIVEHSYTSSAEAEASRLTATSIDRLKVFKEVMRDITPNLLSLLNNYYEATQTIGSEIRAIRQARARARLPVTTWRISAGSGGQAERTIAGTTRAVSRGARILSATTSGIFLALDVVNLVYESKHLHEGAKSASAEELRRQAQELEENLMELTQIYQRLNPCHTH

SEQ ID NO: 18645 - protein, 202 aa, Homo sapiens
MSLAGLVLAPFTAGTSLALTAAGVGLGAASAVTGITTSIVEHSYTSSAEAEASRLTATSIDRLKVFKEVMRDITPNLLSLLNNYYEATQTIGSEIRAIRQARARARLPVTTWRISAGSGGQAERTIAGTTRAVSRGARILSATTSGIFLALDVVNLVYESKHLHEGAKSASAEELRRQAQELEENLMELTQIYQRLNPCHTH

SEQ ID NO: 18646 - protein, 433 aa, Homo sapiens
MPCGKQGNLQVPGSKVLPGLGEGCKEMWLRKVIYGGEVWGKSPEPEFPSLVNLCQSWKINNLMSTVHSDEAGMLSYFLFEELMRCDKDSMPDGNLSEEEKLFLSYFPLHKFELEQNIKELNTLADQVDTTHELLTKTSLVASSSGAVSGVMNILGLALAPVTAGGSLMLSATGTGLGAAAAITNIVTNVLENRSNSAARDKASRLGPLTTSHEAFGGINWSEIEAAGFCVNKCVKAIQGIKDLHAYQMAKSNSGFMAMVKNFVAKRHIPFWTARGVQRAFEGTTLAMTNGAWVMGAAGAGFLLMKDMSSFLQSWKHLEDGARTETAEELRALAKKLEQELDRLTQHHRHLPQKASQTCSSSRGRAVRGSRVVKPEGSRSPLPWPVVEHQPRLGPGVALRTPKRTVSAPRMLGHQPAPPAPARKGRQAPGRHRQ

SEQ ID NO: 18647 - protein, 367 aa, Homo sapiens
MRWFLPWTLAAVTAAAASTVLATALSPAPTTMDFTPAPLEDTSSRPQFCKWPCECPPSPPRCPLGVSLITDGCECCKMCAQQLGDNCTEAAICDPHRGLYCDYSGDRPRYAIGVCAQVVGVGCVLDGVRYNNGQSFQPNCKYNCTCIDGAVGCTPLCLRVRPPRLWCPHPRRVSIPGHCCEQWVCEDDAKRPRKTAPRDTGAFDAVGEVEAWHRNCIAYTSPWSPCSTSCGLGVSTRISNVNAQCWPEQESRLCNLRPCDVDIHTLIKAGKKCLAVYQPEASMNFTLAGCISTRSYQPKYCGVCMDNRCCIPYKSKTIDVSFQCPDGLGFSRQVLWINACFCNLSCRNPNDIFADLESYPDFSEIAN

SEQ ID NO: 18648 - protein, 280 aa, Homo sapiens
MRWFLPWTLAAVTAAAASTVLATALSPAPTTMDFTPAPLEDTSSRPQFCKWPCECPPSPPRCPLGVSLITDGCECCKMCAQQLGDNCTEAAICDPHRGLYCDYSGDRPRYAIGVCAHAVGEVEAWHRNCIAYTSPWSPCSTSCGLGVSTRISNVNAQCWPEQESRLCNLRPCDVDIHTLIKAGKKCLAVYQPEASMNFTLAGCISTRSYQPKYCGVCMDNRCCIPYKSKTIDVSFQCPDGLGFSRQVLWINACFCNLSCRNPNDIFADLESYPDFSEIAN

SEQ ID NO: 18649 - protein, 122 aa, Homo sapiens
MRWFLPWTLAAVTAAAASTVLATAGKKCLAVYQPEASMNFTLAGCISTRSYQPKYCGVCMDNRCCIPYKSKTIDVSFQCPDGLGFSRQVLWINACFCNLSCRNPNDIFADLESYPDFSEIAN

SEQ ID NO: 18650 - protein, 155 aa, Homo sapiens
MRWFLPWTLAAVTAAAASTVLATALSPAPTTMDFTPAPLEDTSSRPQFCKWPCECPPSPPRCPLGVSLITDGCECCKMCAQQLGDNCTEAAICDPHRGLYCDYSGDRPRYAIGVCARREEVSGCVPARGIHELHTCGLHQHTLLSTQVLWSLHGQ

SEQ ID NO: 18651 - protein, 195 aa, Homo sapiens
MPVPLTSRHEVVPALDAGSSDSSSRQHRPGHDAVGEVEAWHRNCIAYTSPWSPCSTSCGLGVSTRISNVNAQCWPEQESRLCNLRPCDVDIHTLIKAGKKCLAVYQPEASMNFTLAGCISTRSYQPKYCGVCMDNRCCIPYKSKTIDVSFQCPDGLGFSRQVLWINACFCNLSCRNPNDIFADLESYPDFSEIAN

SEQ ID NO: 18652 - protein, 73 aa, Homo sapiens
MEHWGQPIPGAGQPWRQPLPTSGRWWLGAASWWWLGAASWWWLGAAPWWWLGTASWWWLGSRRWHPQSVEQAE

SEQ ID NO: 18653 - protein, 1169 aa, Homo sapiens
MAEEEVAKLEKHLMLLRQEYVKLQKKLAETEKRCALLAAQANKESSSESFISRLLAIVADLYEQEQYSDLKIKVGDRHISAHKFVLAARSDSWSLANLSSTKELDLSDANPEVTMTMLRWIYTDELEFREDDVFLTELMKLANRFQLQLLRERCEKGVMSLVNVRNCIRFYQTAEELNASTLMNYCAEIIASHWDDLRKEDFSSMSAQLLYKMIKSKTEYPLHKAIKVEREDVVFLYLIEMDSQLPGKLNEADHNGDLALDLALSRRLESIATTLVSHKADVDMVDKSGWSLLHKGIQRGDLFAATFLIKNGAFVNAATLGAQETPLHLVALYSSKKHSADVMSEMAQIAEALLQAGANPNMQDSKGRTPLHVSIMAGNEYVFSQLLQCKQLDLELKDHEGSTALWLAVQHITVSSDQSVNPFEDVPVVNGTSFDENSFAARLIQRGSHTDAPDTATGNCLLQRAAGAGNEAAALFLATNGAHVNHRNKWGETPLHTACRHGLANLTAELLQQGANPNLQTEEALPLPKEAASLTSLADSVHLQTPLHMAIAYNHPDVVSVILEQKANALHATNNLQIIPDFSLKDSRDQTVLGLALWTGMHTIAAQLLGSGAAINDTMSDGQTLLHMAIQRQDSKSALFLLEHQADINVRTQDGETALQLAIRNQLPLVVDAICTRGADMSVPDEKGNPPLWLALANNLEDIASTLVRHGCDATCWGPGPGGCLQTLLHRAIDENNEPTACFLIRSGCDVNSPRQPGANGEGEEEARDGQTPLHLAASWGLEETVQCLLEFGANVNAQDAEGRTPIHVAISSQHGVIIQLLVSHPDIHLNVRDRQGLTPFACAMTFKNNKSAEAILKRESGAAEQVDNKGRNFLHVAVQNSDIESVLFLISVHANVNSRVQDASKLTPLHLAVQAGSEIIVRNLLLAGAKVNELTKHRQTALHLAAQQDLPTICSVLLENGVDFAAVDENGNNALHLAVMHGRLNNIRVLLTECTVDAEAFNLRGQSPLHILGQYGKENAAAIFDLFLECMPGYPLDKPDADGSTVLLLAYMKGNANLCRAIVRSGARLGVNNNQGVNIFNYQVATKQLLFRLLDMLSKEPPWCDGSYCYECTARFGVTTRKHHCRHCGRLLCHKCSTKEIPIIKFDLNKPVRVCNICFDVLTLGGVS

SEQ ID NO: 18654 - protein, 1170 aa, Homo sapiens
MAEEEVAKLEKHLMLLRQEYVKLQKKLAETEKRCALLAAQANKESSSESFISRLLAIVADLYEQEQYSDLKIKVGDRHISAHKFVLAARSDSWSLANLSSTKELDLSDANPEVTMTMLRWIYTDELEFREDDVFLTELMKLANRFQLQLLRERCEKGVMSLVNVRNCIRFYQTAEELNASTLMNYCAEIIASHWDDLRKEDFSSMSAQLLYKMIKSKTEYPLHKAIKVEREDVVFLYLIEMDSQLPGKLNEADHNGDLALDLALSRRLESIATTLVSHKADVDMVDKSGWSLLHKGIQRGDLFAATFLIKNGAFVNAATLGAQETPLHLVALYSSKKHSADVMSEMAQIAEALLQAGANPNMQDSKGRTPLHVSIMAGNEYVFSQLLQCKQLDLELKDHEGSTALWLAVQHITVSSDQSVNPFEDVPVVNGTSFDENSFAARLIQRGSHTDAPDTATGNCLLQRAAGAGNEAAALFLATNGAHVNHRNKWGETPLHTACRHGLANLTAELLQQGANPNLQTEEALPLPKEAASLTSLADSVHLQTPLHMAIAYNHPDVVSVILEQKANALHATNNLQIIPDFSLKDSRDQTVLGLALWTGMHTIAAQLLGSGAAINDTMSDGQTLLHMAIQRQDSKSALFLLEHQADINVSRTQDGETALQLAIRNQLPLVVDAICTRGADMSVPDEKGNPPLWLALANNLEDIASTLVRHGCDATCWGPGPGGCLQTLLHRAIDENNEPTACFLIRSGCDVNSPRQPGANGEGEEEARDGQTPLHLAASWGLEETVQCLLEFGANVNAQDAEGRTPIHVAISSQHGVIIQLLVSHPDIHLNVRDRQGLTPFACAMTFKNNKSAEAILKRESGAAEQVDNKGRNFLHVAVQNSDIESVLFLISVHANVNSRVQDASKLTPLHLAVQAGSEIIVRNLLLAGAKVNELTKHRQTALHLAAQQDLPTICSVLLENGVDFAAVDENGNNALHLAVMHGRLNNIRVLLTECTVDAEAFNLRGQSPLHILGQYGKENAAAIFDLFLECMPGYPLDKPDADGSTVLLLAYMKGNANLCRAIVRSGARLGVNNNQGVNIFNYQVATKQLLFRLLDMLSKEPPWCDGSYCYECTARFGVTTRKHHCRHCGRLLCHKCSTKEIPIIKFDLNKPVRVCNICFDVLTLGGVS

SEQ ID NO: 18655 - protein, 1211 aa, Homo sapiens
MPTPRDCGRLRSRAGRSRAGAACSRGAPRAAREALDCRRCRDAGGKEVAKLEKHLMLLRQEYVKLQKKLAETEKRCALLAAQANKESSSESFISRLLAIVADLYEQEQYSDLKIKVGDRHISAHKFVLAARSDSWSLANLSSTKELDLSDANPEVTMTMLRWIYTDELEFREDDVFLTELMKLANRFQLQLLRERCEKGVMSLVNVRNCIRFYQTAEELNASTLMNYCAEIIASHWDDLRKEDFSSMSAQLLYKMIKSKTEYPLHKAIKVEREDVVFLYLIEMDSQLPGKLNEADHNGDLALDLALSRRLESIATTLVSHKADVDMVDKSGWSLLHKGIQRGDLFAATFLIKNGAFVNAATLGAQETPLHLVALYSSKKHSADVMSEMAQIAEALLQAGANPNMQDSKGRTPLHVSIMAGNEYVFSQLLQCKQLDLELKDHEGSTALWLAVQHITVSSDQSVNPFEDVPVVNGTSFDENSFAARLIQRGSHTDAPDTATGNCLLQRAAGAGNEAAALFLATNGAHVNHRNKWGETPLHTACRHGLANLTAELLQQGANPNLQTEEALPLPKEAASLTSLADSVHLQTPLHMAIAYNHPDVVSVILEQKANALHATNNLQIIPDFSLKDSRDQTVLGLALWTGMHTIAAQLLGSGAAINDTMSDGQTLLHMAIQRQDSKSALFLLEHQADINVRTQDGETALQLAIRNQLPLVVDAICTRGADMSVPDEKGNPPLWLALANNLEDIASTLVRHGCDATCWGPGPGGCLQTLLHRAIDENNEPTACFLIRSGCDVNSPRQPGANGEGEEEARDGQTPLHLAASWGLEETVQCLLEFGANVNAQDAEGRTPIHVAISSQHGVIIQLLVSHPDIHLNVRDRQGLTPFACAMTFKNNKSAEAILKRESGAAEQVDNKGRNFLHVAVQNSDIESVLFLISVHANVNSRVQDASKLTPLHLAVQAGSEIIVRNLLLAGAKVNELTKHRQTALHLAAQQDLPTICSVLLENGVDFAAVDENGNNALHLAVMHGRLNNIRVLLTECTVDAEAFNLRGQSPLHILGQYGKENAAAIFDLFLECMPGYPLDKPDADGSTVLLLAYMKGNANLCRAIVRSGARLGVNNNQGVNIFNYQVATKQLLFRLLDMLSKEPPWCDGSYCYECTARFGVTTRKHHCRHCGRLLCHKCSTKEIPIIKFDLNKPVRVCNICFDVLTLGGVS

SEQ ID NO: 18656 - protein, 962 aa, Homo sapiens
MEDCNVHSAASILASVKEQEARFERLTRALEQERRHVALQLERAQQPGMVSGGMGSGQPLPMAWQQLVLQEQSPGSQASLATMPEAPDVLEETVTVEEDPGTPTSHVSIVTSEDGTTRRTETKVTKTVKTVTTRTVRQVPVGPDGLPLLDGGPPLGPFADGALDRHFLLRGGGPVATLSRAYLSSGGGFPEGPEPRDSPSYGSLSRGLGMRPPRAGPLGPGPGDGCFTLPGHREAFPVGPEPGPPGGRSLPERFQAEPYGLEDDTRSLAADDEGGPELEPDYGTATRRRPECGRGLHTRAYEDTADDGGELADERPAFPMVTAPLAQPERGSMGSLDRLVRRSPSVDSARKEPRWRDPELPEVLAMLRHPVDPVKANAAAYLQHLCFENEGVKRRVRQLRGLPLLVALLDHPRAEVRRRACGALRNLSYGRDTDNKAAIRDCGGVPALVRLLRAARDNEVRELVTGTLWNLSSYEPLKMVIIDHGLQTLTHEVIVPHSGWEREPNEDSKPRDAEWTTVFKNTSGCLRNVSSDGAEARRRLRECEGLVDALLHALQSAVGRKDTDNKSVENCVCIMRNLSYHVHKEVPGADRYQEAEPGPLGSAVGSQRRRRDDASCFGGKKAKEEWFHQGKKDGEMDRNFDTLDLPKRTEAAKGFELLYQPEVVRLYLSLLTESRNFNTLEAAAGALQNLSAGNWMWATYIRATVRKERGLPVLVELLQSETDKVVRAVAIALRNLSLDRRNKDLIGSYAMAELVRNVRNAQAPPRPGACLEEDTVVAVLNTIHEIVSDSLDNARSLLQARGVPALVALVASSQSVREAKAASHVLQTVWSYKELRGTLQKDGWTKARFQSAAATAKGPKGALSPGGFDDSTLPLVDKSLEGEKTGSRDVIPMDALGPDGYSTVDRRERRPRGASSAGEASEKEPLKLDPSRKAPPPGPSRPAVRLVDAVGDAKPQPVDSWV

SEQ ID NO: 18657 - protein, 899 aa, Homo sapiens
MPAELRQEQSPGSQASLATMPEAPDVLEETVTVEEDPGTPTSHVSIVTSEDGTTRRTETKVTKTVKTVTTRTVRQVPVGPDGLPLLDGGPPLGPFADGALDRHFLLRGGGPVATLSRAYLSSGGGFPEGPEPRDSPSYGSLSRGLGMRPPRAGPLGPGPGDGCFTLPGHREAFPVGPEPGPPGGRSLPERFQAEPYGLEDDTRSLAADDEGGPELEPDYGTATRRRPECGRGLHTRAYEDTADDGGELADERPAFPMVTAPLAQPERGSMGSLDRLVRRSPSVDSARKEPRWRDPELPEVLAMLRHPVDPVKANAAAYLQHLCFENEGVKRRVRQLRGLPLLVALLDHPRAEVRRRACGALRNLSYGRDTDNKAAIRDCGGVPALVRLLRAARDNEVRELVTGTLWNLSSYEPLKMVIIDHGLQTLTHEVIVPHSGWEREPNEDSKPRDAEWTTVFKNTSGCLRNVSSDGAEARRRLRECEGLVDALLHALQSAVGRKDTDNKSVENCVCIMRNLSYHVHKEVPGADRYQEAEPGPLGSAVGSQRRRRDDASCFGGKKAKEEWFHQGKKDGEMDRNFDTLDLPKRTEAAKGFELLYQPEVVRLYLSLLTESRNFNTLEAAAGALQNLSAGNWMWATYIRATVRKERGLPVLVELLQSETDKVVRAVAIALRNLSLDRRNKDLIGSYAMAELVRNVRNAQAPPRPGACLEEDTVVAVLNTIHEIVSDSLDNARSLLQARGVPALVALVASSQSVREAKAASHVLQTVWSYKELRGTLQKDGWTKARFQSAAATAKGPKGALSPGGFDDSTLPLVDKSLEGEKTGSRDVIPMDALGPDGYSTVDRRERRPRGASSAGEASEKEPLKLDPSRKAPPPGPSRPAVRLVDAVGDAKPQPVDSWV

SEQ ID NO: 18658 - protein, 271 aa, Homo sapiens
MGNGGRSGLQQGKGNVDGVAATPTAASASCQYRCIECNQEAKELYRDYNHGVLKITICKSCQKPVDKYIEYDPVIILINAILCKAQAYRHILFNTQINIHGKLCIFCLLCEAYLRWWQLQDSNQNTAPDDLIRYAKEWDFYRMFAIAALEQTAYFIGIFTFLWVERPMTAKKKPNFILLLKALLLSSYGKLLLIPAVIWEHDYTSVCLKLIKVFVLTSNFQAIRVTLNINRKLSFLAVLSGLLLESIMVYFFQSMEWDVGSDYAIFKSQDF

SEQ ID NO: 18659 - protein, 1241 aa, Homo sapiens
MTNPSDRVLPANSMAESREGDFGCTVMELRKLMELRSRDALTQINVHYGGVQNLCSRLKTSPVEGLSGNPADLEKRRQVFGHNVIPPKKPKTFLELVWEALQDVTLIILEIAAIISLVLSFYRPAGEENELCGQVATTPEDENEAQAGWIEGAAILFSVIIVVLVTAFNDWSKEKQFRGLQCRIEQEQKFSIIRNGQLIQLPVAEIVVGDIAQVKYGDLLPADGILIQGNDLKIDESSLTGESDHVKKSLDKDPMLLSGTHVMEGSGRMVVTAVGVNSQTGIILTLLGVNEDDEGEKKKKGKKQGVPENRNKAKTQDGVALEIQPLNSQEGIDNEEKDKKAVKVPKKEKSVLQGKLTRLAVQIGKAGLLMSALTVFILILYFVIDNFVINRRPWLPECTPIYIQYFVKFFIIGITVLVVAVPEGLPLAVTISLAYSVKKMMKDNNLVRHLDACETMGNATAICSDKTGTLTMNRMTVVQAYIGGIHYRQIPSPDVFLPKVLDLIVNGISINSAYTSKILPPEKEGGLPRQVGNKTECALLGFVTDLKQDYQAVRNEVPEEKLYKVYTFNSVRKSMSTVIRNPNGGFRMYSKGASEIILRKCNRILDRKGEAVPFKNKDRDDMVRTVIEPMACDGLRTICIAYRDFDDTEPSWDNENEILTELTCIAVVGIEDPVRPEVPDAIAKCKQAGITVRMVTGDNINTARAIATKCGILTPGDDFLCLEGKEFNRLIRNEKGEVEQEKLDKIWPKLRVLARSSPTDKHTLVKGIIDSTVGEHRQVVAVTGDGTNDGPALKKADVGFAMGIAGTDVAKEASDIILTDDNFTSIVKAVMWGRNVYDSISKFLQFQLTVNVVAVIVAFTGACITQDSPLKAVQMLWVNLIMDTFASLALATEPPTESLLKRRPYGRNKPLISRTMMKNILGHAFYQLIVIFILVFAGEKFFDIDSGRKAPLHSPPSQHYTIVFNTFVLMQLFNEINSRKIHGEKNVFSGIYRNIIFCSVVLGTFICQIFIVEFGGKPFSCTSLSLSQWLWCLFIGIGELLWGQFISAIPTRSLKFLKEAGHGTTKEEITKDAEGLDEIDHAEMELRRGQILWFRGLNRIQTQIDVINTFQTGASFKGVLRRQNMGQHLDVKLVPSSSYIKVVKAFHSSLHESIQKPYNQKSIHSFMTHPEFAIEEELPRTPLLDEEEEENPDKASKFGTRVLLLDGEVTPYANTNNNAVDCNQVQLPQSDSSLQSLETSV

SEQ ID NO: 18660 - protein, 1170 aa, Homo sapiens
MTNPSDRVLPANSMAESREGDFGCTVMELRKLMELRSRDALTQINVHYGGVQNLCSRLKTSPVEGLSGNPADLEKRRQVFGHNVIPPKKPKTFLELVWEALQDVTLIILEIAAIISLVLSFYRPAGEENELCGQVATTPEDENEAQAGWIEGAAILFSVIIVVLVTAFNDWSKEKQFRGLQCRIEQEQKFSIIRNGQLIQLPVAEIVVGDIAQVKYGDLLPADGILIQGNDLKIDESSLTGESDHVKKSLDKDPMLLSGTHVMEGSGRMVVTAVGVNSQTGIILTLLGVNEDDEGEKKKKGKKQGVPENRNKAKTQDGVALEIQPLNSQEGIDNEEKDKKAVKVPKKEKSVLQGKLTRLAVQIGKAGLLMSALTVFILILYFVIDNFVINRRPWLPECTPIYIQYFVKFFIIGITVLVVAVPEGLPLAVTISLAYSVKKMMKDNNLVRHLDACETMGNATAICSDKTGTLTMNRMTVVQAYIGGIHYRQIPSPDVFLPKVLDLIVNGISINSAYTSKILPPEKEGGLPRQVGNKTECALLGFVTDLKQDYQAVRNEVPEEKLYKVYTFNSVRKSMSTVIRNPNGGFRMYSKGASEIILRKCNRILDRKGEAVPFKNKDRDDMVRTVIEPMACDGLRTICIAYRDFDDTEPSWDNENEILTELTCIAVVGIEDPVRPEVPDAIAKCKQAGITVRMVTGDNINTARAIATKCGILTPGDDFLCLEGKEFNRLIRNEKGEVEQEKLDKIWPKLRVLARSSPTDKHTLVKGIIDSTVGEHRQVVAVTGDGTNDGPALKKADVGFAMGIAGTDVAKEASDIILTDDNFTSIVKAVMWGRNVYDSISKFLQFQLTVNVVAVIVAFTGACITQDSPLKAVQMLWVNLIMDTFASLALATEPPTESLLKRRPYGRNKPLISRTMMKNILGHAFYQLIVIFILVFAGEKFFDIDSGRKAPLHSPPSQHYTIVFNTFVLMQLFNEINSRKIHGEKNVFSGIYRNIIFCSVVLGTFICQIFIVEFGGKPFSCTSLSLSQWLWCLFIGIGELLWGQFISAIPTRSLKFLKEAGHGTTKEEITKDAEGLDEIDHAEMELRRGQILWFRGLNRIQTQIDVINTFQTGASFKGVLRRQNMGQHLDVKLVPSSSYVAVAPVKSSPTTSVPAVSSPPMGNQSGQSVP

SEQ ID NO: 18661 - protein, 1158 aa, Homo sapiens
MTNPSDRVLPANSMAESREGDFGCTVMELRKLMELRSRDALTQINVHYGGVQNLCSRLKTSPVEGLSGNPADLEKRRQVFGHNVIPPKKPKTFLELVWEALQDVTLIILEIAAIISLVLSFYRPAGEENELCGQVATTPEDENEAQAGWIEGAAILFSVIIVVLVTAFNDWSKEKQFRGLQCRIEQEQKFSIIRNGQLIQLPVAEIVVGDIAQVKYGDLLPADGILIQGNDLKIDESSLTGESDHVKKSLDKDPMLLSGTHVMEGSGRMVVTAVGVNSQTGIILTLLGVNEDDEGEKKKKAKTQDGVALEIQPLNSQEGIDNEEKDKKAVKVPKKEKSVLQGKLTRLAVQIGKAGLLMSALTVFILILYFVIDNFVINRRPWLPECTPIYIQYFVKFFIIGITVLVVAVPEGLPLAVTISLAYSVKKMMKDNNLVRHLDACETMGNATAICSDKTGTLTMNRMTVVQAYIGGIHYRQIPSPDVFLPKVLDLIVNGISINSAYTSKILPPEKEGGLPRQVGNKTECALLGFVTDLKQDYQAVRNEVPEEKLYKVYTFNSVRKSMSTVIRNPNGGFRMYSKGASEIILRKCNRILDRKGEAVPFKNKDRDDMVRTVIEPMACDGLRTICIAYRDFDDTEPSWDNENEILTELTCIAVVGIEDPVRPEVPDAIAKCKQAGITVRMVTGDNINTARAIATKCGILTPGDDFLCLEGKEFNRLIRNEKGEVEQEKLDKIWPKLRVLARSSPTDKHTLVKGIIDSTVGEHRQVVAVTGDGTNDGPALKKADVGFAMGIAGTDVAKEASDIILTDDNFTSIVKAVMWGRNVYDSISKFLQFQLTVNVVAVIVAFTGACITQDSPLKAVQMLWVNLIMDTFASLALATEPPTESLLKRRPYGRNKPLISRTMMKNILGHAFYQLIVIFILVFAGEKFFDIDSGRKAPLHSPPSQHYTIVFNTFVLMQLFNEINSRKIHGEKNVFSGIYRNIIFCSVVLGTFICQIFIVEFGGKPFSCTSLSLSQWLWCLFIGIGELLWGQFISAIPTRSLKFLKEAGHGTTKEEITKDAEGLDEIDHAEMELRRGQILWFRGLNRIQTQIDVINTFQTGASFKGVLRRQNMGQHLDVKLVPSSSYVAVAPVKSSPTTSVPAVSSPPMGNQSGQSVP

SEQ ID NO: 18662 - protein, 1134 aa, Homo sapiens
MTNPSDRVLPANSMAESREGDFGCTVMELRKLMELRSRDALTQINVHYGGVQNLCSRLKTSPVEGLSGNPADLEKRRQVFGHNVIPPKKPKTFLELVWEALQDVTLIILEIAAIISLVLSFYRPAGEENELCGQVATTPEDENEAQAGWIEGAAILFSVIIVVLVTAFNDWSKEKQFRGLQCRIEQEQKFSIIRNGQLIQLPVAEIVVGDIAQVKYGDLLPADGILIQGNDLKIDESSLTGESDHVKKSLDKDPMLLSGTHVMEGSGRMVVTAVGVNSQTGIILTLLGVNEDDEGEKKKKGKKQGVPENRNKAKTQDGVALEIQPLNSQEGIDNEEKDKKAVKVPKKEKSVLQGKLTRLAVQIGKAGLLMSALTVFILILYFVIDNFVINRRPWLPECTPIYIQYFVKFFIIGITVLVVAVPEGLPLAVTISLAYSVKKMMKDNNLVRHLDACETMGNATAICSDKTGTLTMNRMTVVQAYIGGIHYRQIPSPDVFLPKVLDLIVNGISINSAYTSKILPPEKEGGLPRQVGNKTECALLGFVTDLKQDYQAVRNEVPEEKLYKVYTFNSVRKSMSTVIRNPNGGFRMYSKGASEIILRKCNRILDRKGEAVPFKNKDRDDMVRTVIEPMACDGLRTICIAYRDFDDTEPSWDNENEILTELTCIAVVGIEDPVRPEVPDAIAKCKQAGITVRMVTGDNINTARAIATKCGILTPGDDFLCLEGKEFNRLIRNEKGEVEQEKLDKIWPKLRVLARSSPTDKHTLVKGIIDSTVGEHRQVVAVTGDGTNDGPALKKADVGFAMGIAGTDVAKEASDIILTDDNFTSIVKAVMWGRNVYDSISKFLQFQLTVNVVAVIVAFTGACITQDSPLKAVQMLWVNLIMDTFASLALATEPPTESLLKRRPYGRNKPLISRTMMKNILGHAFYQLIVIFILVFAGEKFFDIDSGRKAPLHSPPSQHYTIVFNTFVLMQLFNEINSRKIHGEKNVFSGIYRNIIFCSVVLGTFICQFISAIPTRSLKFLKEAGHGTTKEEITKDAEGLDEIDHAEMELRRGQILWFRGLNRIQTQIDVINTFQTGASFKGVLRRQNMGQHLDVKLVPSSSYVAVAPVKSSPTTSVPAVSSPPMGNQSGQSVP

SEQ ID NO: 18663 - protein, 1122 aa, Homo sapiens
MTNPSDRVLPANSMAESREGDFGCTVMELRKLMELRSRDALTQINVHYGGVQNLCSRLKTSPVEGLSGNPADLEKRRQVFGHNVIPPKKPKTFLELVWEALQDVTLIILEIAAIISLVLSFYRPAGEENELCGQVATTPEDENEAQAGWIEGAAILFSVIIVVLVTAFNDWSKEKQFRGLQCRIEQEQKFSIIRNGQLIQLPVAEIVVGDIAQVKYGDLLPADGILIQGNDLKIDESSLTGESDHVKKSLDKDPMLLSGTHVMEGSGRMVVTAVGVNSQTGIILTLLGVNEDDEGEKKKKAKTQDGVALEIQPLNSQEGIDNEEKDKKAVKVPKKEKSVLQGKLTRLAVQIGKAGLLMSALTVFILILYFVIDNFVINRRPWLPECTPIYIQYFVKFFIIGITVLVVAVPEGLPLAVTISLAYSVKKMMKDNNLVRHLDACETMGNATAICSDKTGTLTMNRMTVVQAYIGGIHYRQIPSPDVFLPKVLDLIVNGISINSAYTSKILPPEKEGGLPRQVGNKTECALLGFVTDLKQDYQAVRNEVPEEKLYKVYTFNSVRKSMSTVIRNPNGGFRMYSKGASEIILRKCNRILDRKGEAVPFKNKDRDDMVRTVIEPMACDGLRTICIAYRDFDDTEPSWDNENEILTELTCIAVVGIEDPVRPEVPDAIAKCKQAGITVRMVTGDNINTARAIATKCGILTPGDDFLCLEGKEFNRLIRNEKGEVEQEKLDKIWPKLRVLARSSPTDKHTLVKGIIDSTVGEHRQVVAVTGDGTNDGPALKKADVGFAMGIAGTDVAKEASDIILTDDNFTSIVKAVMWGRNVYDSISKFLQFQLTVNVVAVIVAFTGACITQDSPLKAVQMLWVNLIMDTFASLALATEPPTESLLKRRPYGRNKPLISRTMMKNILGHAFYQLIVIFILVFAGEKFFDIDSGRKAPLHSPPSQHYTIVFNTFVLMQLFNEINSRKIHGEKNVFSGIYRNIIFCSVVLGTFICQFISAIPTRSLKFLKEAGHGTTKEEITKDAEGLDEIDHAEMELRRGQILWFRGLNRIQTQIDVINTFQTGASFKGVLRRQNMGQHLDVKLVPSSSYVAVAPVKSSPTTSVPAVSSPPMGNQSGQSVP

SEQ ID NO: 18664 - protein, 1205 aa, Homo sapiens
MTNPSDRVLPANSMAESREGDFGCTVMELRKLMELRSRDALTQINVHYGGVQNLCSRLKTSPVEGLSGNPADLEKRRQVFGHNVIPPKKPKTFLELVWEALQDVTLIILEIAAIISLVLSFYRPAGEENELCGQVATTPEDENEAQAGWIEGAAILFSVIIVVLVTAFNDWSKEKQFRGLQCRIEQEQKFSIIRNGQLIQLPVAEIVVGDIAQVKYGDLLPADGILIQGNDLKIDESSLTGESDHVKKSLDKDPMLLSGTHVMEGSGRMVVTAVGVNSQTGIILTLLGVNEDDEGEKKKKGKKQGVPENRNKAKTQDGVALEIQPLNSQEGIDNEEKDKKAVKVPKKEKSVLQGKLTRLAVQIGKAGLLMSALTVFILILYFVIDNFVINRRPWLPECTPIYIQYFVKFFIIGITVLVVAVPEGLPLAVTISLAYSVKKMMKDNNLVRHLDACETMGNATAICSDKTGTLTMNRMTVVQAYIGGIHYRQIPSPDVFLPKVLDLIVNGISINSAYTSKILPPEKEGGLPRQVGNKTECALLGFVTDLKQDYQAVRNEVPEEKLYKVYTFNSVRKSMSTVIRNPNGGFRMYSKGASEIILRKCNRILDRKGEAVPFKNKDRDDMVRTVIEPMACDGLRTICIAYRDFDDTEPSWDNENEILTELTCIAVVGIEDPVRPEVPDAIAKCKQAGITVRMVTGDNINTARAIATKCGILTPGDDFLCLEGKEFNRLIRNEKGEVEQEKLDKIWPKLRVLARSSPTDKHTLVKGIIDSTVGEHRQVVAVTGDGTNDGPALKKADVGFAMGIAGTDVAKEASDIILTDDNFTSIVKAVMWGRNVYDSISKFLQFQLTVNVVAVIVAFTGACITQDSPLKAVQMLWVNLIMDTFASLALATEPPTESLLKRRPYGRNKPLISRTMMKNILGHAFYQLIVIFILVFAGEKFFDIDSGRKAPLHSPPSQHYTIVFNTFVLMQLFNEINSRKIHGEKNVFSGIYRNIIFCSVVLGTFICQIFIVEFGGKPFSCTSLSLSQWLWCLFIGIGELLWGQFISAIPTRSLKFLKEAGHGTTKEEITKDAEGLDEIDHAEMELRRGQILWFRGLNRIQTQIKVVKAFHSSLHESIQKPYNQKSIHSFMTHPEFAIEEELPRTPLLDEEEEENPDKASKFGTRVLLLDGEVTPYANTNNNAVDCNQVQLPQSDSSLQSLETSV

SEQ ID NO: 18665 - protein, 1193 aa, Homo sapiens
MTNPSDRVLPANSMAESREGDFGCTVMELRKLMELRSRDALTQINVHYGGVQNLCSRLKTSPVEGLSGNPADLEKRRQVFGHNVIPPKKPKTFLELVWEALQDVTLIILEIAAIISLVLSFYRPAGEENELCGQVATTPEDENEAQAGWIEGAAILFSVIIVVLVTAFNDWSKEKQFRGLQCRIEQEQKFSIIRNGQLIQLPVAEIVVGDIAQVKYGDLLPADGILIQGNDLKIDESSLTGESDHVKKSLDKDPMLLSGTHVMEGSGRMVVTAVGVNSQTGIILTLLGVNEDDEGEKKKKAKTQDGVALEIQPLNSQEGIDNEEKDKKAVKVPKKEKSVLQGKLTRLAVQIGKAGLLMSALTVFILILYFVIDNFVINRRPWLPECTPIYIQYFVKFFIIGITVLVVAVPEGLPLAVTISLAYSVKKMMKDNNLVRHLDACETMGNATAICSDKTGTLTMNRMTVVQAYIGGIHYRQIPSPDVFLPKVLDLIVNGISINSAYTSKILPPEKEGGLPRQVGNKTECALLGFVTDLKQDYQAVRNEVPEEKLYKVYTFNSVRKSMSTVIRNPNGGFRMYSKGASEIILRKCNRILDRKGEAVPFKNKDRDDMVRTVIEPMACDGLRTICIAYRDFDDTEPSWDNENEILTELTCIAVVGIEDPVRPEVPDAIAKCKQAGITVRMVTGDNINTARAIATKCGILTPGDDFLCLEGKEFNRLIRNEKGEVEQEKLDKIWPKLRVLARSSPTDKHTLVKGIIDSTVGEHRQVVAVTGDGTNDGPALKKADVGFAMGIAGTDVAKEASDIILTDDNFTSIVKAVMWGRNVYDSISKFLQFQLTVNVVAVIVAFTGACITQDSPLKAVQMLWVNLIMDTFASLALATEPPTESLLKRRPYGRNKPLISRTMMKNILGHAFYQLIVIFILVFAGEKFFDIDSGRKAPLHSPPSQHYTIVFNTFVLMQLFNEINSRKIHGEKNVFSGIYRNIIFCSVVLGTFICQIFIVEFGGKPFSCTSLSLSQWLWCLFIGIGELLWGQFISAIPTRSLKFLKEAGHGTTKEEITKDAEGLDEIDHAEMELRRGQILWFRGLNRIQTQIKVVKAFHSSLHESIQKPYNQKSIHSFMTHPEFAIEEELPRTPLLDEEEEENPDKASKFGTRVLLLDGEVTPYANTNNNAVDCNQVQLPQSDSSLQSLETSV

SEQ ID NO: 18666 - protein, 1229 aa, Homo sapiens
MTNPSDRVLPANSMAESREGDFGCTVMELRKLMELRSRDALTQINVHYGGVQNLCSRLKTSPVEGLSGNPADLEKRRQVFGHNVIPPKKPKTFLELVWEALQDVTLIILEIAAIISLVLSFYRPAGEENELCGQVATTPEDENEAQAGWIEGAAILFSVIIVVLVTAFNDWSKEKQFRGLQCRIEQEQKFSIIRNGQLIQLPVAEIVVGDIAQVKYGDLLPADGILIQGNDLKIDESSLTGESDHVKKSLDKDPMLLSGTHVMEGSGRMVVTAVGVNSQTGIILTLLGVNEDDEGEKKKKAKTQDGVALEIQPLNSQEGIDNEEKDKKAVKVPKKEKSVLQGKLTRLAVQIGKAGLLMSALTVFILILYFVIDNFVINRRPWLPECTPIYIQYFVKFFIIGITVLVVAVPEGLPLAVTISLAYSVKKMMKDNNLVRHLDACETMGNATAICSDKTGTLTMNRMTVVQAYIGGIHYRQIPSPDVFLPKVLDLIVNGISINSAYTSKILPPEKEGGLPRQVGNKTECALLGFVTDLKQDYQAVRNEVPEEKLYKVYTFNSVRKSMSTVIRNPNGGFRMYSKGASEIILRKCNRILDRKGEAVPFKNKDRDDMVRTVIEPMACDGLRTICIAYRDFDDTEPSWDNENEILTELTCIAVVGIEDPVRPEVPDAIAKCKQAGITVRMVTGDNINTARAIATKCGILTPGDDFLCLEGKEFNRLIRNEKGEVEQEKLDKIWPKLRVLARSSPTDKHTLVKGIIDSTVGEHRQVVAVTGDGTNDGPALKKADVGFAMGIAGTDVAKEASDIILTDDNFTSIVKAVMWGRNVYDSISKFLQFQLTVNVVAVIVAFTGACITQDSPLKAVQMLWVNLIMDTFASLALATEPPTESLLKRRPYGRNKPLISRTMMKNILGHAFYQLIVIFILVFAGEKFFDIDSGRKAPLHSPPSQHYTIVFNTFVLMQLFNEINSRKIHGEKNVFSGIYRNIIFCSVVLGTFICQIFIVEFGGKPFSCTSLSLSQWLWCLFIGIGELLWGQFISAIPTRSLKFLKEAGHGTTKEEITKDAEGLDEIDHAEMELRRGQILWFRGLNRIQTQIDVINTFQTGASFKGVLRRQNMGQHLDVKLVPSSSYIKVVKAFHSSLHESIQKPYNQKSIHSFMTHPEFAIEEELPRTPLLDEEEEENPDKASKFGTRVLLLDGEVTPYANTNNNAVDCNQVQLPQSDSSLQSLETSV

SEQ ID NO: 18667 - protein, 290 aa, Homo sapiens
MDIEAYLERIGYKKSRNKLDLETLTDILQHQIRAVPFENLNIHCGDAMDLGLEAIFDQVVRRNRGGWCLQVNHLLYWALTTIGFETTMLGGYVYSTPAKKYSTGMIHLLLQVTIDGRNYIVDAGFGRSYQMWQPLELISGKDQPQVPCVFRLTEENGFWYLDQIRREQYIPNEEFLHSDLLEDSKYRKIYSFTLKPRTIEDFESMNTYLQTSPSSVFTSKSFCSLQTPDGVHCLVGFTLTHRRFNYKDNTDLIEFKTLSEEEIEKVLKNIFNISLQRKLVPKHGDRFFTI

SEQ ID NO: 18668 - protein, 919 aa, Homo sapiens
MKVARFQKIPNGENETMIPVLTSKKASELPVSEVASILQADLQNGLNKCEVSHRRAFHGWNEFDISEDEPLWKKYISQFKNPLIMLLLASAVISVLMHQFDDAVSITVAILIVVTVAFVQEYRSEKSLEELSKLVPPECHCVREGKLEHTLARDLVPGDTVCLSVGDRVPADLRLFEAVDLSIDESSLTGETTPCSKVTAPQPAATNGDLASRSNIAFMGTLVRCGKAKGVVIGTGENSEFGEVFKMMQAEEAPKTPLQKSMDLLGKQLSFYSFGIIGIIMLVGWLLGKDILEMFTISVSLAVAAIPEGLPIVVTVTLALGVMRMVKKRAIVKKLPIVETLGCCNVICSDKTGTLTKNEMTVTHIFTSDGLHAEVTGVGYNQFGEVIVDGDVVHGFYNPAVSRIVEAGCVCNDAVIRNNTLMGKPTEGALIALAMKMGLDGLQQDYIRKAEYPFSSEQKWMAVKCVHRTQQDRPEICFMKGAYEQVIKYCTTYQSKGQTLTLTQQQRDVYQQEKARMGSAGLRVLALASGPELGQLTFLGLVGIIDPPRTGVKEAVTTLIASGVSIKMITGDSQETAVAIASRLGLYSKTSQSVSGEEIDAMDVQQLSQIVPKVAVFYRASPRHKMKIIKSLQKNGSVVAMTGDGVNDAVALKAADIGVAMGQTGTDVCKEAADMILVDDDFQTIMSAIEEGKGIYNNIKNFVRFQLSTSIAALTLISLATLMNFPNPLNAMQILWINIIMDGPPAQSLGVEPVDKDVIRKPPRNWKDSILTKNLILKILVSSIIIVCGTLFVFWRELRDNVITPRDTTMTFTCFVFFDMFNALSSRSQTKSVFEIGLCSNRMFCYAVLGSIMGQLLVIYFPPLQKVFQTESLSILDLLFLLGLTSSVCIVAEIIKKVERSREKIQKHVSSTSSSFLEV

SEQ ID NO: 18669 - protein, 888 aa, Homo sapiens
MKVARFQKIPNGENETMIPVLTSKKASELPVSEVASILQADLQNGLNKCEVSHRRAFHGWNEFDISEDEPLWKKYISQFKNPLIMLLLASAVISVLMHQFDDAVSITVAILIVVTVAFVQEYRSEKSLEELSKLVPPECHCVREGKLEHTLARDLVPGDTVCLSVGDRVPADLRLFEAVDLSIDESSLTGETTPCSKVTAPQPAATNGDLASRSNIAFMGTLVRCGKAKGVVIGTGENSEFGEVFKMMQAEEAPKTPLQKSMDLLGKQLSFYSFGIIGIIMLVGWLLGKDILEMFTISVSLAVAAIPEGLPIVVTVTLALGVMRMVKKRAIVKKLPIVETLGCCNVICSDKTGTLTKNEMTVTHIFTSDGLHAEVTGVGYNQFGEVIVDGDVVHGFYNPAVSRIVEAGCVCNDAVIRNNTLMGKPTEGALIALAMKMGLDGLQQDYIRKAEYPFSSEQKWMAVKCVHRTQQDRPEICFMKGAYEQVIKYCTTYQSKGQTLTLTQQQRDVYQQEKARMGSAGLRVLALASGPELGQLTFLGLVGIIDPPRTGVKEAVTTLIASGVSIKMITGDSQETAVAIASRLGLYSKTSQSVSGEEIDAMDVQQLSQIVPKVAVFYRASPRHKMKIIKSLQKNGSVVAMTGDGVNDAVALKAADIGVAMGQTGTDVCKEAADMILVDDDFQTIMSAIEEGKGIYNNIKNFVRFQLSTSIAALTLISLATLMNFPNPLNAMQILWINIIMDGPPAQSLGVEPVDKDVIRKPPRNWKDSILTKNLILKILVSSIIIVCGTLFVFWRELRDNVITPRDTTMTFTCFVFFDMFNALSSRSQTKSVFEIGLCSNRMFCYAVLGSIMGQLLVIYFPPLQKVFQTESLSILGLALGEEWTAAG

SEQ ID NO: 18670 - protein, 923 aa, Homo sapiens
MIPVLTSKKASELPVSEVASILQADLQNGLNKCEVSHRRAFHGWNEFDISEDEPLWKKYISQFKNPLIMLLLASAVISVLMHQFDDAVSITVAILIVVTVAFVQEYRSEKSLEELSKLVPPECHCVREGKLEHTLARDLVPGDTVCLSVGDRVPADLRLFEAVDLSIDESSLTGETTPCSKVTAPQPAATNGDLASRSNIAFMGTLVRCGKAKGVVIGTGENSEFGEVFKMMQAEEAPKTPLQKSMDLLGKQLSFYSFGIIGIIMLVGWLLGKDILEMFTISVSLAVAAIPEGLPIVVTVTLALGVMRMVKKRAIVKKLPIVETLGCCNVICSDKTGTLTKNEMTVTHIFTSDGLHAEVTGVGYNQFGEVIVDGDVVHGFYNPAVSRIVEAGCVCNDAVIRNNTLMGKPTEGALIALAMKMGLDGLQQDYIRKAEYPFSSEQKWMAVKCVHRTQQDRPEICFMKGAYEQVIKYCTTYQSKGQTLTLTQQQRDVYQQEKARMGSAGLRVLALASGPELGQLTFLGLVGIIDPPRTGVKEAVTTLIASGVSIKMITGDSQETAVAIASRLGLYSKTSQSVSGEEIDAMDVQQLSQIVPKVAVFYRASPRHKMKIIKSLQKNGSVVAMTGDGVNDAVALKAADIGVAMGQTGTDVCKEAADMILVDDDFQTIMSAIEEGKGIYNNIKNFVRFQLSTSIAALTLISLATLMNFPNPLNAMQILWINIIMDGPPAQSLGVEPVDKDVIRKPPRNWKDSILTKNLILKILVSSIIIVCGTLFVFWRELRDNVITPRDTTMTFTCFVFFDMFNALSSRSQTKSVFEIGLCSNRMFCYAVLGSIMGQLLVIYFPPLQKVFQTESLSILDLLFLLGLTSSVCIVAEIIKKVERSREKIQKHVWLWERSGQQLVEIHPHLETGLPLTEDVSCV

SEQ ID NO: 18671 - protein, 903 aa, Homo sapiens
MIPVLTSKKASELPVSEVASILQADLQNGLNKCEVSHRRAFHGWNEFDISEDEPLWKKYISQFKNPLIMLLLASAVISVLMHQFDDAVSITVAILIVVTVAFVQEYRSEKSLEELSKLVPPECHCVREGKLEHTLARDLVPGDTVCLSVGDRVPADLRLFEAVDLSIDESSLTGETTPCSKVTAPQPAATNGDLASRSNIAFMGTLVRCGKAKGVVIGTGENSEFGEVFKMMQAEEAPKTPLQKSMDLLGKQLSFYSFGIIGIIMLVGWLLGKDILEMFTISVSLAVAAIPEGLPIVVTVTLALGVMRMVKKRAIVKKLPIVETLGCCNVICSDKTGTLTKNEMTVTHIFTSDGLHAEVTGVGYNQFGEVIVDGDVVHGFYNPAVSRIVEAGCVCNDAVIRNNTLMGKPTEGALIALAMKMGLDGLQQDYIRKAEYPFSSEQKWMAVKCVHRTQQDRPEICFMKGAYEQVIKYCTTYQSKGQTLTLTQQQRDVYQQEKARMGSAGLRVLALASGPELGQLTFLGLVGIIDPPRTGVKEAVTTLIASGVSIKMITGDSQETAVAIASRLGLYSKTSQSVSGEEIDAMDVQQLSQIVPKVAVFYRASPRHKMKIIKSLQKNGSVVAMTGDGVNDAVALKAADIGVAMGQTGTDVCKEAADMILVDDDFQTIMSAIEEGKGIYNNIKNFVRFQLSTSIAALTLISLATLMNFPNPLNAMQILWINIIMDGPPAQSLGVEPVDKDVIRKPPRNWKDSILTKNLILKILVSSIIIVCGTLFVFWRELRDNVITPRDTTMTFTCFVFFDMFNALSSRSQTKSVFEIGLCSNRMFCYAVLGSIMGQLLVIYFPPLQKVFQTESLSILDLLFLLGLTSSVCIVAEIIKKVERSREKIQKHVSSTSSSFLEV

SEQ ID NO: 18672 - protein, 939 aa, Homo sapiens
MKVARFQKIPNGENETMIPVLTSKKASELPVSEVASILQADLQNGLNKCEVSHRRAFHGWNEFDISEDEPLWKKYISQFKNPLIMLLLASAVISVLMHQFDDAVSITVAILIVVTVAFVQEYRSEKSLEELSKLVPPECHCVREGKLEHTLARDLVPGDTVCLSVGDRVPADLRLFEAVDLSIDESSLTGETTPCSKVTAPQPAATNGDLASRSNIAFMGTLVRCGKAKGVVIGTGENSEFGEVFKMMQAEEAPKTPLQKSMDLLGKQLSFYSFGIIGIIMLVGWLLGKDILEMFTISVSLAVAAIPEGLPIVVTVTLALGVMRMVKKRAIVKKLPIVETLGCCNVICSDKTGTLTKNEMTVTHIFTSDGLHAEVTGVGYNQFGEVIVDGDVVHGFYNPAVSRIVEAGCVCNDAVIRNNTLMGKPTEGALIALAMKMGLDGLQQDYIRKAEYPFSSEQKWMAVKCVHRTQQDRPEICFMKGAYEQVIKYCTTYQSKGQTLTLTQQQRDVYQQEKARMGSAGLRVLALASGPELGQLTFLGLVGIIDPPRTGVKEAVTTLIASGVSIKMITGDSQETAVAIASRLGLYSKTSQSVSGEEIDAMDVQQLSQIVPKVAVFYRASPRHKMKIIKSLQKNGSVVAMTGDGVNDAVALKAADIGVAMGQTGTDVCKEAADMILVDDDFQTIMSAIEEGKGIYNNIKNFVRFQLSTSIAALTLISLATLMNFPNPLNAMQILWINIIMDGPPAQSLGVEPVDKDVIRKPPRNWKDSILTKNLILKILVSSIIIVCGTLFVFWRELRDNVITPRDTTMTFTCFVFFDMFNALSSRSQTKSVFEIGLCSNRMFCYAVLGSIMGQLLVIYFPPLQKVFQTESLSILDLLFLLGLTSSVCIVAEIIKKVERSREKIQKHVWLWERSGQQLVEIHPHLETGLPLTEDVSCV

SEQ ID NO: 18673 - protein, 959 aa, Homo sapiens
MKVARFQKIPNGENETMIPVLTSKKASELPVSEVASILQADLQNGLNKCEVSHRRAFHGWNEFDISEDEPLWKKYISQFKNPLIMLLLASAVISVLMHQFDDAVSITVAILIVVTVAFVQEYRSEKSLEELSKLVPPECHCVREGKLEHTLARDLVPGDTVCLSVGDRVPADLRLFEAVDLSIDESSLTGETTPCSKVTAPQPAATNGDLASRSNIAFMGTLVRCGKAKGVVIGTGENSEFGEVFKMMQAEEAPKTPLQKSMDLLGKQLSFYSFGIIGIIMLVGWLLGKDILEMFTISVSLAVAAIPEGLPIVVTVTLALGVMRMVKKRAIVKKLPIVETLGCCNVICSDKTGTLTKNEMTVTHIFTSDGLHAEVTGVGYNQFGEVIVDGDVVHGFYNPAVSRIVEAGCVCNDAVIRNNTLMGKPTEGALIALAMKMGLDGLQQDYIRKAEYPFSSEQKWMAVKCVHRTQQDRPEICFMKGAYEQVIKYCTTYQSKGQTLTLTQQQRDVYQQEKARMGSAGLRVLALASGPELGQLTFLGLVGIIDPPRTGVKEAVTTLIASGVSIKMITGDSQETAVAIASRLGLYSKTSQSVSGEEIDAMDVQQLSQIVPKVAVFYRASPRHKMKIIKSLQKNGSVVAMTGDGVNDAVALKAADIGVAMGQTGTDVCKEAADMILVDDDFQTIMSAIEEGKGIYNNIKNFVRFQLSTSIAALTLISLATLMNFPNPLNAMQILWINIIMDGPPAQSLGVEPVDKDVIRKPPRNWKDSILTKNLILKILVSSIIIVCGTLFVFWRELRDNVITPRDTTMTFTCFVFFDMFNALSSRSQTKSVFEIGLCSNRMFCYAVLGSIMGQLLVIYFPPLQKVFQTESLSILDLLFLLGLTSSVCIVAEIIKKVERSREKIQKHVSSTSSSFLEVSSTSSSFLEVWLWERSGQQLVEIHPHLETGLPLTEDVSCV

SEQ ID NO: 18674 - protein, 973 aa, Homo sapiens
MDSLLPPSRFSYFKKYPLHAIRRYLSTLRNQRAEEQVARFQKIPNGENETMIPVLTSKKASELPVSEVASILQADLQNGLNKCEVSHRRAFHGWNEFDISEDEPLWKKYISQFKNPLIMLLLASAVISVLMHQFDDAVSITVAILIVVTVAFVQEYRSEKSLEELSKLVPPECHCVREGKLEHTLARDLVPGDTVCLSVGDRVPADLRLFEAVDLSIDESSLTGETTPCSKVTAPQPAATNGDLASRSNIAFMGTLVRCGKAKGVVIGTGENSEFGEVFKMMQAEEAPKTPLQKSMDLLGKQLSFYSFGIIGIIMLVGWLLGKDILEMFTISVSLAVAAIPEGLPIVVTVTLALGVMRMVKKRAIVKKLPIVETLGCCNVICSDKTGTLTKNEMTVTHIFTSDGLHAEVTGVGYNQFGEVIVDGDVVHGFYNPAVSRIVEAGCVCNDAVIRNNTLMGKPTEGALIALAMKMGLDGLQQDYIRKAEYPFSSEQKWMAVKCVHRTQQDRPEICFMKGAYEQVIKYCTTYQSKGQTLTLTQQQRDVYQQEKARMGSAGLRVLALASGPELGQLTFLGLVGIIDPPRTGVKEAVTTLIASGVSIKMITGDSQETAVAIASRLGLYSKTSQSVSGEEIDAMDVQQLSQIVPKVAVFYRASPRHKMKIIKSLQKNGSVVAMTGDGVNDAVALKAADIGVAMGQTGTDVCKEAADMILVDDDFQTIMSAIEEGKGIYNNIKNFVRFQLSTSIAALTLISLATLMNFPNPLNAMQILWINIIMDGPPAQSLGVEPVDKDVIRKPPRNWKDSILTKNLILKILVSSIIIVCGTLFVFWRELRDNVITPRDTTMTFTCFVFFDMFNALSSRSQTKSVFEIGLCSNRMFCYAVLGSIMGQLLVIYFPPLQKVFQTESLSILDLLFLLGLTSSVCIVAEIIKKVERSREKIQKHVWLWERSGQQLVEIHPHLETGLPLTEDVSCV

SEQ ID NO: 18675 - protein, 944 aa, Homo sapiens
MDSLLPPSRFSYFKKYPLHAIRRYLSTLRNQRAEEQVARFQKIPNGENETMIPVLTSKKASELPVSEVASILQFKNPLIMLLLASAVISVLMHQFDDAVSITVAILIVVTVAFVQEYRSEKSLEELSKLVPPECHCVREGKLEHTLARDLVPGDTVCLSVGDRVPADLRLFEAVDLSIDESSLTGETTPCSKVTAPQPAATNGDLASRSNIAFMGTLVRCGKAKGVVIGTGENSEFGEVFKMMQAEEAPKTPLQKSMDLLGKQLSFYSFGIIGIIMLVGWLLGKDILEMFTISVSLAVAAIPEGLPIVVTVTLALGVMRMVKKRAIVKKLPIVETLGCCNVICSDKTGTLTKNEMTVTHIFTSDGLHAEVTGVGYNQFGEVIVDGDVVHGFYNPAVSRIVEAGCVCNDAVIRNNTLMGKPTEGALIALAMKMGLDGLQQDYIRKAEYPFSSEQKWMAVKCVHRTQQDRPEICFMKGAYEQVIKYCTTYQSKGQTLTLTQQQRDVYQQEKARMGSAGLRVLALASGPELGQLTFLGLVGIIDPPRTGVKEAVTTLIASGVSIKMITGDSQETAVAIASRLGLYSKTSQSVSGEEIDAMDVQQLSQIVPKVAVFYRASPRHKMKIIKSLQKNGSVVAMTGDGVNDAVALKAADIGVAMGQTGTDVCKEAADMILVDDDFQTIMSAIEEGKGIYNNIKNFVRFQLSTSIAALTLISLATLMNFPNPLNAMQILWINIIMDGPPAQSLGVEPVDKDVIRKPPRNWKDSILTKNLILKILVSSIIIVCGTLFVFWRELRDNVITPRDTTMTFTCFVFFDMFNALSSRSQTKSVFEIGLCSNRMFCYAVLGSIMGQLLVIYFPPLQKVFQTESLSILDLLFLLGLTSSVCIVAEIIKKVERSREKIQKHVSSTSSSFLEVWLWERSGQQLVEIHPHLETGLPLTEDVSCV

SEQ ID NO: 18676 - protein, 949 aa, Homo sapiens
MKVARFQKIPNGENETMIPVLTSKKASELPVSEVASILQADLQNGLNKCEVSHRRAFHGWNEFDISEDEPLWKKYISQFKNPLIMLLLASAVISVLMHQFDDAVSITVAILIVVTVAFVQEYRSEKSLEELSKLVPPECHCVREGKLEHTLARDLVPGDTVCLSVGDRVPADLRLFEAVDLSIDESSLTGETTPCSKVTAPQPAATNGDLASRSNIAFMGTLVRCGKAKGVVIGTGENSEFGEVFKMMQAEEAPKTPLQKSMDLLGKQLSFYSFGIIGIIMLVGWLLGKDILEMFTISVSLAVAAIPEGLPIVVTVTLALGVMRMVKKRAIVKKLPIVETLGCCNVICSDKTGTLTKNEMTVTHIFTSDGLHAEVTGVGYNQFGEVIVDGDVVHGFYNPAVSRIVEAGCVCNDAVIRNNTLMGKPTEGALIALAMKMGLDGLQQDYIRKAEYPFSSEQKWMAVKCVHRTQQDRPEICFMKGAYEQVIKYCTTYQSKGQTLTLTQQQRDVYQQEKARMGSAGLRVLALASGPELGQLTFLGLVGIIDPPRTGVKEAVTTLIASGVSIKMITGDSQETAVAIASRLGLYSKTSQSVSGEEIDAMDVQQLSQIVPKVAVFYRASPRHKMKIIKSLQKNGSVVAMTGDGVNDAVALKAADIGVAMGQTGTDVCKEAADMILVDDDFQTIMSAIEEGKGIYNNIKNFVRFQLSTSIAALTLISLATLMNFPNPLNAMQILWINIIMDGPPAQSLGVEPVDKDVIRKPPRNWKDSILTKNLILKILVSSIIIVCGTLFVFWRELRDNVITPRDTTMTFTCFVFFDMFNALSSRSQTKSVFEIGLCSNRMFCYAVLGSIMGQLLVIYFPPLQKVFQTESLSILDLLFLLGLTSSVCIVAEIIKKVERSREKIQKHVSSTSSSFLEVWLWERSGQQLVEIHPHLETGLPLTEDVSCV

SEQ ID NO: 18677 - protein, 256 aa, Homo sapiens
MLSRVVLSAAATAAPSLKNAAFLGPGVLQATRTFHTGQPHLVPVPPLPEYGGKVRYGLIPEEFFQFLYPKTGVTGPYVLGTGLILYALSKEIYVISAETFTALSVLGVMVYGIKKYGPFVADFADKLNEQKLAQLEEAKQASIQHIQNAIDTEKSQQALVQKRHYLFDVQRNNIAMALEVTYRERLYRVYKEVKNRLDYHISVQNMMRRKEQEHMINWVEKHVVQSISTQQEKETIAKCIADLKLLAKKAQAQPVM

SEQ ID NO: 18678 - protein, 393 aa, Homo sapiens
MDAATLTYDTLRFAEFEDFPETSEPVWILGRKYSIFTEKDEILSDVASRLWFTYRKNFPAIGGTGPTSDTGWGCMLRCGQMIFAQALVCRHLGRDWRWTQRKRQPDSYFSVLNAFIDRKDSYYSIHQIAQMGVGEGKSIGQWYGPNTVAQVLKKLAVFDTWSSLAVHIAMDNTVVMEEIRRLCRTSVPCAGATAFPADSDRHCNGFPAGAEVTNRPSPWRPLVLLIPLRLGLTDINEAYVETLKHCFMMPQSLGVIGGKPNSAHYFIGYVGEELIYLDPHTTQPAVEPTDGCFIPDESFHCQHPPCRMSIAELDPSIAVGFFCKTEDDFNDWCQQVKKLSLLGGALPMFELVELQPSHLACPDVLNLSLDSSDVERLERFFDSEDEDFEILSL

SEQ ID NO: 18679 - protein, 468 aa, Homo sapiens
MAHSVPSDSRTSRRPTTRPHAARGAPRGSRRPGRTPKWRLPRISARAPYRLRRLRRHTYWPPRRPVAASRCWPVGATPLGSVGGRTGKMDAATLTYDTLRFAEFEDFPETSEPVWILGRKYSIFTEKDEILSDVASRLWFTYRKNFPAIGGTGPTSDTGWGCMLRCGQMIFAQALVCRHLGRDWRWTQRKRQPDSYFSVLNAFIDRKDSYYSIHQIAQMGVGEGKSIGQWYGPNTVAQVLKKLAVFDTWSSLAVHIAMDNTVVMEEIRRLCRTSVPCAGATAFPADSDRHCNGFPAGAEVTNRPSPWRPLVLLIPLRLGLTDINEAYVETLKHCFMMPQSLGVIGGKPNSAHYFIGYVGEELIYLDPHTTQPAVEPTDGCFIPDESFHCQHPPCRMSIAELDPSIAVGFFCKTEDDFNDWCQQVKKLSLLGGALPMFELVELQPSHLACPDVLNLSLGESCQVQILLM

SEQ ID NO: 18680 - protein, 280 aa, Homo sapiens
MLRCGQMIFAQALVCRHLGRDWRWTQRKRQPDSYFSVLNAFIDRKDSYYSIHQIAQMGVGEGKSIGQWYGPNTVAQVLKKLAVFDTWSSLAVHIAMDNTVVMEEIRRLCRTSVPCAGATAFPADSDRHCNGFPAGAEVTNRPSPWRPLVLLIPLRLGLTDINEAYVETLKHCFMMPQSLGVIGGKPNSAHYFIGYVGEELIYLDPHTTQPAVEPTDGCFIPDESFHCQHPPCRMSIAELDPSIAVGKQGRLVRSLIPWAPRPSSWCAAVLGAAVVMCGTP

SEQ ID NO: 18681 - protein, 331 aa, Homo sapiens
MLRCGQMIFAQALVCRHLGRDWRWTQRKRQPDSYFSVLNAFIDRKDSYYSIHQIAQMGVGEGKSIGQWYGPNTVAQVLKKLAVFDTWSSLAVHIAMDNTVVMEEIRRLCRTSVPCAGATAFPADSDRHCNGFPAGAEVTNRPSPWRPLVLLIPLRLGLTDINEAYVETLKHCFMMPQSLGVIGGKPNSAHYFIGYVGEELIYLDPHTTQPAVEPTDGCFIPDESFHCQHPPCRMSIAELDPSIAVGFFCKTEDDFNDWCQQVKKLSLLGGALPMFELVELQPSHLACPDVLNLSLGESCQVQVGSLGDSSDVERLERFFDSEDEDFEILSL

SEQ ID NO: 18682 - protein, 380 aa, Homo sapiens
MDAATLTYDTLRFAEFEDFPETSEPVWILGRKYSIFTEKDEILSDVASRLWFTYRKNFPAIGGTGPTSDTGWGCMLRCGQMIFAQALVCRHLGRDWRWTQRKRQPDSYFSVLNAFIDRKDSYYSIHQIAQMGVGEGKSIGQWYGPNTVAQVLKKLAVFDTWSSLAVHIAMDNTVVMEEIRRLCRTSVPCAGATAFPADSDRHCNGFPAGAEVTNRPSPWRPLVLLIPLRLGLTDINEAYVETLKHCFMMPQSLGVIGGKPNSAHYFIGYVGEELIYLDPHTTQPAVEPTDGCFIPDESFHCQHPPCRMSIAELDPSIAVGFFCKTEDDFNDWCQQVKKLSLLGGALPMFELVELQPSHLACPDVLNLSLGESCQVQILLM

SEQ ID NO: 18683 - protein, 1541 aa, Homo sapiens
MKDKQKKKKERTWAEAARLVLENYSDAPMTPKQILQVIEAEGLKEMRSGTSPLACLNAMLHSNSRGGEGLFYKLPGRISLFTLKKDALQWSRHPATVEGEEPEDTADVESCGSNEASTVSGENDVSLDETSSNASCSTESQSRPLSNPRDSYRASSQANKQKKKTGVMLPRVVLTPLKVNGAHVESASGFSGCHADGESGSPSSSSSGSLALGSAAIRGQAEVTQDPAPLLRGFRKPATGQMKRNRGEEIDFETPGSILVNTNLRALINSRTFHALPSHFQQQLLFLLPEVDRQVGTDGLLRLSSSALNNEFFTHAAQSWRERLADGEFTHEMQVRIRQEMEKEKKVEQWKEKFFEDYYGQKLGLTKEESLQQNVGQEEAEIKSGLCVPGESVRIQRGPATRQRDGHFKKRSRPDLRTRARRNLYKKQESEQAGVAKDAKSVASDVPLYKDGEAKTDPAGLSSPHLPGTSSAAPDLEGPEFPVESVASRIQAEPDNLARASASPDRIPSLPQETVDQEPKDQKRKSFEQAASASFPEKKPRLEDRQSFRNTIESVHTEKPQPTKEEPKVPPIRIQLSRIKPPWVVKGQPTYQICPRIIPTTESSCRGWTGARTLADIKARALQVRGARGHHCHREAATTAIGGGGGPGGGGGGATDEGGGRGSSSGDGGEACGHPEPRGGPSTPGKCTSDLQRTQLLPPYPLNGEHTQAGTAMSRARREDLPSLRKEESCLLQRATVGLTDGLGDASQLPVAPTGDQPCQALPLLSSQTSVAERLVEQPQLHPDVRTECESGTTSWESDDEEQGPTVPADNGPIPSLVGDDTLEKGTGQALDSHPTMKDPVNVTPSSTPESSPTDCLQNRAFDDELGLGGSCPPMRESDTRQENLKTKALVSNSSLHWIPIPSNDEVVKQPKPESREHIPSVEPQVGEEWEKAAPTPPALPGDLTAEEGLDPLDSLTSLWTVPSRGGSDSNGSYCQQVDIEKLKINGDSEALSPHGESTDTASDFEGHLTEDSSEADTREAAVTKGSSVDKDEKPNWNQSAPLSKVNGDMRLVTRTDGMVAPQSWVSRVCAVRQKIPDSLLLASTEYQPRAVCLSMPGSSVEATNPLVMQLLQGSLPLEKVLPPAHDDSMSESPQVPLTKDQSHGSLRMGSLHGLGKNSGMVDGSSPSSLRALKEPLLPDSCETGTGLARIEATQAPGAPQKNCKAVPSFDSLHPVTNPITSSRKLEEMDSKEQFSSFSCEDQKEVRAMSQDSNSNAAPGKSPGDLTTSRTPRFSSPNVISFGPEQTGRALGDQSNVTGQGKKLFGSGNVAATLQRPRPADPMPLPAEIPPVFPSGKLGPSTNSMSGGVQTPREDWAPKPHAFVGSVKNEKTFVGGPLKANAENRKATGHSPLELVGHLEGMPFVMDLPFWKLPREPGKGLSEPLEPSSLPSQLSIKQAFYGKLSKLQLSSTSFNYSSSSPTFPKGLAGSVVQLSHKANFGASHSASLSLQMFTDSSTVESISLQCACSLKAMIMCQGCGAFCHDDCIGPSKLCVLCLVVR

SEQ ID NO: 18684 - protein, 479 aa, Homo sapiens
MKDKQKKKKERTWAEAARLVLENYSDAPMTPKQILQVIEAEGLKEMRSGTSPLACLNAMLHSNSRGGEGLFYKLPGRISLFTLKKDALQWSRHPATVEGEEPEDTADVESCGSNEASTVSGENDVSLDETSSNASCSTESQSRPLSNPRDSYRASSQANKQKKKTGVMLPRVVLTPLKVNGAHVESASGFSGCHADGESGSPSSSSSGSLALGSAAIRGQAEVTQDPAPLLRGFRKPATGQMKRNRGEEIDFETPGSILVNTNLRALINSRTFHALPSHFQQQLLFLLPEVDRQVGTDGLLRLSSSALNNEFFTHAAQSWRERLADGEFTHEMQVRIRQEMEKEKKVEQWKEKFFEDYYGQKLGLTKEESLQQNVGQEEAEIKSGLCVPGESVRIQRGPATRQRDGHFKKRSRPDLRTRARRNLYKKQESEQSKLWCEPQCITFLANVHQQHGGKHLAPVCVQPESHDHVPRLRCVLSR

SEQ ID NO: 18685 - protein, 517 aa, Homo sapiens
METDLNSQDRKDLDKFIKFFALKTVQVIVQARLGEKICTRSSSSPTGSDWFNLAIKDIPEVTHEAKKALAGQLPAVGRSMCVEISLKTSEGDSMELEIWCLEMNEKCDKEIKVSYTVYNRLSLLLKSLLAITRVTPAYRLSRKQGHEYVILYRIYFGEVQLSGLGEGFQTVRVGTVGTPVGTITLSCAYRINLAFMSTRQFERTPPIMGIIIDHFVDRPYPSSSPMHPCNYRTAGEDTGVIYPSVEDSQEVCTTSFSTSPPSQLSSSRLSYQPAALGVGSADLAYPVVFAAGLNATHPHQLMVPGKEGGVPLAPNQPVHGTQADQERLATCTPSDRTHCAATPSSSEDTETVSNSSEGRASPHDVLETIFVRKVGAFVNKPINQVTLTSLDIPFAMFAPKNLELEDTDPMVNPPDSPETESPLQGSLHSDGSSGGSSGNTHDDFVMIDFKPAFSKDDILPMDLGTFYREFQNPPQLSSLSIDIGAQSMAEDLDSLPEKLAVHEKNVREFDAFVETLQ

SEQ ID NO: 18686 - protein, 480 aa, Homo sapiens
METDLNSQDRKDLDKFIKFFALKTVQVIVQARLGEKICTRSSSSPTGSDWFNLAIKDIPEVTHEAKKALAGQLPAVGRSMCVEISLKTSEGDSMELEIWCLEMNEKCDKEIKVSYTVYNRLSLLLKSLLAITRVTPAYRLSRKQGHEYVILYRIYFGEVQLSGLGEGFQTVRVGTVGTPVGTITLSCAYRINLAFMSTRQFERTPPIMGIIIDHFVDRPYPSSSPMHPCNYRTAGEDTGVIYPSVEDSQEVCTTSFSTSPPSQLMVPGKEGGVPLAPNQPVHGTQADQERLATCTPSDRTHCAATPSSSEDTETVSNSSEGRASPHDVLETIFVRKVGAFVNKPINQVTLTSLDIPFAMFAPKNLELEDTDPMVNPPDSPETESPLQGSLHSDGSSGGSSGNTHDDFVMIDFKPAFSKDDILPMDLGTFYREFQNPPQLSSLSIDIGAQSMAEDLDSLPEKLAVHEKNVREFDAFVETLQ

SEQ ID NO: 18687 - protein, 405 aa, Homo sapiens
METDLNSQDRKDLDKFIKFFALKTVQVIVQARLGEKICTRSSSSPTGSDWFNLAIKDIPEVTHEAKKALAGQLPAVGRSMCVEISLKTSEGDSMELEIWCLEMNEKCDKEIKVSYTVYNRLSLLLKSLLAITRVTPAYRLSRKQGHEYVILYRIYFGEVQLSGLGEGFQTVRVGTVGTPVGTITLSCAYRINLAFMSTRQFERTPPIMGIIIDHFVDRPYPSSSPMHPCNYRTAGEDTGVIYPSVEDSQEVCTTSFSTSPPSQLMVPGKEGGVPLAPNQPVHGTQADQERLATCTPSDRTHCAATPSSSEDTETVSNSSEGRASPHDVLETIFVRKVGAFVNKPINQVTLTSLDIPFAMFAPKNLELEDTDPMVNPPDSPETESPLQGSLPCSWPLPCLLSPSTV

SEQ ID NO: 18688 - protein, 401 aa, Homo sapiens
MCVEISLKTSEGDSMELEIWCLEMNEKCDKEIKVSYTVYNRLSLLLKSLLAITRVTPAYRLSRKQGHEYVILYRIYFGEVQLSGLGEGFQTVRVGTVGTPVGTITLSCAYRINLAFMSTRQFERTPPIMGIIIDHFVDRPYPSSSPMHPCNYRTAGEDTGVIYPSVEDSQEVCTTSFSTSPPSQLMVPGKEGGVPLAPNQPVHGTQADQERLATCTPSDRTHCAATPSSSEDTETVSNSSEGRASPHDVLETIFVRKVGAFVNKPINQVTLTSLDIPFAMFAPKNLELEDTDPMVNPPDSPETESPLQGSLHSDGSSGGSSGNTHDDFVMIDFKPAFSKDDILPMDLGTFYREFQNPPQLSSLSIDIGAQSMAEDLDSLPEKLAVHEKNVREFDAFVETLQ

SEQ ID NO: 18689 - protein, 550 aa, Homo sapiens
METDLNSQDRKDLDKFIKFFALKTVQVIVQARLGEKICTRSSSSPTGSDWFNLAIKDIPEVTHEAKKALAGQLPAVGRSMCVEISLKTSEGDSMELEIWCLEMNEKCDKEIKVSYTVYNRLSLLLKSLLAITRVTPAYRLSRKQGHEYVILYRIYFGEVQLSGLGEGFQTVRVGTVGTPVGTITLSCAYRINLAFMSTRQFERTPPIMGIIIDHFVDRPYPSSSPMHPCNYRTAGEDTGVIYPSVEDSQEVCTTSFSTSPPSQCVFTVTKAHFQTPTPVVTDTLRVPMAGLAFSHQLSSSRLSYQPAALGVGSADLAYPVVFAAGLNATHPHQLMVPGKEGGVPLAPNQPVHGTQADQERLATCTPSDRTHCAATPSSSEDTETVSNSSEGRASPHDVLETIFVRKVGAFVNKPINQVTLTSLDIPFAMFAPKNLELEDTDPMVNPPDSPETESPLQGSLHSDGSSGGSSGNTHDDFVMIDFKPAFSKDDILPMDLGTFYREFQNPPQLSSLSIDIGAQSMAEDLDSLPEKLAVHEKNVREFDAFVETLQ

SEQ ID NO: 18690 - protein, 1177 aa, Homo sapiens
MWRWIRQQLGFDPPHQSDTRTIYVANRFPQNGLYTPQKFIDNRIISSKYTVWNFVPKNLFEQFRRVANFYFLIIFLVQLMIDTPTSPVTSGLPLFFVITVTAIKQGYEDWLRHNSDNEVNGAPVYVVRSGGLVKTRSKNIRVGDIVRIAKDEIFPADLVLLSSDRLDGSCHVTTASLDGETNLKTHVAVPETALLQTVANLDTLVAVIECQQPEADLYRFMGRMIITQQMEEIVRPLGPESLLLRGARLKNTKEIFGVAVYTGMETKMALNYKSKSQKRSAVEKSMNTFLIIYLVILISEAVISTILKYTWQAEEKWDEPWYNQKTEHQRNSSKILRFISDFLAFLVLYNFIIPISLYVTVEMQKFLGSFFIGWDLDLYHEESDQKAQVNTSDLNEELGQVEYVFTDKTGTLTENEMQFRECSINGMKYQEINGRLVPEGPTPDSSEGNLSYLSSLSHLNNLSHLTTSSSFRTSPENETELIKEHDLFFKAVSLCHTVQISNVQTDCTGDGPWQSNLAPSQLEYYASSPDEKALVEAAARIGIVFIGNSEETMEVKTLGKLERYKLLHILEFDSDRRRMSVIVQAPSGEKLLFAKGAESSILPKCIGGEIEKTRIHVDEFALKGLRTLCIAYRKFTSKEYEEIDKRIFEARTALQQREEKLAAVFQFIEKDLILLGATAVEDRLQDKVRETIEALRMAGIKVWVLTGDKHETAVSVSLSCGHFHRTMNILELINQKSDSECAEQLRQLARRITEDHVIQHGLVVDGTSLSLALREHEKLFMEVCRNCSAVLCCRMAPLQKAKVIRLIKISPEKPITLAVGDGANDVSMIQEAHVGIGIMGKEGRQAARNSDYAIARFKFLSKLLFVHGHFYYIRIATLVQYFFYKNVCFITPQFLYQFYCLFSQQTLYDSVYLTLYNICFTSLPILIYSLLEQHVDPHVLQNKPTLYRDISKNRLLSIKTFLYWTILGFSHAFIFFFGSYLLIGKDTSLLGNGQMFGNWTFGTLVFTVMVITVTVKMALETHFWTWINHLVTWGSIIFYFVFSLFYGGILWPFLGSQNMYFVFIQLLSSGSAWFAIILMVVTCLFLDIIKKVFDRHLHPTSTEKAQLTETNAGIKCLDSMCCFPEGEAACASVGRMLERVIGRCSPTHISRSWSASDPFYTNDRSILTLSTMDSSTC

SEQ ID NO: 18691 - protein, 421 aa, Homo sapiens
MEFPFDVDALFPERITVLDQHLRPPARRPGTTTPARVDLQQQIMTIIDELGKASAKAQNLSAPITSASRMQSNRHVVYILKDSSARPAGKGAIIGFIKVGYKKLFVLDDREAHNEVEPLCILDFYIHESVQRHGHGRELFQYMLQKERVEPHQLAIDRPSQKLLKFLNKHYNLETTVPQVNNFVIFEGFFAHQHRPPAPSLRATRHSRAAAVDPTPAAPARKLPPKRAEGDIKPYSSSDREFLKVAVEPPWPLNRAPRRATPPAHPPPRSSSLGNSPERGPLRPFVPEQELLRSLRLCPPHPTARLLLAADPGGSPAQRRRTRGTPPGLVAQSCCYSRHGGVNSSSPNTGNQDSKQGEQETKNRSASEEQALSQDGSGEKPMHTAPPQAPAPPAQSWTVGGDILNARFIRNLQERRSTRPW

SEQ ID NO: 18692 - protein, 409 aa, Homo sapiens
MWLTWPFCFLTITLREEGVCHLESVDLQQQIMTIIDELGKASAKAQNLSAPITSASRMQSNRHVVYILKDSSARPAGKGAIIGFIKVGYKKLFVLDDREAHNEVEPLCILDFYIHESVQRHGHGRELFQYMLQKERVEPHQLAIDRPSQKLLKFLNKHYNLETTVPQVNNFVIFEGFFAHQHRPPAPSLRATRHSRAAAVDPTPAAPARKLPPKRAEGDIKPYSSSDREFLKVAVEPPWPLNRAPRRATPPAHPPPRSSSLGNSPERGPLRPFVPEQELLRSLRLCPPHPTARLLLAADPGGSPAQRRRTRGTPPGLVAQSCCYSRHGGVNSSSPNTGNQDSKQGEQETKNRSASEEQALSQDGSGEKPMHTAPPQAPAPPAQSWTVGGDILNARFIRNLQERRSTRPW

SEQ ID NO: 18693 - protein, 398 aa, Homo sapiens
MEFPFDVDALFPERITVLDQHLRPPARRPGTTTPARVDLQQQIMTIIDELGKASAKAQNLSAPITSASRMQSNRHVVYILKDSSARPAGKGAIIGFIKVGYKKLFVLDDREAHNEVEPLCILDFYIHESVQRHGHGRELFQYMLQKERVEPHQLAIDRPSQKLLKFLNKHYNLETTVPQVNNFVIFEGFFAHQHPPARKLPPKRAEGDIKPYSSSDREFLKVAVEPPWPLNRAPRRATPPAHPPPRSSSLGNSPERGPLRPFVPEQELLRSLRLCPPHPTARLLLAADPGGSPAQRRRTRGTPPGLVAQSCCYSRHGGVNSSSPNTGNQDSKQGEQETKNRSASEEQALSQDGSGEKPMHTAPPQAPAPPAQSWTVGGDILNARFIRNLQERRSTRPW

SEQ ID NO: 18694 - protein, 333 aa, Homo sapiens
MEFPFDVDALFPERITVLDQHLRPPARRPGTTTPARVDLQQQIMTIIDELGKASAKAQNLSAPITSASRMQSNRHVVYILKDSSARPAGKGAIIGFIKVGYKKLFVLDDREAHNEVEPLCILDFYIHESVQRHGHGRELFQYMLQKERVEPHQLAIDRPSQKLLKFLNKHYNLETTVPQVNNFVIFEGFFAHQHRPPAPSLRATRHSRAAAVDPTPAAPARKLPPKRAEGDIKPYSSSDREFLKVAVEPPWPLNRAPRRATPPAHPPPRSSSLGNSPERGPLRPFVPEQELLRSLRLCPPHPTARLLLAADPGGSPAQRRRTSSLPRSEESRY

SEQ ID NO: 18695 - protein, 323 aa, Homo sapiens
MEFPFDVDALFPERITVLDQHLRPPARRPGTTTPARVDLQQQIMTIIDELGKASAKAQNLSAPITSASRMQSNRHVVYILKDSSARPAGKGAIIGFIKVGYKKLFVLDDREAHNEVEPLCILDFYIHESVQRHGHGRELFQYMLQKERVEPHQLAIDRPSQKLLKFLNKHYNLETTVPQVNNFVIFEGFFAHQHRPPAPSLRATRHSRAAAVDPTPAAPARKLPPKRAEGDIKPYSSSDREFLKVAVEPPWPLNRAPRRATPPAHPPPRSSSLGNSPERGPLRPFVPEQELLRSLRLCPPHPTARLLLAADPGGSPAQRRRTR

SEQ ID NO: 18696 - protein, 310 aa, Homo sapiens
MEFPFDVDALFPERITVLDQHLRPPARRPGTTTPARVDLQQQIMTIIDELGKASAKAQNLSAPITSASRMQSNRHVVYILKDSSARPAGKGAIIGFIKVGYKKLFVLDDREAHNEVEPLCILDFYIHESVQRHGHGRELFQYMLQKERVEPHQLAIDRPSQKLLKFLNKHYNLETTVPQVNNFVIFEGFFAHQHPPARKLPPKRAEGDIKPYSSSDREFLKVAVEPPWPLNRAPRRATPPAHPPPRSSSLGNSPERGPLRPFVPEQELLRSLRLCPPHPTARLLLAADPGGSPAQRRRTSSLPRSEESRY

SEQ ID NO: 18697 - protein, 300 aa, Homo sapiens
MEFPFDVDALFPERITVLDQHLRPPARRPGTTTPARVDLQQQIMTIIDELGKASAKAQNLSAPITSASRMQSNRHVVYILKDSSARPAGKGAIIGFIKVGYKKLFVLDDREAHNEVEPLCILDFYIHESVQRHGHGRELFQYMLQKERVEPHQLAIDRPSQKLLKFLNKHYNLETTVPQVNNFVIFEGFFAHQHPPARKLPPKRAEGDIKPYSSSDREFLKVAVEPPWPLNRAPRRATPPAHPPPRSSSLGNSPERGPLRPFVPEQELLRSLRLCPPHPTARLLLAADPGGSPAQRRRTR

SEQ ID NO: 18698 - protein, 466 aa, Homo sapiens
MSNSDYLPDYPLNSDLVKRLKSALDAKDEERVRDLICTEITPVDAVIELANDDWMKDPSAQLPTGMLLGDLDHLKPLMDQFFQDANVVFEINKDEMEWQVKSPATFGLSGLWTLEYKRELTTPLCIAAAHGHTACVRHLLGRGADPDASPGGRGALHEACLGGHTACVRLLLQHRADPDLLSAEGLAPLHLCRTAASLGCAQALLEHGASVQRVGGTGRDTPLHVAAQRGLDEHARLYLGRGAHVDARNGRGETALSAACGAARRPDEHGRCLRLCALLLRRGAEADARDEDERSPLHKACGHASHSLARLLLRHGADAGALDYGGASPLGRVLQTASCALQASPQRTVQALLNHGSPTVWPDAFPKVLKTCASVPAVIEVLFNSYPQLCLSESWKEVIPEEVFQMHKPFYQSLFALALTPRCLQHLCRCALRRLFGKRCFDLIPLLPLPKPLQNYLLLEPQGVLH

SEQ ID NO: 18699 - protein, 437 aa, Homo sapiens
MERQPGPVRGKLQIFQKTEKDPQARAGSPVQEYHTALVAGDLDHLKPLMDQFFQDANVVFEINKDEMEWQVKSPATFGLSGLWTLEYKRELTTPLCIAAAHGHTACVRHLLGRGADPDASPGGRGALHEACLGGHTACVRLLLQHRADPDLLSAEGLAPLHLCRTAASLGCAQALLEHGASVQRVGGTGRDTPLHVAAQRGLDEHARLYLGRGAHVDARNGRGETALSAACGAARRPDEHGRCLRLCALLLRRGAEADARDEDERSPLHKACGHASHSLARLLLRHGADAGALDYGGASPLGRVLQTASCALQASPQRTVQALLNHGSPTVWPDAFPKVLKTCASVPAVIEVLFNSYPQLCLSESWKEVIPEEVFQMHKPFYQSLFALALTPRCLQHLCRCALRRLFGKRCFDLIPLLPLPKPLQNYLLLEPQGVLH

SEQ ID NO: 18700 - protein, 1426 aa, Homo sapiens
MTEALQWARYHWRRLIRGATRDDDSGPYNYSSLLACGRKSSQTPKLSGRHRIVVPHIQPFKDEYEKFSGAYVNNRIRTTKYTLLNFVPRNLFEQFHRAANLYFLFLVVLNWVPLVEAFQKEITMLPLVVVLTIIAIKDGLEDYRKYKIDKQINNLITKVYSRKEKKYIDRCWKDVTVGDFIRLSCNEVIPADMVLLFSTDPDGICHIETSGLDGESNLKQRQVVRGYAEQDSEVDPEKFSSRIECESPNNDLSRFRGFLEHSNKERVGLSKENLLLRGCTIRNTEAVVGIVVYAGHETKAMLNNSGPRYKRSKLERRANTDVLWCVMLLVIMCLTGAVGHGIWLSRYEKMHFFNVPEPDGHIISPLLAGFYMFWTMIILLQVLIPISLYVSIEIVKLGQIYFIQSDVDFYNEKMDSIVQCRALNIAEDLGQIQYLFSDKTGTLTENKMVFRRCSVAGFDYCHEENARRLESYQEAVSEDEDFIDTVSGSLSNMAKPRAPSCRTVHNGPLGNKPSNHLAGSSFTLGSGEGASEVPHSRQAAFSSPIETDVVPDTRLLDKFSQITPRLFMPLDETIQNPPMETLYIIDFFIALAICNTVVVSAPNQPRQKIRHPSLGGLPIKSLEEIKSLFQRWSVRRSSSPSLNSGKEPSSGVPNAFVSRLPLFSRMKPASPVEEEVSQVCESPQCSSSSACCTETEKQHGDAGLLNGKAESLPGQPLACNLCYEAESPDEAALVYAARAYQCTLRSRTPEQVMVDFAALGPLTFQLLHILPFDSVRKRMSVVVRHPLSNQVVVYTKGADSVIMELLSVASPDGASLEKQQMIVREKTQKHLDDYAKQGLRTLCIAKKVMSDTEYAEWLRNHFLAETSIDNREELLLESAMRLENKLTLLGATGIEDRLQEGVPESIEALHKAGIKIWMLTGDKQETAVNIAYACKLLEPDDKLFILNTQSKDACGMLMSTILKELQKKTQALPEQVSLSEDLLQPPVPRDSGLRAGLIITGKTLEFALQESLQKQFLELTSWCQAVVCCRATPLQKSEVVKLVRSHLQVMTLAIGDGANDVSMIQVADIGIGVSGQEGMQAVMASDFAVSQFKHLSKLLLVHGHWCYTRLSNMILYFFYKNVAYVNLLFWYQFFCGFSGTSMTDYWVLIFFNLLFTSAPPVIYGVLEKDVSAETLMQLPELYRSGQKSEAYLPHTFWITLLDAFYQSLVCFFVPYFTYQGSDTDIFAFGNPLNTAALFIVLLHLVIESKSLTWIHLLVIIGSILSYFLFAIVFGAMCVTCNPPSNPYWIMQEHMLDPVFYLVCILTTSIALLPRFVYRVLQGSLFPSPILRAKHFDRLTPEERTKALKKWRGAGKMNQVTSKYANQSAGKSGRRPMPGPSAVFAMKSASSCAIEQGNLSLCETALDQGYSETKAFEMAGPSKGKES

SEQ ID NO: 18701 - protein, 1231 aa, Homo sapiens
MTEALQWARYHWRRLIRGATRDDDSGPYNYSSLLACGRKSSQTPKLSGRHRIVVPHIQPFKDEYEKFSGAYVNNRIRTTKYTLLNFVPRNLFEQFHRAANLYFLFLVVLNWVPLVEAFQKEITMLPLVVVLTIIAIKDGLEDYRKYKIDKQINNLITKVYSRKEKKYIDRCWKDVTVGDFIRLSCNEVIPADMVLLFSTDPDGICHIETSGLDGESNLKQRQVVRGYAEQDSEVDPEKFSSRIECESPNNDLSRFRGFLEHSNKERVGLSKENLLLRGCTIRNTEAVVGIVVYAGHETKAMLNNSGPRYKRSKLERRANTDVLWCVMLLVIMCLTGAVGHGIWLSRYEKMHFFNVPEPDGHIISPLLAGFYMFWTMIILLQVLIPISLYVSIEIVKLGQIYFIQSDVDFYNEKMDSIVQCRALNIAEDLGQIQYLFSDKTGTLTENKMVFRRCSVAGFDYCHEENARRLESYQEAVSEDEDFIDTVSGSLSNMAKPRAPSCRTVHNGPLGNKPSNHLAGSSFTLGSGEGASEVPHSRQAAFSSPIETDVVPDTPEQVMVDFAALGPLTFQLLHILPFDSVRKRMSVVVRHPLSNQVVVYTKGADSVIMELLSVASPDGASLEKQQMIVREKTQKHLDDYAKQGLRTLCIAKKVMSDTEYAEWLRNHFLAETSIDNREELLLESAMRLENKLTLLGATGIEDRLQEGVPESIEALHKAGIKIWMLTGDKQETAVNIAYACKLLEPDDKLFILNTQSKDACGMLMSTILKELQKKTQALPEQVSLSEDLLQPPVPRDSGLRAGLIITGKTLEFALQESLQKQFLELTSWCQAVVCCRATPLQKSEVVKLVRSHLQVMTLAIGDGANDVSMIQVADIGIGVSGQEGMQAVMASDFAVSQFKHLSKLLLVHGHWCYTRLSNMILYFFYKNVAYVNLLFWYQFFCGFSGTSMTDYWVLIFFNLLFTSAPPVIYGVLEKDVSAETLMQLPELYRSGQKSEAYLPHTFWITLLDAFYQSLVCFFVPYFTYQGSDTDIFAFGNPLNTAALFIVLLHLVIESKSLTWIHLLVIIGSILSYFLFAIVFGAMCVTCNPPSNPYWIMQEHMLDPVFYLVCILTTSIALLPRFVYRVLQGSLFPSPILRAKHFDRLTPEERTKALKKWRGAGKMNQVTSKYANQSAGKSGRRPMPGPSAVFAMKSASSCAIEQGNLSLCETALDQGYSETKAFEMAGPSKGKES

SEQ ID NO: 18702 - protein, 204 aa, Homo sapiens
MAKVQVNNVVVLDNPSPFYNPFQFEITFECIEDLSEDLEWKIIYVGSAESEEYDQVLDSVLVGPVPAGRHMFVFQADAPNPGLIPDADAVGVTVVLITCTYRGQEFIRVGYYVNNEYTETELRENPPVKPDFSKLQRNILASNPRVTRFHINWEDNTEKLEDAESSNPNLQSLLSTDALPSASKGWSTSENSLNVMLESHMDCM

SEQ ID NO: 18703 - protein, 1128 aa, Homo sapiens
MMPMFLTVYLSNNEQHFTEVPVTPETICRDVVDLCKEPGESDCHLAEVWCGSERPVADNERMFDVLQRFGSQRNEVRFFLRHERPPGRDIVSGPRSQDPSLKRNGVKVPGEYRRKENGVNSPRMDLTLAELQEMASRQQQQIEAQQQLLATKEQRLKFLKQQDQRQQQQVAEQEKLKRLKEIAENQEAKLKKVRALKGHVEQKRLSNGKLVEEIEQMNNLFQQKQRELVLAVSKVEELTRQLEMLKNGRIDSHHDNQSAVAELDRLYKELQLRNKLNQEQNAKLQQQRECLNKRNSEVAVMDKRVNELRDRLWKKKAALQQKENLPVSSDGNLPQQAASAPSRVAAVGPYIQSSTMPRMPSRPELLVKPALPDGSLVIQASEGPMKIQTLPNMRSGAASQTKGSKIHPVGPDWSPSNADLFPSQGSASVPQSTGNALDQVDDGEVPLREKEKKVRPFSMFDAVDQSNAPPSFGTLRKNQSSEDILRDAQVANKNVAKVPPPVPTKPKQINLPYFGQTNQPPSDIKPDGSSQQLSTVVPSMGTKPKPAGQQPRVLLSPSIPSVGQDQTLSPGSKQESPPAAAVRPFTPQPSKDTLLPPFRKPQTVAASSIYSMYTQQQAPGKNFQQAVQSALTKTHTRGPHFSSVYGKPVIAAAQNQQQHPENIYSNSQGKPGSPEPETEPVSSVQENHENERIPRPLSPTKLLPFLSNPYRNQSDADLEALRKKLSNAPRPLKKRSSITEPEGPNGPNIQKLLYQRTTIAAMETISVPSYPSKSASVTASSESPVEIQNPYLHVEPEKEVVSLVPESLSPEDVGNASTENSDMPAPSPGLDYEPEGVPDNSPNLQNNPEEPNPEAPHVLDVYLEEYPPYPPPPYPSGEPEGPGEDSVSMRPPEITGQVSLPPGKRTNLRKTGSERIAHGMRVKFNPLALLLDSSLEGEFDLVQRIIYEVDDPSLPNDEGITALHNAVCAGHTEIVKFLVQFGVNVNAADSDGWTPLHCAASCNNVQVCKFLVESGAAVFAMTYSDMQTAADKCEEMEEGYTQCSQFLYGVQEKMGIMNKGVIYALWDYEPQNDDELPMKEGDCMTIIHREDEDEIEWWWARLNDKEGYVPRNLLGLYPRIKPRQRSLA

SEQ ID NO: 18704 - protein, 1005 aa, Homo sapiens
MDLTLAELQEMASRQQQQIEAQQQLLATKEQRLKFLKQQDQRQQQQVAEQEKLKRLKEIAENQEAKLKKVRALKGHVEQKRLSNGKLVEEIEQMNNLFQQKQRELVLAVSKVEELTRQLEMLKNGRIDSHHDNQSAVAELDRLYKELQLRNKLNQEQNAKLQQQRECLNKRNSEVAVMDKRVNELRDRLWKKKAALQQKENLPVSSDGNLPQQAASAPSRVAAVGPYIQSSTMPRMPSRPELLVKPALPDGSLVIQASEGPMKIQTLPNMRSGAASQTKGSKIHPVGPDWSPSNADLFPSQGSASVPQSTGNALDQVDDGEVPLREKEKKVRPFSMFDAVDQSNAPPSFGTLRKNQSSEDILRDAQVANKNVAKVPPPVPTKPKQINLPYFGQTNQPPSDIKPDGSSQQLSTVVPSMGTKPKPAGQQPRVLLSPSIPSVGQDQTLSPGSKQESPPAAAVRPFTPQPSKDTLLPPFRKPQTVAASSIYSMYTQQQAPGKNFQQAVQSALTKTHTRGPHFSSVYGKPVIAAAQNQQQHPENIYSNSQGKPGSPEPETEPVSSVQENHENERIPRPLSPTKLLPFLSNPYRNQSDADLEALRKKLSNAPRPLKKRSSITEPEGPNGPNIQKLLYQRTTIAAMETISVPSYPSKSASVTASSESPVEIQNPYLHVEPEKEVVSLVPESLSPEDVGNASTENSDMPAPSPGLDYEPEGVPDNSPNLQNNPEEPNPEAPHVLDVYLEEYPPYPPPPYPSGEPEGPGEDSVSMRPPEITGQVSLPPGKRTNLRKTGSERIAHGMRVKFNPLALLLDSSLEGEFDLVQRIIYEVDDPSLPNDEGITALHNAVCAGHTEIVKFLVQFGVNVNAADSDGWTPLHCAASCNNVQVCKFLVESGAAVFAMTYSDMQTAADKCEEMEEGYTQCSQFLYGVQEKMGIMNKGVIYALWDYEPQNDDELPMKEGDCMTIIHREDEDEIEWWWARLNDKEGYVPRNLLGLYPRIKPRQRSLA

SEQ ID NO: 18705 - protein, 1134 aa, Homo sapiens
MRFGSKMMPMFLTVYLSNNEQHFTEVPVTPETICRDVVDLCKEPGESDCHLAEVWCGSERPVADNERMFDVLQRFGSQRNEVRFFLRHERPPGRDIVSGPRSQDPSLKRNGVKVPGEYRRKENGVNSPRMDLTLAELQEMASRQQQQIEAQQQLLATKEQRLKFLKQQDQRQQQQVAEQEKLKRLKEIAENQEAKLKKVRALKGHVEQKRLSNGKLVEEIEQMNNLFQQKQRELVLAVSKVEELTRQLEMLKNGRIDSHHDNQSAVAELDRLYKELQLRNKLNQEQNAKLQQQRECLNKRNSEVAVMDKRVNELRDRLWKKKAALQQKENLPVSSDGNLPQQAASAPSRVAAVGPYIQSSTMPRMPSRPELLVKPALPDGSLVIQASEGPMKIQTLPNMRSGAASQTKGSKIHPVGPDWSPSNADLFPSQGSASVPQSTGNALDQVDDGEVPLREKEKKVRPFSMFDAVDQSNAPPSFGTLRKNQSSEDILRDAQVANKNVAKVPPPVPTKPKQINLPYFGQTNQPPSDIKPDGSSQQLSTVVPSMGTKPKPAGQQPRVLLSPSIPSVGQDQTLSPGSKQESPPAAAVRPFTPQPSKDTLLPPFRKPQTVAASSIYSMYTQQQAPGKNFQQAVQSALTKTHTRGPHFSSVYGKPVIAAAQNQQQHPENIYSNSQGKPGSPEPETEPVSSVQENHENERIPRPLSPTKLLPFLSNPYRNQSDADLEALRKKLSNAPRPLKKRSSITEPEGPNGPNIQKLLYQRTTIAAMETISVPSYPSKSASVTASSESPVEIQNPYLHVEPEKEVVSLVPESLSPEDVGNASTENSDMPAPSPGLDYEPEGVPDNSPNLQNNPEEPNPEAPHVLDVYLEEYPPYPPPPYPSGEPEGPGEDSVSMRPPEITGQVSLPPGKRTNLRKTGSERIAHGMRVKFNPLALLLDSSLEGEFDLVQRIIYEVDDPSLPNDEGITALHNAVCAGHTEIVKFLVQFGVNVNAADSDGWTPLHCAASCNNVQVCKFLVESGAAVFAMTYSDMQTAADKCEEMEEGYTQCSQFLYGVQEKMGIMNKGVIYALWDYEPQNDDELPMKEGDCMTIIHREDEDEIEWWWARLNDKEGYVPRNLLGLYPRIKPRQRSLA

SEQ ID NO: 18706 - protein, 140 aa, Homo sapiens
MPLESSSSMPLSFPSLLPSVPHNTNPSPPLMSYITSQEMKCILHWFANWSGPQRERFLEDLVAKAVPEKLQPLLDSLEQLSVSGADRPPSIFECQLHLWDQWFRGWAEQERNEFVRQLEFSEPDFVAKFYQAVAATAGKD

SEQ ID NO: 18707 - protein, 337 aa, Homo sapiens
MDETGNLTVSSATCHDTIDDFRNQVYSTLYSMISVVGFFGNGFVLYVLIKTYHKKSAFQVYMINLAVADLLCVCTLPLRVVYYVHKGIWLFGDFLCRLSTYALYVNLYCSIFFMTAMSFFRCIAIVFPVQNINLVTQKKARFVCVGIWIFVILTSSPFLMAKPQKDEKNNTKCFEPPQDNQTKNHVLVLHYVSLFVGFIIPFVIIIVCYTMIILTLLKKSMKKNLSSHKKAIGMIMVVTAAFLVSFMPYHIQRTIHLHFLHNETKPCDSVLRMQKSVVITLSLAASNCCFDPLLYFFSGGNFRKRLSTFRKHSLSSVTYVPRKKASLPEKGEEICKV

SEQ ID NO: 18708 - protein, 265 aa, Homo sapiens
MNRFLLLMSLYLLGSARGTSSQPNELSGSIDHQTSVQQLPGEFFSLENPSDAEALYETSSGLNTLSEHGSSEHGSSKHTVAEHTSGEHAESEHASGEPAATEHAEGEHTVGEQPSGEQPSGEHLSGEQPLSELESGEQPSDEQPSGEHGSGEQPSGEQASGEQPSGEHASGEQASGAPISSTSTGTILNCYTCAYMNDQGKCLRGEGTCITQNSQQCMLKKIFEGGKLQFMVQGCENMCPSMNLFSHGTRMQIICCRNQSFCNKI

SEQ ID NO: 18709 - protein, 246 aa, Homo sapiens
MNRFLLLMSLYLLGSARGTSSQPNELSGSIDHQTSVQQLPGEFFSLENPSDAEALYETSSGLNTLSEHGSSEHGSSKHTVAEHTSGEHAESEHASGEPAATEHAEGEHTVGEQPSGEQPSGEHLSGEQPLSELESGEQPSDEQPSGEHGSGEQPSGEQASGEQPSGTILNCYTCAYMNDQGKCLRGEGTCITQNSQQCMLKKIFEGGKLQFMVQGCENMCPSMNLFSHGTRMQIICCRNQSFCNKI

SEQ ID NO: 18710 - protein, 210 aa, Homo sapiens
MNRFLLLMSLYLLGSARGTSSQPNELSGSIDHQTSVQQLPGEPAATEHAEGEHTVGEQPSGEQPSGEHLSGEQPLSELESGEQPSDEQPSGEHGSGEQPSGEQASGEQPSGEHASGEQASGAPISSTSTGTILNCYTCAYMNDQGKCLRGEGTCITQNSQQCMLKKIFEGGKLQFMVQGCENMCPSMNLFSHGTRMQIICCRNQSFCNKI

SEQ ID NO: 18711 - protein, 195 aa, Homo sapiens
MNRFLLLMSLYLLGSARGTSSQPNELSGSIDHQTSVQQLPGEQPSGEQPSGEHLSGEQPLSELESGEQPSDEQPSGEHGSGEQPSGEQASGEQPSGEHASGEQASGAPISSTSTGTILNCYTCAYMNDQGKCLRGEGTCITQNSQQCMLKKIFEGGKLQFMVQGCENMCPSMNLFSHGTRMQIICCRNQSFCNKI

SEQ ID NO: 18712 - protein, 176 aa, Homo sapiens
MNRFLLLMSLYLLGSARGTSSQPNELSGSIDHQTSVQQLPGEQPSGEQPSGEHLSGEQPLSELESGEQPSDEQPSGEHGSGEQPSGEQASGEQPSGTILNCYTCAYMNDQGKCLRGEGTCITQNSQQCMLKKIFEGGKLQFMVQGCENMCPSMNLFSHGTRMQIICCRNQSFCNKI

SEQ ID NO: 18713 - protein, 170 aa, Homo sapiens
MNRFLLLMSLYLLGSARGTSSQPNELSGSIDHQTSVQQLPGEQPSDEQPSGEHGSGEQPSGEQASGEQPSGEHASGEQASGAPISSTSTGTILNCYTCAYMNDQGKCLRGEGTCITQNSQQCMLKKIFEGGKLQFMVQGCENMCPSMNLFSHGTRMQIICCRNQSFCNKI

SEQ ID NO: 18714 - protein, 165 aa, Homo sapiens
MNRFLLLMSLYLLGSARGTSSQPNELSGSIDHQTSVQQLPGEPAATEHAEGEHTVGEQASGEQPSGEHASGEQASGAPISSTSTGTILNCYTCAYMNDQGKCLRGEGTCITQNSQQCMLKKIFEGGKLQFMVQGCENMCPSMNLFSHGTRMQIICCRNQSFCNKI

SEQ ID NO: 18715 - protein, 155 aa, Homo sapiens
MNRFLLLMSLYLLGSARGTSSQPNELSGSIDHQTSVQQLPGEQPSGEQPSGEHLSGEQPLSELESGEQPSDEQPSGEHGSGEQPSGEQASGEQPSGEHASGEQASGAPISSTSTGGKLQFMVQGCENMCPSMNLFSHGTRMQIICCRNQSFCNKI

SEQ ID NO: 18716 - protein, 150 aa, Homo sapiens
MNRFLLLMSLYLLGSARGTSSQPNELSGSIDHQTSVQQLPGEQPSGEQPSGEHASGEQASGAPISSTSTGTILNCYTCAYMNDQGKCLRGEGTCITQNSQQCMLKKIFEGGKLQFMVQGCENMCPSMNLFSHGTRMQIICCRNQSFCNKI

SEQ ID NO: 18717 - protein, 121 aa, Homo sapiens
MNRFLLLMSLYLLGSARGTSSQPNELSGSIDHQTSVQQLPGTILNCYTCAYMNDQGKCLRGEGTCITQNSQQCMLKKIFEGGKLQFMVQGCENMCPSMNLFSHGTRMQIICCRNQSFCNKI

SEQ ID NO: 18718 - protein, 81 aa, Homo sapiens
MNRFLLLMSLYLLGSARGTSSQPNELSGSIDHQTSVQQLPGGKLQFMVQGCENMCPSMNLFSHGTRMQIICCRNQSFCNKI

SEQ ID NO: 18719 - protein, 647 aa, Homo sapiens
MLSGAAGAARRGGAALAPSLTRSLAGTHAGADSCAGADKGSHKETIEERDKRQQRQQRQRQHQGCGAAGSGSDSPTSGPHPVPVLFPLALSLEEQPLPPLPLGRAPGLLAREGQGREALASPSSRGQMPIEIVCKIKFAEEDAKPKEKEAGDEQSLLGAVAPGAAPRDLATFASTSTLHGLGRACGPGPHGLRRTLWALALLTSLAAFLYQAAGLARGYLTRPHLVAMDPAAPAPVAGFPAVTLCNINRFRHSALSDADIFHLANLTGLPPKDRDGHRAAGLRYPEPDMVDILNRTGHQLADMLKSCNFSGHHCSASNFSVVYTRYGKCYTFNADPRSSLPSRAGGMGSGLEIMLDIQQEEYLPIWRETNETSFEAGIRVQIHSQEEPPYIHQLGFGVSPGFQTFVSCQEQRLTYLPQPWGNCRAESELREPELQGYSAYSVSACRLRCEKEAVLQRCHCRMVHMPDSLGGGPEGPCFCPTPCNLTRYGKEISMVRIPNRGSARYLARKYNRNETYIRENFLVLDVFFEALTSEAMEQRAAYGLSALLGDLGGQMGLFIGASILTLLEILDYIYEVSWDRLKRVWRRPKTPLRTSTGGISTLGLQELKEQSPCPSRGRVEGGGVSSLLPNHHHPHGPPGGLFEDFAC

SEQ ID NO: 18720 - protein, 417 aa, Homo sapiens
MLSGAAGAARRGGAALAPSLTRSLAGTHAGADSCAGADKGSHKETIEERDKRQQRQQRQRQHQGCGAAGSGSDSPTSGPHPVPVLFPLALSLEEQPLPPLPLGRAPGLLAREGQGREALASPSSRGQMPIEIVCKIKFAEEDAKPKEKEAGDEQSLLGAVAPGAAPRDLATFASTSTLHGLGRACGPGPHGLRRTLWALALLTSLAAFLYQAAGLARGYLTRPHLVAMDPAAPAPVAGFPAVTLCNINRFRHSALSDADIFHLANLTGLPPKDRDGHRAAGLRYPEPDMVDILNRTGHQLADMLKSCNFSGHHCSASNFSVVYTRYGKCYTFNADPRSSLPSRAGGMGSGLEIMLDIQQEEYLPIWRETNETSFEAGIRVQIHSQEEPPYIHQLGFGVSPGFQTFVSCQEQRVSISC

SEQ ID NO: 18721 - protein, 666 aa, Homo sapiens
MLSGAAGAARRGGAALAPSLTRSLAGTHAGADSCAGADKGSHKETIEERDKRQQRQQRQRQHQGCGAAGSGSDSPTSGPHPVPVLFPLALSLEEQPLPPLPLGRAPGLLAREGQGREALASPSSRGQMPIEIVCKIKFAEEDAKPKEKEAGDEQSLLGAVAPGAAPRDLATFASTSTLHGLGRACGPGPHGLRRTLWALALLTSLAAFLYQAAGLARGYLTRPHLVAMDPAAPAPVAGFPAVTLCNINRFRHSALSDADIFHLANLTGLPPKDRDGHRAAGLRYPEPDMVDILNRTGHQLADMLKSCNFSGHHCSASNFSVVYTRYGKCYTFNADPRSSLPSRAGGMGSGLEIMLDIQQEEYLPIWRETNETSFEAGIRVQIHSQEEPPYIHQLGFGVSPGFQTFVSCQEQRLTYLPQPWGNCRAESELREPELQGYSAYSVSACRLRCEKEAVLQRCHCRMVHMPGNETICPPNIYIECADHTLDSLGGGPEGPCFCPTPCNLTRYGKEISMVRIPNRGSARYLARKYNRNETYIRENFLVLDVFFEALTSEAMEQRAAYGLSALLGDLGGQMGLFIGASILTLLEILDYIYEVSWDRLKRVWRRPKTPLRTSTGGISTLGLQELKEQSPCPSRGRVEGGGVSSLLPNHHHPHGPPGGLFEDFAC

SEQ ID NO: 18722 - protein, 436 aa, Homo sapiens
MPMSSLPAAILSHMTAINNVPPPPLHSIPNLKKSKHINYGQLNALCHIRGQHSRSMSNILSAHDTFMKQYPKVFLHQKPRLPKLFKQEEQRELNEGKEESQHQQPDDSNNIAVHVQRAHGGHILYRPKRATEKFEEFLAILKKLPIHRTPYEHKTVWKFLKTIPDLTFQLNDKHLKTLSKTVFSETWLKGSTVVANDGFYVILKGLARPQTNVYKNLIEGSDSPDSFISQSFHSFIWSEEFKNSTLAEMYLPSYDSMLSKWSTFGTLEVMPQNESETQMFSVVTEDDCEILKIPAKGYAKIKEEKIKLENMQKLKLIRMCPYYEEWPTLSIYELIALLKWKKFPPGHVIVESGNIISFVGYINSGCCNIYRSIIGFVKLRSNKVKRSQKLVYMGKLKEKESFGEISVLLQVPFTCTIITKKEVEMAIIEDKDLFVA

SEQ ID NO: 18723 - protein, 789 aa, Homo sapiens
MAATTANPEMTSDVPSLGPAIASGNSGPGIQGGGAIVQRAIKRRPGLDFDDDGEGNSKFLRCDDDQMSNDKERFARSDDEQSSADKERLARENHSEIERRRRNKMTAYITELSDMVPTCSALARKPDKLTILRMAVSHMKSLRGTGNTSTDGSYKPSFLTDQELKHLILEAADGFLFIVSCETGRVVYVSDSVTPVLNQPQSEWFGSTLYDQVHPDDVDKLREQLSTSENALTGRILDLKTGTVKKEGQQSSMRMCMGSRRSFICRMRCGSSSVDPVSVNRLSFVRNRCRNGLGSVKDGEPHFVVVHCTGYIKAWPPAGVSLPDDDPEAGQGSKFCLVAIGRLQVTSSPNCTDMSNVCQPTEFISRHNIEGIFTFVDHRCVATVGYQPQELLGKNIVEFCHPEDQQLLRDSFQQVVKLKGQVLSVMFRFRSKNQEWLWMRTSSFTFQNPYSDEIEYIICTNTNVKNSSQEPRPTLSNTIQRPQLGPTANLPLEMGSGQLAPRQQQQQTELDMVPGRDGLASYNHSQVVQPVTTTGPEHSKPLEKSDGLFAQDRDPRFSEIYHNINADQSKGISSSTVPATQQLFSQGNTFPPTPRPAENFRNSGLAPPVTIVQPSASAGQMLAQISRHSNPTQGATPTWTPTTRSGFSAQQVATQATAKTRTSQFGVGSFQTPSSFSSMSLPGAPTASPGAAAYPSLTNRGSNFAPETGQTAGQFQTRTAEGVGVWPQWQGQQPHHRSSSSEQHVQQPPAQQPGQPEVFQEMLSMLGDQSNSYNNEEFPDLTMFPPFSE

SEQ ID NO: 18724 - protein, 774 aa, Homo sapiens
MAATTANPEMTSDVPSLGPAIASGNSGPGIQGGGAIVQRAIKRRPGLDFDDDGEGNSKFLRCDDDQMSNDKERFARENHSEIERRRRNKMTAYITELSDMVPTCSALARKPDKLTILRMAVSHMKSLRGTGNTSTDGSYKPSFLTDQELKHLILEAADGFLFIVSCETGRVVYVSDSVTPVLNQPQSEWFGSTLYDQVHPDDVDKLREQLSTSENALTGRILDLKTGTVKKEGQQSSMRMCMGSRRSFICRMRCGSSSVDPVSVNRLSFVRNRCRNGLGSVKDGEPHFVVVHCTGYIKAWPPAGVSLPDDDPEAGQGSKFCLVAIGRLQVTSSPNCTDMSNVCQPTEFISRHNIEGIFTFVDHRCVATVGYQPQELLGKNIVEFCHPEDQQLLRDSFQQVVKLKGQVLSVMFRFRSKNQEWLWMRTSSFTFQNPYSDEIEYIICTNTNVKNSSQEPRPTLSNTIQRPQLGPTANLPLEMGSGQLAPRQQQQQTELDMVPGRDGLASYNHSQVVQPVTTTGPEHSKPLEKSDGLFAQDRDPRFSEIYHNINADQSKGISSSTVPATQQLFSQGNTFPPTPRPAENFRNSGLAPPVTIVQPSASAGQMLAQISRHSNPTQGATPTWTPTTRSGFSAQQVATQATAKTRTSQFGVGSFQTPSSFSSMSLPGAPTASPGAAAYPSLTNRGSNFAPETGQTAGQFQTRTAEGVGVWPQWQGQQPHHRSSSSEQHVQQPPAQQPGQPEVFQEMLSMLGDQSNSYNNEEFPDLTMFPPFSE

SEQ ID NO: 18725 - protein, 775 aa, Homo sapiens
MTSDVPSLGPAIASGNSGPGIQGGGAIVQRAIKRRPGLDFDDDGEGNSKFLRCDDDQMSNDKERFARSDDEQSSADKERLARENHSEIERRRRNKMTAYITELSDMVPTCSALARKPDKLTILRMAVSHMKSLRGTGNTSTDGSYKPSFLTDQELKHLILEAADGFLFIVSCETGRVVYVSDSVTPVLNQPQSEWFGSTLYDQVHPDDVDKLREQLSTSENALTGRILDLKTGTVKKEGQQSSMRMCMGSRRSFICRMRCGSSSVDPVSVNRLSFVRNRCRNGLGSVKDGEPHFVVVHCTGYIKAWPPADDDPEAGQGSKFCLVAIGRLQVTSSPNCTDMSNVCQPTEFISRHNIEGIFTFVDHRCVATVGYQPQELLGKNIVEFCHPEDQQLLRDSFQQVVKLKGQVLSVMFRFRSKNQEWLWMRTSSFTFQNPYSDEIEYIICTNTNVKNSSQEPRPTLSNTIQRPQLGPTANLPLEMGSGQLAPRQQQQQTELDMVPGRDGLASYNHSQVVQPVTTTGPEHSKPLEKSDGLFAQDRDPRFSEIYHNINADQSKGISSSTVPATQQLFSQGNTFPPTPRPAENFRNSGLAPPVTIVQPSASAGQMLAQISRHSNPTQGATPTWTPTTRSGFSAQQVATQATAKTRTSQFGVGSFQTPSSFSSMSLPGAPTASPGAAAYPSLTNRGSNFAPETGQTAGQFQTRTAEGVGVWPQWQGQQPHHRSSSSEQHVQQPPAQQPGQPEVFQEMLSMLGDQSNSYNNEEFPDLTMFPPFSE

SEQ ID NO: 18726 - protein, 787 aa, Homo sapiens
MAATTANPEMTSDVPSLGPAIASGNSGPGIQGGGAIVQRAIKRRPGLDFDDDGEGNSKFLRCDDDQMSNDKERFARSDDEQSSADKERLARENHSEIERRRRNKMTAYITELSDMVPTCSALARKPDKLTILRMAVSHMKSLRGTGNTSTDGSYKPSFLTDQELKHLILEAADGFLFIVSCETGRVVYVSDSVTPVLNQPQSEWFGSTLYDQVHPDDVDKLREQLSTSENALTGRILDLKTGTVKKEGQQSSMRMCMGSRRSFICRMRCGSSSVDPVSVNRLSFVRNRCRNGLGSVKDGEPHFVVVHCTGYIKAWPPAGVSLPDDDPEAGQGSKFCLVAIGRLQVTSSPNCTDMSNVCQPTEFISRHNIEGIFTFVDHRCVATVGYQPQELLGKNIVEFCHPEDQQLLRDSFQQVVKLKGQVLSVMFRFRSKNQEWLWMRTSSFTFQNPYSDEIEYIICTNTNVKNSSQEPRPTLSNTIQRPQLGPTANLPLEMGSGQLAPRQQQQQTELDMVPGRDGLASYNHSQVVQPVTTTGPEHSKPLEKSDGLFAQDRDPRFSEIYHNINADQSKGISSSTVPATQQLFSQGNTFPPTPRPAENFSGLAPPVTIVQPSASAGQMLAQISRHSNPTQGATPTWTPTTRSGFSAQQVATQATAKTRTSQFGVGSFQTPSSFSSMSLPGAPTASPGAAAYPSLTNRGSNFAPETGQTAGQFQTRTAEGVGVWPQWQGQQPHHRSSSSEQHVQQPPAQQPGQPEVFQEMLSMLGDQSNSYNNEEFPDLTMFPPFSE

SEQ ID NO: 18727 - protein, 466 aa, Homo sapiens [sequence omitted]

SEQ ID NO: 18728 - protein, 394 aa, Homo sapiens
MDSQGRKVVVCDNGTGFVKCGYAGSNFPEHIFPALVGRPIIRSTTKVGNIEIKDLMVGDEASELRSMLEVNYPMENGIVRNWDDMKHLWDYTFGPEKLNIDTRNCKILLTEPPMNPTKNREKIVEVMFETYQFSGVYVAIQAVLTLYAQGLLTGVVVDSGDGVTHICPVYEGFSLPHLTRRLDIAGRDITRYLIKLLLLRGYAFNHSADFETVRMIKEKLCYVGYNIEQEQKLALETTVLVESYTLPDGRIIKVGGERFEAPEALFQPHLINVEGVGVAELLFNTIQAADIDTRSEFYKHIVLSGGSTMYPGLPSRLERELKQLYLERVLKGDVEKLSKFKIRIEDPPRRKHMVFLGGAVLADIMKDKDNFWMTRQEYQEKGVRVLEKLGVTVR

SEQ ID NO: 18729 - protein, 399 aa, Homo sapiens
MDSQGRKVVVCDNGTGFVKCGYAGSNFPEHIFPALVGRPIIRSTTKVGNIEIKNNKKMDLMVGDEASELRSMLEVNYPMENGIVRNWDDMKHLWDYTFGPEKLNIDTRNCKILLTEPPMNPTKNREKIVEVMFETYQFSGVYVAIQAVLTLYAQGLLTGVVVDSGDGVTHICPVYEGFSLPHLTRRLDIAGRDITRYLIKLLLLRGYAFNHSADFETVRMIKEKLCYVGYNIEQEQKLALETTVLVESYTLPDGRIIKVGGERFEAPEALFQPHLINVEGVGVAELLFNTIQAADIDTRSEFYKHIVLSGGSTMYPGLPSRLERELKQLYLERVLKGDVEKLSKFKIRIEDPPRRKHMVFLGGAVLADIMKDKDNFWMTRQEYQEKGVRVLEKLGVTVR

SEQ ID NO: 18730 - protein, 81 aa, Homo sapiens
MNREGAPGKSPEEMYIQQKVRVLLMLRKMGSNLTASEEEFLRTYAGVVNSQLSQLPPHSIDQGAEDVVMAFSRSETEDRRQ

SEQ ID NO: 18731 - protein, 153 aa, Homo sapiens
MARNTLSSRFRRVDIDEFDENKFVDEQEEAAAAAAEPGPDPSEVDGLLRQGDMLRAFHAALRNSPVNTKNQAVKERAQGVVLKVLTNFKSSEIEQAVQSLDRNGVDLLMKYIYKGFEKPTENSSAVLLQWHEKALAVGGLGSIIRVLTARKTV

SEQ ID NO: 18732 - protein, 741 aa, Homo sapiens
MGPPGPALPATMNNSSSETRGHPHSASSPSERVFPMPLPRKAPLNIPGTPVLEDFPQNDDEKERLQRRRSRVFDLQFSTDSPRLLASPSSRSIDISATIPKFTNTQITEHYSTCIKLSTENKITTKNAFGLHLIDFMSEILKQKDTEPTNFKVAAGTLDASTKIYAVRVDAVHADVYRVLGGLGKDAPSLEEVEGHVADGSATEMGTTKKAVKPKKKHLHRTIEQNINNLNVSEADRKCEIDPMFQKTAASFDECSTAGVFLSTLHCQDYRSELLFPSDVQTLSTGEPLELPELGCVEMTDLKAPLQQCAEDRQICPSLAGFQFTQWDSETHNESVSALVDKFKKNDQVFDINAEVDESDCGDFPDGSLGDDFDANDEPDHTAVGDHEEFRSWKEPCQVQSCQEEMISLGDGDIRTMCPLLSMKPGEYSYFSPRTMSMWAGPDHWRFRPRRKQDAPSQSENKKKSTKKDFEIDFEDDIDFDVYFRKTKAATILTKSTLENQNWRATTLPTDFNYNVDTLVQLHLKPGTRLLKMAQGHRVETEHYEEIEDYDYNNPNDTSNFCPGLQAADSDDEDLDDLFVGPVGNSDLSPYPCHPPKTAQQNGDTPEAQGLDITTYGESNLVAEPQKVNKIEIHYAKTAKKMDMKKLKQSMWSLLTALSGKEADAEANHREAGKEAALAEVADEKMLSGLTKDLQRSLPPVMAQNLSIPLAFACLLHLANEKNLKLEGTEDLSDVLVRQGD

SEQ ID NO: 18733 - protein, 605 aa, Homo sapiens
MSEILKQKDTEPTNFKVAAGTLDASTKIYAVRVDAVHADVYRVLGGLGKDAPSLEEVEGHVADGSATEMGTTKKAVKPKKKHLHRTIEQNINNLNVSEADRKCEIDPMFQKTAASFDECSTAGVFLSTLHCQDYRSELLFPSDVQTLSTGEPLELPELGCVEMTDLKAPLQQCAEDRQICPSLAGFQFTQWDSETHNESVSALVDKFKKNDQVFDINAEVDESDCGDFPDGSLGDDFDANDEPDHTAVGDHEEFRSWKEPCQVQSCQEEMISLGDGDIRTMCPLLSMKPGEYSYFSPRTMSMWAGPDHWRFRPRRKQDAPSQSENKKKSTKKDFEIDFEDDIDFDVYFRKTKAATILTKSTLENQNWRATTLPTDFNYNVDTLVQLHLKPGTRLLKMAQGHRVETEHYEEIEDYDYNNPNDTSNFCPGLQAADSDDEDLDDLFVGPVGNSDLSPYPCHPPKTAQQNGDTPEAQGLDITTYGESNLVAEPQKVNKIEIHYAKTAKKMDMKKLKQSMWSLLTALSGKEADAEANHREAGKEAALAEVADEKMLSGLTKDLQRSLPPVMAQNLSIPLAFACLLHLANEKNLKLEGTEDLSDVLVRQGD

SEQ ID NO: 18734 - protein, 499 aa, Homo sapiens
MPHPRRYHSSERGSRGSYREHYRSRKHKRRRSRSWSSSSDRTRRRRREDSYHVRSRSSYDDRSSDRRVYDRRYCGSYRRNDYSRDRGDAYYDTDYRHSYEYQRENSSYRSQRSSRRKHRRRRRRSRTFSRSSSQHSSRRAKSVEDDAEGHLIYHVGDWLQERYEIVSTLGEGTFGRVVQCVDHRRGGARVALKIIKNVEKYKEAARLEINVLEKINEKDPDNKNLCVQMFDWFDYHGHMCISFELLGLSTFDFLKDNNYLPYPIHQVRHMAFQLCQAVKFLHDNKLTHTDLKPENILFVNSDYELTYNLEKKRDERSVKSTAVRVVDFGSATFDHEHHSTIVSTRHYRAPEVILELGWSQPCDVWSIGCIIFEYYVGFTLFQTHDNREHLAMMERILGPIPSRMIRKTRKQKYFYRGRLDWDENTSAGRYVRENCKPLRRYLTSEAEEHHQLFDLIESMLEYEPAKRLTLGEALQHPFFARLRAEPPNKLWDSSRDISR

SEQ ID NO: 18735 - protein, 139 aa, Homo sapiens
MPHPRRYHSSERGSRGSYREHYRSRKHKRRRSRSWSSSSDRTRRRRREDSYHVRSRSSYDDRSSDRRVYDRRYCGSYRRNDYSRDRGDAYYDTDYRHSYEYQRENSSYRSQRSSRRKHRRRRRRSRTFSRSSSMKSLAP

SEQ ID NO: 18736 - protein, 498 aa, Homo sapiens
MPHPRRYHSSERGSRGSYREHYRSRKHKRRRSRSWSSSSDRTRRRRREDSYHVRSRSSYDDRSSDRRVYDRRYCGSYRRNDYSRDRGDAYYDTDYRHSYEYQRENSSYRSQRSSRRKHRRRRRRSRTFSRSSSHSSRRAKSVEDDAEGHLIYHVGDWLQERYEIVSTLGEGTFGRVVQCVDHRRGGARVALKIIKNVEKYKEAARLEINVLEKINEKDPDNKNLCVQMFDWFDYHGHMCISFELLGLSTFDFLKDNNYLPYPIHQVRHMAFQLCQAVKFLHDNKLTHTDLKPENILFVNSDYELTYNLEKKRDERSVKSTAVRVVDFGSATFDHEHHSTIVSTRHYRAPEVILELGWSQPCDVWSIGCIIFEYYVGFTLFQTHDNREHLAMMERILGPIPSRMIRKTRKQKYFYRGRLDWDENTSAGRYVRENCKPLRRYLTSEAEEHHQLFDLIESMLEYEPAKRLTLGEALQHPFFARLRAEPPNKLWDSSRDISR

SEQ ID NO: 18737 - protein, 624 aa, Homo sapiens
MTQAEKGDTENGKEKGGEKEKEQRGVKRPIVPALVPESLQEQIQSNFIIVIHPGSTTLRIGRATDTLPASIPHVIARRHKQQGQPLYKDSWLLREGLNKPESNEQRQNGLKMVDQAIWSKKMSNGTRRIPVSPEQARSYNKQMRPAILDHCSGNKWTNTSHHPEYLVGEEALYVNPLDCYNIHWPIRRGQLNIHPGPGGSLTAVLADIEVIWSHAIQKYLEIPLKDLKYYRCILLIPDIYNKQHVKELVNMILMKMGFSGIVVHQESVCATYGSGLSSTCIVDVGDQKTSVCCVEDGVSHRNTRLCLAYGGSDVSRCFYWLMQRAGFPYRECQLTNKMDCLLLQHLKETFCHLDQDISGLQDHEFQIRHPDSPALLYQFRLGDEKLQAPMALFYPATFGIVGQKMTTLQHRSQGDPEDPHDEHYLLATQSKQEQSAKATADRKSASKPIGFEGDLRGQSSDLPERLHSQEVDLGSAQGDGLMAGNDSEEALTALMSRKTAISLFEGKALGLDKAILHSIDCCSSDDTKKKMYSSILVVGGGLMFHKAQEFLQHRILNKMPPSFRRIIENVDVITRPKDMDPRLIAWKGGAVLACLDTTQELWIYQREWQRFGVRMLRERAAFVW

SEQ ID NO: 18738 - protein, 513 aa, Homo sapiens
MVDQAIWSKKMSNGTRRIPVSPEQARSYNKQMRPAILDHCSGNKWTNTSHHPEYLVGEEALYVNPLDCYNIHWPIRRGQLNIHPGPGGSLTAVLADIEVIWSHAIQKYLEIPLKDLKYYRCILLIPDIYNKQHVKELVNMILMKMGFSGIVVHQESVCATYGSGLSSTCIVDVGDQKTSVCCVEDGVSHRNTRLCLAYGGSDVSRCFYWLMQRAGFPYRECQLTNKMDCLLLQHLKETFCHLDQDISGLQDHEFQIRHPDSPALLYQFRLGDEKLQAPMALFYPATFGIVGQKMTTLQHRSQGDPEDPHDEHYLLATQSKQEQSAKATADRKSASKPIGFEGDLRGQSSDLPERLHSQEVDLGSAQGDGLMAGNDSEEALTALMSRKTAISLFEGKALGLDKAILHSIDCCSSDDTKKKMYSSILVVGGGLMFHKAQEFLQHRILNKMPPSFRRIIENVDVITRPKDMDPRLIAWKGGAVLACLDTTQELWIYQREWQRFGVRMLRERAAFVW

SEQ ID NO: 18739 - protein, 329 aa, Homo sapiens
MILMKMGFSGIVVHQESVCATYGSGLSSTCIVDVGDQKTSVCCVEDGVSHRNTRIFSWNQDISGLQDHEFQIRHPDSPALLYQFRLGDEKLQAPMALFYPATFGIVGQKMTTLQHRSQGDPEDPHDEHYLLATQSKQEQSAKATADRKSASKPIGFEGDLRGQSSDLPERLHSQEVDLGSAQGDGLMAGNDSEEALTALMSRKTAISLFEGKALGLDKAILHSIDCCSSDDTKKKMYSSILVVGGGLMFHKAQEFLQHRILNKMPPSFRRIIENVDVITRPKDMDPRLIAWKGGAVLACLDTTQELWIYQREWQRFGVRMLRERAAFVW

SEQ ID NO: 18740 - protein, 149 aa, Homo sapiens
MMTKHKKCFIIVGVLITTNIITLIVKLTRDSQSLCPYDWIGFQNKCYYFSKEEGDWNSSKYNCSTQHADLTIIDNIEEMNFLRRYKCSSDHWIGLKMAKNRTGQWVDGATFTKSFGMRGSEGCAYLSDDGAATARCYTERKWICRKRIH

SEQ ID NO: 18741 - protein, 664 aa, Homo sapiens
MTEKTNGVKSSPANNHNHHAPPAIKANGKDDHRTSSRPHSAADDDTSSELQRLADVDAPQQGRSGFRRIVRLVGIIREWANKNFREEEPRPDSFLERFRGPELQTVTTQEGDGKGDKDGEDKGTKKKFELFVLDPAGDWYYCWLFVIAMPVLYNWCLLVARACFSDLQKGYYLVWLVLDYVSDVVYIADLFIRLRTGFLEQGLLVKDTKKLRDNYIHTLQFKLDVASIIPTDLIYFAVDIHSPEVRFNRLLHFARMFEFFDRTETRTNYPNIFRISNLVLYILVIIHWNACIYYAISKSIGFGVDTWVYPNITDPEYGYLAREYIYCLYWSTLTLTTIGETPPPVKDEEYLFVIFDFLIGVLIFATIVGNVGSMISNMNATRAEFQAKIDAVKHYMQFRKVSKGMEAKVIRWFDYLWTNKKTVDEREILKNLPAKLRAEIAINVHLSTLKKVRIFHDCEAGLLVELVLKLRPQVFSPGDYICRKGDIGKEMYIIKEGKLAVVADDGVTQYALLSAGSCFGEISILNIKGSKMGNRRTANIRSLGYSDLFCLSKDDLMEAVTEYPDAKKVLEERGREILMKEGLLDENEVATSMEVDVQEKLGQLETNMETLYTRFGRLLAEYTGAQQKLKQRITVLETKMKQNNEDDYLSDGMNSPELAAADEP

SEQ ID NO: 18742 - protein, 219 aa, Homo sapiens
MNSSKSSETQCTERGCFSSQMFLWTVAGIPILFLSACFITRCVVTFRIFQTCDEKKFQLPENFTELSCYNYGSGSVKNCCPLNWEYFQSSCYFFSTDTISWALSLKNCSAMGAHLVVINSQEEQEFLSYKKPKMREFFIGLSDQVVEGQWQWVDGTPLTKSLSFWDVGEPNNIATLEDCATMRDSSNPRQNWNDVTCFLNYFRICEMVGINPLNKGKSL

SEQ ID NO: 18743 - protein, 224 aa, Homo sapiens
MTARAWASWRSSALLLLLVPGYFPLSHPMTVAGPVGGSLSVQCRYEKEHRTLNKFWCRPPQILRCDKIVETKGSAGKRNGRVSIRDSPANLSFTVTLENLTEEDAGTYWCGVDTPWLRDFHDPIVEVEVSVFPAGTTTASSPQSSMGTSGPPTKLPVHTWPSVTRKDSPEPSPHPGSLFSNVRFLLLVLLELPLLLSMLGAVLWVNRPQRSSRSRQNWPKGENQ

SEQ ID NO: 18744 - protein, 201 aa, Homo sapiens
MWLPPALLLLSLSGCFSIQGPESVRAPEQGSLTVQCHYKQGWETYIKWWCRGVRWDTCKILIETRGSEQGEKSDRVSIKDNQKDRTFTVTMEGLRRDDADVYWCGIERRGPDLGTQVKVIVDPEGAASTTASSPTNSNMAVFIGSHKRNHYMLLVFVKVPILLILVTAILWLKGSQRVPEEPGEQPIYMNFSEPLTKDMAT

SEQ ID NO: 18745 - protein, 68 aa, Homo sapiens
MPQLNTTVWPTMITPMLLTLFLITQLKMLNTNYHLPPSPKPMKMKNYNKPWEPKWTKICSLHSLPPQS

SEQ ID NO: 18746 - protein, 328 aa, Homo sapiens
MTVEKEAPDAHFTVDKQNISLWPREPPPKSGPSLVPGKTPTVRAALICLTLVLVASVLLQAVLYPRFMGTISDVKTNVQLLKGRVDNISTLDSEIKKNSDGMEAAGVQIQMVNESLGYVRSQFLKLKTSVEKANAQIQILTRSWEEVSTLNAQIPELKSDLEKASALNTKIRALQGSLENMSKLLKRQNDILQVVSQGWKYFKGNFYYFSLIPKTWYSAEQFCVSRNSHLTSVTSESEQEFLYKTAGGLIYWIGLTKAGMEGDWSWVDDTPFNKVQSVRFWIPGEPNNAGNNEHCGNIKAPSLQAWNDAPCDKTFLFICKRPYVPSEP

SEQ ID NO: 18747 - protein, 332 aa, Homo sapiens
MRLLVLLWGCLLLPGYEALEGPEEISGFEGDTVSLQCTYREELRDHRKYWCRKGGILFSRCSGTIYAEEEGQETMKGRVSIRDSRQELSLIVTLWNLTLQDAGEYWCGVEKRGPDESLLISLFVFPGPCCPPSPSPTFQPLATTRLQPKAKAQQTQPPGLTSPGLYPAATTAKQGKTGAEAPPLPGTSQYGHERTSQYTGTSPHPATSPPAGSSRPPMQLDSTSAEDTSPALSSGSSKPRVSIPMVRILAPVLVLLSLLSAAGLIAFCSHLLLWRKEAQQATETQRNEKFCLSRLTAEEKEAPSQAPEGDVISMPPLHTSEEELGFSKFVSA

SEQ ID NO: 18748 - protein, 233 aa, Homo sapiens
MRLLVLLWGCLLLPGYEALEGPEEISGFEGDTVSLQCTYREELRDHRKYWCRKGGILFSRCSGTIYAEEEGQETMKGRVSIRDSRQELSLIVTLWNLTLQDAGEYWCGVEKRGPDESLLISLFVFPGSSRPPMQLDSTSAEDTSPALSSGSSKPRVSIPMVRILAPVLVLLSLLSAAGLIAFCSHLLLWRKEAQQATETQRNEKFCLSRLNHRTSELDPDEAFEISSLTFLSV

SEQ ID NO: 18749 - protein, 222 aa, Homo sapiens
MRLLVLLWGCLLLPGYEALEGPEEISGFEGDTVSLQCTYREELRDHRKYWCRKGGILFSRCSGTIYAEEEGQETMKGRVSIRDSRQELSLIVTLWNLTLQDAGEYWCGVEKRGPDESLLISLFVFPGSSRPPMQLDSTSAEDTSPALSSGSSKPRVSIPMVRILAPVLVLLSLLSAAGLIAFCSHLLLWRKEAQQATETQRNEKFCLSRLNSLMFSLSLPWL

SEQ ID NO: 18750 - protein, 307 aa, Homo sapiens
MRLLVLLWGCLLLPGYEALEGPEEISGFEGDTVSLQCTYREELRDHRKYWCRKGGILFSRCSGTIYAEEEGQETMKGRVSIRDSRQELSLIVTLWNLTLQDAGEYWCGVEKRGPDESLLISLFVFPGPCCPPSPSPTFQPLATTRLQPKAKAQQTQPPGLTSPGLYPAATTAKQGKTGAEAPPLPGTSQYGHERTSQYTGTSPHPATSPPAGSSRPPMQLDSTSAEDTSPALSSGSSKPRVSIPMVRILAPVLVLLSLLSAAGLIAFCSHLLLWRKEAQQATETQRNEKFCLSRLNSLMFSLSLPWL

SEQ ID NO: 18751 - protein, 273 aa, Homo sapiens
MRLLVLLWGCLLLPGYEALEGPEEISGFEGDTVSLQCTYREELRDHRKYWCRKGGILFSRCSGTIYAEEEGQETMKGRVSIRDSRQELSLIVTLWNLTLQDAGEYWCGVEKRGPDESLLISLFVFPASPGLYPAATTAKQGKTGAEAPPLPGTSQYGHERTSQYTGTSPHPATSPPAGSSRPPMQLDSTSAEDTSPALSSGSSKPRVSIPMVRILAPVLVLLSLLSAAGLIAFCSHLLLWRKEAQQATETQRNEKFCLSRLNSLMFSLSLPWL

SEQ ID NO: 18752 - protein, 373 aa, Homo sapiens
MSLLLLLLLVSYYVGTLGTHTEIKRVAEEKVTLPCHHQLGLPEKDTLDIEWLLTDNEGNQKVVITYSSRHVYNNLTEEQKGRVAFASNFLAGDASLQIEPLKPSDEGRYTCKVKNSGRYVWSHVILKVLVRPSKPKCELEGELTEGSDLTLQCESSSGTEPIVYYWQRIREKEGEDERLPPKSRIDYNHPGRVLLQNLTMSYSGLYQCTAGNEAGKESCVVRVTVQYVQSIGMVAGAVTGIVAGALLIFLLVWLLIRRKDKERYEEEERPNEIREDAEAPKARLVKPSSSSSGSRSSRSGSSSTRSTANSASRSQRTLSTDAAPQPGLATQAYSLVGPEVRGSEPKKVHHANLTKAETTPSMIPSQSRAFQTV

SEQ ID NO: 18753 - protein, 188 aa, Homo sapiens
MNWHMIISGLIVVVLKVVGMTLFLLYFPQIFNKSNDGFTTTRSYGTVSQIFGSSSPSPNGFITTRSYGTVCPKDWEFYQARCFFLSTSESSWNESRDFCKGKGSTLAIVNTPEKLKFLQDITDAEKYFIGLIYHREEKRWRWINNSVFNGNVTNQNQNFNCATIGLTKTFDAASCDISYRRICEKNAK

SEQ ID NO: 18754 - protein, 187 aa, Homo sapiens
MNWHMIISGLIVVVLKVVGMTLFLLYFPQIFNKSNDGFTTTRSYGTVSQIFGSSSPSPNGFITTRSYGTVCPKDWEFYQARCFFLSTSESSWNESRDFCKGKGSTLAIVNTPEKLFLQDITDAEKYFIGLIYHREEKRWRWINNSVFNGNVTNQNQNFNCATIGLTKTFDAASCDISYRRICEKNAK

SEQ ID NO: 18755 - protein, 160 aa, Homo sapiens
MAFTFAAFCYMLTLVLCASLIFFVIWHIIAFDELRTDFKNPIDQGNPARARERLKNIERICCLLRKLVVPEYSIHGLFCLMFLCAAEWVTLGLNIPLLFYHLWRYFHRPADGSEVMYDAVSIMNADILNYCQKESWCKLAFYLLSFFYYLYSMVYTLVSF

SEQ ID NO: 18756 - protein, 231 aa, Homo sapiens
MAGMVDFQDEEQVKSFLENMEVECNYHCYHEKDPDGCYRLVDYLEGIRKNFDEAAKVLKFNCEENQHSDSCYKLGAYYVTGKGGLTQDLKAAARCFLMACEKPGKKSIAACHNVGLLAHDGQVNEDGQPDLGKARDYYTRACDGGYTSSCFNLSAMFLQGAPGFPKDMDLACKYSMKACDLGHIWACANASRMYKLGDGVDKDEAKAEVLKNRAQQLHKEQQKGVQPLTFG

SEQ ID NO: 18757 - protein, 159 aa, Homo sapiens
MELPAVNLKVILLGHWLLTTWGCIVFSGSYAWANFTILALGVWAVAQRDSIDAISMFLGGLLATIFLDIVHISIFYPRVSLTDTGRFGVGMAILSLLLKPLSCCFVYHMYRERGGELLVHTGFLGSSQDRSAYQTIDSAEAPADPFAVPEGRSQDARGY

SEQ ID NO: 18758 - protein, 152 aa, Homo sapiens
MELPAVNLKVILLGHWLLTTWGCIVFSGSYAWANFTILALGVWAVAQRDSIDAISMFLGGLLATIFLDIVHISIFYPRVSLTDTGRFGVGMAILSLLLKPLSCCFVYHMYRERGGFLGSSQDRSAYQTIDSAEAPADPFAVPEGRSQDARGY

SEQ ID NO: 18759 - protein, 147 aa, Homo sapiens
MELPAVNLKVILLGHWLLTTCFWRHFSAKPRLETIELTCALCKLRSAAHRATAGLHCILRLLCLGQLHHPGLGRVGCGSAGLHRRHKHVSGWLAGHHLPGHRAHQHLLPAGQPHGHGPLWRGHGHPQLAAQAALLLLRLPHVPGARG

SEQ ID NO: 18760 - protein, 155 aa, Homo sapiens
MELPAVNLKVILLGHWLLTTCFWRHFSAKPRLETIELTCALCKLRSAAHRATAGLHCILRLLCLGQLHHPGLGRVGCGSAGLHRRHKHVSGWLAGHHLPGHRAHQHLLPAGQPHGHGPLWRGHGHPQLAAQAALLLLRLPHVPGARGFPWVFSGP

SEQ ID NO: 18761 - protein, 111 aa, Homo sapiens
MELPAVNLKGLHCILRLLCLGQLHHPGLGRVGCGSAGLHRRHKHVSGWLAGHHLPGHRAHQHLLPAGQPHGHGPLWRGHGHPQLAAQAALLLLRLPHVPGARGFPWVFSGP

SEQ ID NO: 18762 - protein, 329 aa, Homo sapiens
MTHFNKGPSYGLSAEVKNKIASKYDHQAEEDLRNWIEEVTGMSIGPNFQLGLKDGIILCELINKLQPGSVKKVNESSLNWPQLENIGNFIKAIQAYGMKPHDIFEANDLFENGNMTQVQTTLVALAGLAKTKGFHTTIDIGVKYAEKQTRRFDEGKLKAGQSVIGLQMGTNKCASQAGMTAYGTRRHLYDPKMQTDKPFDQTTISLQMGTNKGASQAGMLAPGTRRDIYDQKLTLQPVDNSTISLQMGTNKVASQKGMSVYGLGRQVYDPKYCAAPTEPVIHNGSQGTGTNGSEISDSDYQAEYPDEYHGEYQDDYPRDYQYSDQGIDY

SEQ ID NO: 18763 - protein, 288 aa, Homo sapiens
MSIGPNFQLGLKDGIILCELINKLQPGSVKKVNESSLNWPQLENIGNFIKAIQAYGMKPHDIFEANDLFENGNMTQVQTTLVALAGLAKTKGFHTTIDIGVKYAEKQTRRFDEGKLKAGQSVIGLQMGTNKCASQAGMTAYGTRRHLYDPKMQTDKPFDQTTISLQMGTNKGASQAGMLAPGTRRDIYDQKLTLQPVDNSTISLQMGTNKVASQKGMSVYGLGRQVYDPKYCAAPTEPVIHNGSQGTGTNGSEISDSDYQAEYPDEYHGEYQDDYPRDYQYSDQGIDY

SEQ ID NO: 18764 - protein, 283 aa, Homo sapiens
MTHFNKGPSYGLSAEVKNKIASKYDHQAEEDLRNWIEEVTGMSIGPNFQLGLKDGIILCELINKLQPGSVKKVNESSLNWPQAKTKGFHTTIDIGVKYAEKQTRRFDEGKLKAGQSVIGLQMGTNKCASQAGMTAYGTRRHLYDPKMQTDKPFDQTTISLQMGTNKGASQAGMLAPGTRRDIYDQKLTLQPVDNSTISLQMGTNKVASQKGMSVYGLGRQVYDPKYCAAPTEPVIHNGSQGTGTNGSEISDSDYQAEYPDEYHGEYQDDYPRDYQYSDQGIDY

SEQ ID NO: 18765 - protein, 791 aa, Homo sapiens
MAGTSAPGSKRRSEPPAPRPGPPPGTGHPPSKRARGFSAAAAPDPDDPFGAHGDFTADDLEELDTLASQALSQCPAAARDVSSDHKVHRLLDGMSKNPSGKNRETVPIKDNFELEVLQAQYKELKEKMKVMEEEVLIKNGEIKILRDSLHQTESVLEEQRRSHFLLEQEKTQALSDKEKEFSKKLQSLQSELQFKDAEMNELRTKLQTSERANKLAAPSVSHVSPRKNPSVVIKPEACSPQFGKTSFPTKESFSANMSLPHPCQTESGYKPLVGREDSKPHSLRGDSIKQEEAQKSFVDSWRQRSNTQGSILINLLLKQPLIPGSSLSLCHLLSSSSESPAGTPLQPPGFGSTLAGMSGLRTTGSYDGSFSLSALREAQNLAFTGLNLVARNECSRDGDPAEGGRRAFPLCQLPGAVHFLPLVQFFIGLHCQALQDLAAAKRSGAPGDSPTHSSCVSSGVETNPEDSVCILEGFSVTALSILQHLVCHSGAVVSLLLSGVGADSAAGEGNRSLVHRLSDGDMTSALRGVADDQGQHPLLKMLLHLLAFSSAATGHLQASVLTQCLKVLVKLAENTSCDFLPRFQCVFQVLPKCLSPETPLPSVLLAVELLSLLADHDQLAPQLCSHSEGCLLLLLYMYITSRPDRVALETQWLQLEQEVVWLLAKLGVQSPLPPVTGSNCQCNVEVVRALTVMLHRQWLTVRRAGGPPRTDQQRRTVRCLRDTVLLLHGLSQKDKLFMMHCVEVLHQFDQVMPGVSMLIRGLPDVTDCEEAALDDLCAAETDVEDPEVECG

SEQ ID NO: 18766 - protein, 764 aa, Homo sapiens
MAGTSAPGSKRRSEPPAPRPGPPPGTGHPPSKRARGFSAAAAPDPDDPFGAHGDFTADDLEELDTLASQALSQCPAAARDVSSDHKVHRLLDGMSKNPSGKNRETVPIKDNFELEVLQAQYKELKEKMKVMEEEVLIKNGEIKILRDSLHQTESVLEEQRRSHFLLEQEKTQALSDKEKEFSKKLQSLQSELQFKDAEMNELRTKLQTSERANKLAAPSVSHVSPRKNPSVVIKPEACSPQFGKTSFPTKESFSANMSLPHPCQTESGYKPLVGREDSKPHSLRGDSIKQEEAQKSFVDSWRQRSNTQGSILINLLLKQPLIPGSSLSLCHLLSSSSESPAGTPLQPPGFGSTLAGMSGLRTTGSYDGSFSLSALREAQNLAFTGLNLVARNECSRDGDPAEGGRRAFPLCQLPGAVHFLPLVQFFIGLHCQALQDLAAAKRSGAPGDSPTHSSCVSSGVETNPEDSVCILEGFSVTALSILQHLVCHSGAVVSLLLSGVGADSAAGEGNRSLVHRLSDGDMTSALRGVADDQGQHPLLKMLLHLLAFSSAATGHLQASVLTQCLKVLVKLAENTSCDFLPRFQCVFQVLPKCLSPETPLPSVLLAVELLSLLADHDQLAPQLCSHSEGCLLLLLYMYITSRPDRVALETQWLQLEQEVVRALTVMLHRQWLTVRRAGGPPRTDQQRRTVRCLRDTVLLLHGLSQKDKLFMMHCVEVLHQFDQVMPGVSMLIRGLPDVTDCEEAALDDLCAAETDVEDPEVECG

SEQ ID NO: 18767 - protein, 698 aa, Homo sapiens
MSKNPSGKNRETVPIKDNFELEVLQAQYKELKEKMKVMEEEVLIKNGEIKILRDSLHQTESVLEEQRRSHFLLEQEKTQALSDKEKEFSKKLQSLQSELQFKDAEMNELRTKLQTSERANKLAAPSVSHVSPRKNPSVVIKPEACSPQFGKTSFPTKESFSANMSLPHPCQTESGYKPLVGREDSKPHSLRGDSIKQEEAQKSFVDSWRQRSNTQGSILINLLLKQPLIPGSSLSLCHLLSSSSESPAGTPLQPPGFGSTLAGMSGLRTTGSYDGSFSLSALREAQNLAFTGLNLVARNECSRDGDPAEGGRRAFPLCQLPGAVHFLPLVQFFIGLHCQALQDLAAAKRSGAPGDSPTHSSCVSSGVETNPEDSVCILEGFSVTALSILQHLVCHSGAVVSLLLSGVGADSAAGEGNRSLVHRLSDGDMTSALRGVADDQGQHPLLKMLLHLLAFSSAATGHLQASVLTQCLKVLVKLAENTSCDFLPRFQCVFQVLPKCLSPETPLPSVLLAVELLSLLADHDQLAPQLCSHSEGCLLLLLYMYITSRPDRVALETQWLQLEQEVVWLLAKLGVQSPLPPVTGSNCQCNVEVVRALTVMLHRQWLTVRRAGGPPRTDQQRRTVRCLRDTVLLLHGLSQKDKLFMMHCVEVLHQFDQVMPGVSMLIRGLPDVTDCEEAALDDLCAAETDVEDPEVECG

SEQ ID NO: 18768 - protein, 664 aa, Homo sapiens
MKVMEEEVLIKNGEIKILRDSLHQTESVLEEQRRSHFLLEQEKTQALSDKEKEFSKKLQSLQSELQFKDAEMNELRTKLQTSERANKLAAPSVSHVSPRKNPSVVIKPEACSPQFGKTSFPTKESFSANMSLPHPCQTESGYKPLVGREDSKPHSLRGDSIKQEEAQKSFVDSWRQRSNTQGSILINLLLKQPLIPGSSLSLCHLLSSSSESPAGTPLQPPGFGSTLAGMSGLRTTGSYDGSFSLSALREAQNLAFTGLNLVARNECSRDGDPAEGGRRAFPLCQLPGAVHFLPLVQFFIGLHCQALQDLAAAKRSGAPGDSPTHSSCVSSGVETNPEDSVCILEGFSVTALSILQHLVCHSGAVVSLLLSGVGADSAAGEGNRSLVHRLSDGDMTSALRGVADDQGQHPLLKMLLHLLAFSSAATGHLQASVLTQCLKVLVKLAENTSCDFLPRFQCVFQVLPKCLSPETPLPSVLLAVELLSLLADHDQLAPQLCSHSEGCLLLLLYMYITSRPDRVALETQWLQLEQEVVWLLAKLGVQSPLPPVTGSNCQCNVEVVRALTVMLHRQWLTVRRAGGPPRTDQQRRTVRCLRDTVLLLHGLSQKDKLFMMHCVEVLHQFDQVMPGVSMLIRGLPDVTDCEEAALDDLCAAETDVEDPEVECG

SEQ ID NO: 18769 - protein, 875 aa, Homo sapiens
MIGCGACEPKVKMAGGQAAAALPTWKMAARRSLSARGRGILQAAAGRLLPLLLLSCCCGAGGCAAVGENEETVIIGLRLEDTNDVSFMEGGALRVSERTRVKLRVYGQNINNETWSRIAFTEHERRRHSPGERGLGGPAPPEPDSGPQRCGIRTSDIIILPHIILNRRTSGIIEIEIKPLRKMEKSKSYYLCTSLSTPALGAGGSGSTGGAVGGKGGSGVAGLPPPPWAETTWIYHDGEDTKMIVGEEKKFLLPFWLQVIFISLLLCLSGMFSGLNLGLMALDPMELRIVQNCGTEKEKNYAKRIEPVRRQGNYLLCSLLLGNVLVNTTLTILLDDIAGSGLVAVVVSTIGIVIFGEIVPQAICSRHGLAVGANTIFLTKFFMMMTFPASYPVSKLLDCVLGQEIGTVYNREKLLEMLRVTDPYNDLVKEELNIIQGALELRTKTVEDVMTPLRDCFMITGEAILDFNTMSEIMESGYTRIPVFEGERSNIVDLLFVKDLAFVDPDDCTPLKTITKFYNHPLHFVFNDTKLDAMLEEFKKGKSHLAIVQRVNNEGEGDPFYEVLGIVTLEDVIEEIIKSEILDETDLYTDNRTKKKVAHRERKQDFSAFKQTDSEMKVKISPQLLLAMHRFLATEVEAFSPSQMSEKILLRLLKHPNVIQELKYDEKNKKAPEYYLYQRNKPVDYFVLILQGKVEVEAGKEGMKFEASAFSYYGVMALTASPVPLSLSRTFVVSRTELLAAGSPGENKSPPRPCGLNHSDSLSRSDRIDAVTPTLGSSNNQLNSSLLQVYIPDYSVRALSDLQFVKISRQQYQNALMASRMDKTPQSSDSENTKIELTLTELHDGLPDETANLLNEQNCVTHSKANHSLHNEGAI

SEQ ID NO: 18770 - protein, 853 aa, Homo sapiens
MIGCGACEPKVKMAGGQAAAALPTWKMAARRSLSARGRGILQAAAGRLLPLLLLSCCCGAGGCAAVGENEETVIIGLRLEDTNDVSFMEGGALRVSERTRVKLRVYGQNINNETWSRIAFTEHERRRHSPGERGLGGPAPPEPDSGPQRCGIRTSDIIILPHIILNRRTSGIIEIEIKPLRKMEKSKSYYLCTSLSTPALGAGGSGSTGGAVGGKGGSGVAGLPPPPWAETTWIYHDGEDTKMIVGEEKKFLLPFWLQVIFISLLLCLSGMFSGLNLGLMALDPMELRIVQNCGTEKEKNYAKRIEPVRRQGNYLLCSLLLGNVLVNTTLTILLDDIAGSGLVAVVVSTIGIVIFGEIVPQAICSRHGLAVGANTIFLTKFFMMMTFPASYPVSKLLDCVLGQEIGTVYNREKLLEMLRVTDPYNDLVKEELNIIQGALELRTKTVEDVMTPLRDCFMITGEAILDFNTMSEIMESGYTRIPVFEGERSNIVDLLFVKDLAFVDPDDCTPLKTITKFYNHPLHFVFNDTKLDAMLEEFKKGKSHLAIVQRVNNEGEGDPFYEVLGIVTLEDVIEEIIKSEILDETDLYTDNRTKKKVAHRERKQDFSAFKQTDSEMKVKISPQLLLAMHRFLATEVEAFSPSQMSEKILLRLLKHPNVIQELKYDEKNKKAPEYYLYQRNKPVDYFVLILQGKVEVEAGKEGMKFEASAFSYYGVMALTASPGENKSPPRPCGLNHSDSLSRSDRIDAVTPTLGSSNNQLNSSLLQVYIPDYSVRALSDLQFVKISRQQYQNALMASRMDKTPQSSDSENTKIELTLTELHDGLPDETANLLNEQNCVTHSKANHSLHNEGAI

SEQ ID NO: 18771 - protein, 552 aa, Homo sapiens
MIGCGACEPKVKMAGGQAAAALPTWKMAARRSLSARGRGILQAAAGRLLPLLLLSCCCGAGGCAAVGENEETVIIGLRLEDTNDVSFMEGGALRVSERTRVKLRVYGQNINNETWSRIAFTEHERRRHSPGERGLGGPAPPEPDSGPQRCGIRTSDIIILPHIILNRRTSGIIEIEIKPLRKMEKSKSYYLCTSLSTPALGAGGSGSTGGAVGGKGGSGVAGLPPPPWAETTWIYHDGEDTKMIVGEEKKFLLPFWLQVIFISLLLCLSGMFSGLNLGLMALDPMELRIVQNCGTEKEKNYAKRIEPVRRQGNYLLCSLLLGNVLVNTTLTILLDDIAGSGLVAVVVSTIGIVIFGEIVPQAICSRHGLAVGANTIFLTKFFMMMTFPASYPVSKLLDCVLGQEIGTVYNREKLLEMLRVTDPYNDLVKEELNIIQGALELRTKTVEDVMTPLRDCFMITGEAILDFNTMSEIMESGYTRIPVFEGERSNIVDLLFVKDLAFVDPDDCTPLKTITKFYNHPLHFVFNDTKLDAMLEEFKKEHTNKKPKSYQH

SEQ ID NO: 18772 - protein, 167 aa, Homo sapiens
MVSNFFHVIQVFEKSATLISKTEHIGFVIYSWRKSTTHLGSRRKFAISIYLSEVSLQKYDCPFSGTSFVVFSLFLICAMAGDVVYADIKTVRTSPLELAFPLQRSVSFNFSTVHKSCPAKDWKVHKGKCYWIAETKKSWNKSQNDCAINNSYLMVIQDITAMVRFNI

SEQ ID NO: 18773 - protein, 481 aa, Homo sapiens
MSTLCPPPSPAVAKTEIALSGKSPLLAATFAYWDNILGPRVRHIWAPKTEQVLLSDGEITFLANHTLNGEILRNAESGAIDVKFFVLSEKGVIIVSLIFDGNWNGDRSTYGLSIILPQTELSFYLPLHRVCVDRLTHIIRKGRIWMHKERQENVQKIILEGTERMEDQGQSIIPMLTGEVIPVMELLSSMKSHSVPEEIDIADTVLNDDDIGDSCHEGFLLNAISSHLQTCGCSVVVGSSAEKVNKIVRTLCLFLTPAERKCSRLCEAESSFKYESGLFVQGLLKDSTGSFVLPFRQVMYAPYPTTHIDVDVNTVKQMPPCHEHIYNQRRYMRSELTAFWRATSEEDMAQDTIIYTDESFTPDLNIFQDVLHRDTLVKAFLDQVFQLKPGLSLRSTFLAQFLLVLHRKALTLIKYIEDDTQKGKKPFKSLRNLKIDLDLTAEGDLNIIMALAEKIKPGLHSFIFGRPFYTSVQERDVLMTF

SEQ ID NO: 18774 - protein, 222 aa, Homo sapiens
MSTLCPPPSPAVAKTEIALSGKSPLLAATFAYWDNILGPRVRHIWAPKTEQVLLSDGEITFLANHTLNGEILRNAESGAIDVKFFVLSEKGVIIVSLIFDGNWNGDRSTYGLSIILPQTELSFYLPLHRVCVDRLTHIIRKGRIWMHKERQENVQKIILEGTERMEDQGQSIIPMLTGEVIPVMELLSSMKSHSVPEEIDIADTVLNDDDIGDSCHEGFLLK

SEQ ID NO: 18775 - protein, 1744 aa, Homo sapiens
MRLLWGLIWASSFFTLSLQKPRLLLFSPSVVHLGVPLSVGVQLQDVPRGQVVKGSVFLRNPSRNNVPCSPKVDFTLSSERDFALLSLQVPLKDAKSCGLHQLLRGPEVQLVAHSPWLKDSLSRTTNIQGINLLFSSRRGHLFLQTDQPIYNPGQRVRYRVFALDQKMRPSTDTITVMVENSHGLRVRKKEVYMPSSIFQDDFVIPDISEPGTWKISARFSDGLESNSSTQFEVKKYVLPNFEVKITPGKPYILTVPGHLDEMQLDIQARYIYGKPVQGVAYVRFGLLDEDGKKTFFRGLESQTKLVNGQSHISLSKAEFQDALEKLNMGITDLQGLRLYVAAAIIESPGGEMEEAELTSWYFVSSPFSLDLSKTKRHLVPGAPFLLQALVREMSGSPASGIPVKVSATVSSPGSVPEVQDIQQNTDGSGQVSIPIIIPQTISELQLSVSAGSPHPAIARLTVAAPPSGGPGFLSIERPDSRPPRVGDTLNLNLRAVGSGATFSHYYYMILSRGQIVFMNREPKRTLTSVSVFVDHHLAPSFYFVAFYYHGDHPVANSLRVDVQAGACEGKLELSVDGAKQYRNGESVKLHLETDSLALVALGALDTALYAAGSKSHKPLNMGKVFEAMNSYDLGCGPGGGDSALQVFQAAGLAFSDGDQWTLSRKRLSCPKEKTTRKKRNVNFQKAINEKLGQYASPTAKRCCQDGVTRLPMMRSCEQRAARVQQPDCREPFLSCCQFAESLRKKSRDKGQAGLQRALEILQEEDLIDEDDIPVRSFFPENWLWRVETVDRFQILTLWLPDSLTTWEIHGLSLSKTKGLCVATPVQLRVFREFHLHLRLPMSVRRFEQLELRPVLYNYLDKNLTVSVHVSPVEGLCLAGGGGLAQQVLVPAGSARPVAFSVVPTAATAVSLKVVARGSFEFPVGDAVSKVLQIEKEGAIHREELVYELNPLDHRGRTLEIPGNSDPNMIPDGDFNSYVRVTASDPLDTLGSEGALSPGGVASLLRLPRGCGEQTMIYLAPTLAASRYLDKTEQWSTLPPETKDHAVDLIQKGYMRIQQFRKADGSYAAWLSRGSSTWLTAFVLKVLSLAQEQVGGSPEKLQETSNWLLSQQQADGSFQDLSPVIHRSMQGGLVGNDETVALTAFVTIALHHGLAVFQDEGAEPLKQRVEASISKASSFLGEKASAGLLGAHAAAITAYALTLTKAPADLRGVAHNNLMAMAQETGDNLYWGSVTGSQSNAVSPTPAPRNPSDPMPQAPALWIETTAYALLHLLLHEGKAEMADQAAAWLTRQGSFQGGFRSTQDTVIALDALSAYWIASHTTEERGLNVTLSSTGRNGFKSHALQLNNRQIRGLEEELQFSLGSKINVKVGGNSKGTLKVLRTYNVLDMKNTTCQDLQIEVTVKGHVEYTMEANEDYEDYEYDELPAKDDPDAPLQPVTPLQLFEGRRNRRRREAPKVVEEQESRVHYTVCIWRNGKVGLSGMAIADVTLLSGFHALRADLEKLTSLSDRYVSHFETEGPHVLLYFDSVPTSRECVGFEAVQEVPVGLVQPASATLYDYYNPERRCSVFYGAPSKSRLLATLCSAEVCQCAEGKCPRQRRALERGLQDEDGYRMKFACYYPRVEYGFQVKVLREDSRAAFRLFETKITQVLHFTKDVKAAANQMRNFLVRASCRLRLEPGKEYLIMGLDGATYDLEGHPQYLLDSNSWIEEMPSERLCRSTRQRAACAQLNDFLQEYGTQGCQV

SEQ ID NO: 18776 - protein, 247 aa, Homo sapiens
MSGLRPGTQVDPEIELFVKAGSDGESIGNCPFCQRLFMILWLKGVKFNVTTVDMTRKPEELKDLAPGTNPPFLVYNKELKTDFIKIEEFLEQTLAPPRYPHLSPKYKESFDVGCNLFAKFSAYIKNTQKEANKNFEKSLLKEFKRLDDYLNTPLLDEIDPDSAEEPPVSRRLFLDGDQLTLADCSLLPKLNIIKVAAKKYRDFDIPAEFSGVWRYLHNAYAREEFTHTCPEDKEIENTYANVAKQKS

SEQ ID NO: 18777 - protein, 218 aa, Homo sapiens
MNCRSEVLEVSVEGRQVEEAMLAVLHTVLLHRSTGKFHYKKEGTYSIGTVGTQDVDCDFIDFTYVRVSSEELDRALRKVVGEFKDALRNSGGDGLGQMSLEFYQKKKSRWPFSDECIPWEVWTVKVHVVALATEQERQICREKVGEKLCEKIINIVEVMNRHEYLPKMPTQSEVDNVFDTGLRDVQPYLYKISFQITDALGTSVTTTMRRLIKDTLAL

SEQ ID NO: 18778 - protein, 529 aa, Homo sapiens
MLGFVGRVAAAPASGALRRLTPSASLPPAQLLLRAAPTAVHPVRDYAAQTSPSPKAGAATGRIVAVIGAVVDVQFDEGLPPILNALEVQGRETRLVLEVAQHLGESTVRTIAMDGTEGLVRGQKVLDSGAPIKIPVGPETLGRIMNVIGEPIDERGPIKTKQFAPIHAEAPEFMEMSVEQEILVTGIKVVDLLAPYAKGGKIGLFGGAGVGKTVLIMELINNVAKAHGGYSVFAGVGERTREGNDLYHEMIESGVINLKDATSKVALVYGQMNEPPGARARVALTGLTVAEYFRDQEGQDVLLFIDNIFRFTQAGSEVSALLGRIPSAVGYQPTLATDMGTMQERITTTKKGSITSVQAIYVPADDLTDPAPATTFAHLDATTVLSRAIAELGIYPAVDPLDSTSRIMDPNIVGSEHYDVARGVQKILQDYKSLQDIIAILGMDELSEEDKLTVSRARKIQRFLSQPFQVAEVFTGHMGKLVPLKETIKGFQQILAGEYDHLPEQAFYMVGPIEEAVAKADKLAEEHSS

SEQ ID NO: 18779 - protein, 87 aa, Homo sapiens [sequence omitted]

SEQ ID NO: 18780 - protein, 96 aa, Homo sapiens
MFYRLPIPRMSTSVPQGHTWTQRVKKDDEEEDPLDQLISRSGCAASHFAVQECMAQHQDWRQCQPQVQAFKDCMSEQQARRQEELQRRQEQAGAHH

SEQ ID NO: 18781 - protein, 475 aa, Homo sapiens
MAAPRPPPARLSGVMVPAPIQDLEALRALTALFKEQRNRETAPRTIFQRVLDILKKSSHAVELACRDPSQVENLASSLQLITECFRCLRNACIECSVNQNSIRNLDTIGVAVDLILLFRELRVEQESLLTAFRCGLQFLGNIASRNEDSQSIVWVHAFPELFLSCLNHPDKKIVAYSSMILFTSLNHERMKELEENLNIAIDVIDAYQKHPESEWPFLIITDLFLKSPELVQAMFPKLNNQERVTLLDLMIAKITSDEPLTKDDIPVFLRHAELIASTFVDQCKTVLKLASEEPPDDEEALATIRLLDVLCEMTVNTELLGYLQVFPGLLERVIDLLRVIHVAGKETTNIFSNCGCVRAEGDISNVANGFKSHLIRLIGNLCYKNKDNQDKVNELDGIPLILDNCNISDSNPFLTQWVIYAIRNLTEDNSQNQDLIAKMEEQGLADASLLKKVGFEVEKKGEKLILKSTRDTPKP

SEQ ID NO: 18782 - protein, 411 aa, Homo sapiens
MAAPRPPPARLSGVMVPAPIQDLEALRALTALFKEQRNRNLDTIGVAVDLILLFRELRVEQESLLTAFRCGLQFLGNIASRNEDSQSIVWVHAFPELFLSCLNHPDKKIVAYSSMILFTSLNHERMKELEENLNIAIDVIDAYQKHPESEWPFLIITDLFLKSPELVQAMFPKLNNQERVTLLDLMIAKITSDEPLTKDDIPVFLRHAELIASTFVDQCKTVLKLASEEPPDDEEALATIRLLDVLCEMTVNTELLGYLQVFPGLLERVIDLLRVIHVAGKETTNIFSNCGCVRAEGDISNVANGFKSHLIRLIGNLCYKNKDNQDKVNELDGIPLILDNCNISDSNPFLTQWVIYAIRNLTEDNSQNQDLIAKMEEQGLADASLLKKVGFEVEKKGEKLILKSTRDTPKP

SEQ ID NO: 18783 - protein, 264 aa, Homo sapiens
MPRSLKRAQLRSLLPRPPAVSHTQPWYRAAHPTTSPTAASRDVHPASGAVPGPWLVEGTAVREGPQLQDAVPQRPTRPSKALWPAQMSAAPAIRLGQMVPGDTRGLWGPQGTLLTWTYRGGQGGRWTRRAEGPREGTFAEQRPHFQSSGAQQESRLAMGPPPLGLGDAAGDGRGQTGQEKGRAEGRQARKSACKCPRKGPNPGPWTRAAAWWGRLEGAKASAKGEQVRDPGGHLWEQGHVSPCARFNQGHSCGSPKVSHTTWVS

SEQ ID NO: 18784 - protein, 1754 aa, Homo sapiens
MAPYPCGCHILLLLFCCLAAARANLLNLNWLWFNNEDTSHAATTIPEPQGPLPVQPTADTTTHVTPRNGSTEPATAPGSPEPPSELLEDGQDTPTSAESPDAPEENIAGVGAEILNVAKGIRSFVQLWNDTVPTESLARAETLVLETPVGPLALAGPSSTPQENGTTLWPSRGIPSSPGAHTTEAGTLPAPTPSPPSLGRPWAPLTGPSVPPPSSGRASLSSLLGGAPPWGSLQDPDSQGLSPAAAAPSQQLQRPDVRLRTPLLHPLVMGSLGKHAAPSAFSSGLPGALSQVAVTTLTRDSGAWVSHVANSVGPGLANNSALLGADPEAPAGRCLPLPPSLPVCGHLGISRFWLPNHLHHESGEQVRAGARAWGGLLQTHCHPFLAWFFCLLLVPPCGSVPPPAPPPCCQFCEALQDACWSRLGGGRLPVACASLPTQEDGYCVLIGPAAERISEEVGLLQLLGDPPPQQVTQTDDPDVGLAYVFGPDANSGQVARYHFPSLFFRDFSLLFHIRPATEGPGVLFAITDSAQAMVLLGVKLSGVQDGHQDISLLYTEPGAGQTHTAASFRLPAFVGQWTHLALSVAGGFVALYVDCEEFQRMPLARSSRGLELEPGAGLFVAQAGGADPDKFQGVIAELKVRRDPQVSPMHCLDEEGDDSDGASGDSGSGLGDARELLREETGAALKPRLPAPPPVTTPPLAGGSSTEDSRSEEVEEQTTVASLGAQTLPGSDSVSTWDGSVRTPGGRVKEGGLKGQKGEPGVPGPPGRAGPPGSPCLPGPPGLPCPVSPLGPAGPALQTVPGPQGPPGPPGRDGTPGRDGEPGDPGEDGKPGDTGPQGFPGTPGDVGPKGDKGDPGVGERGPPGPQGPPGPPGPSFRHDKLTFIDMEGSGFGGDLEALRGPRGFPGPPGPPGVPGLPGEPGRFGVNSSDVPGPAGLPGVPGREGPPGFPGLPGPPGPPGREGPPGRTGQKGSLGEAGAPGHKGSKGAPGPAGARGESGLAGAPGPAGPPGPPGPPGPPGPGLPAGFDDMEGSGGPFWSTARSADGPQGPPGLPGLKGDPGVPGLPGAKGEVGADGVPGFPGLPGREGIAGPQGPKGDRGSRGEKGDPGKDGVGQPGLPGPPGPPGPVVYVSEQDGSVLSVPGPEGRPGFAGFPGPAGPKGNLGSKGERGSPGPKGEKGEPGSIFSPDGGALGPAQKGAKGEPGFRGPPGPYGRPGYKGEIGFPGRPGRPGMNGLKGEKGEPGDASLGFGMRGMPGPPGPPGPPGPPGTPVYDSNVFAESSRPGPPGLPGNQGPPGPKGAKGEVGPPGPPGQFPFDFLQLEAEMKGEKGDRGDAGQKGERGEPGGGGFFGSSLPGPPGPPGPPGPRGYPGIPGPKGESIRGQPGPPGPQGPPGIGYEGRQGPPGPPGPPGPPSFPGPHRQTISVPGPPGPPGPPGPPGTMGASSGVRLWATRQAMLGQVHEVPEGWLIFVAEQEELYVRVQNGFRKVQLEARTPLPRGTDNEVAALQPPVVQLHDSNPYPRREHPHPTARPWRADDILASPPRLPEPQPYPGAPHHSSYVHLRPARPTSPPAHSHRDFQPVLHLVALNSPLSGGMRGIRGADFQCFQQARAVGLAGTFRAFLSSRLQDLYSIVRRADRAAVPIVNLKDELLFPSWEALFSGSEGPLKPGARIFSFDGKDVLRHPTWPQKSVWHGSDPNGRRLTESYCETWRTEAPSATGQASSLLGGRLLGQSAASCHHAYIVLCIENSFMTASK

SEQ ID NO: 18785 - protein, 1519 aa, Homo sapiens
MAPYPCGCHILLLLFCCLAAARANLLNLNWLWFNNEDTSHAATTIPEPQGPLPVQPTADTTTHVTPRNGSTEPATAPGSPEPPSELLEDGQDTPTSAESPDAPEENIAGVGAEILNVAKGIRSFVQLWNDTVPTESLARAETLVLETPVGPLALAGPSSTPQENGTTLWPSRGIPSSPGAHTTEAGTLPAPTPSPPSLGRPWAPLTGPSVPPPSSERISEEVGLLQLLGDPPPQQVTQTDDPDVGLAYVFGPDANSGQVARYHFPSLFFRDFSLLFHIRPATEGPGVLFAITDSAQAMVLLGVKLSGVQDGHQDISLLYTEPGAGQTHTAASFRLPAFVGQWTHLALSVAGGFVALYVDCEEFQRMPLARSSRGLELEPGAGLFVAQAGGADPDKFQGVIAELKVRRDPQVSPMHCLDEEGDDSDGASGDSGSGLGDARELLREETGAALKPRLPAPPPVTTPPLAGGSSTEDSRSEEVEEQTTVASLGAQTLPGSDSVSTWDGSVRTPGGRVKEGGLKGQKGEPGVPGPPGRAGPPGSPCLPGPPGLPCPVSPLGPAGPALQTVPGPQGPPGPPGRDGTPGRDGEPGDPGEDGKPGDTGPQGFPGTPGDVGPKGDKGDPGVGERGPPGPQGPPGPPGPSFRHDKLTFIDMEGSGFGGDLEALRGPRGFPGPPGPPGVPGLPGEPGRFGVNSSDVPGPAGLPGVPGREGPPGFPGLPGPPGPPGREGPPGRTGQKGSLGEAGAPGHKGSKGAPGPAGARGESGLAGAPGPAGPPGPPGPPGPPGPGLPAGFDDMEGSGGPFWSTARSADGPQGPPGLPGLKGDPGVPGLPGAKGEVGADGVPGFPGLPGREGIAGPQGPKGDRGSRGEKGDPGKDGVGQPGLPGPPGPPGPVVYVSEQDGSVLSVPGPEGRPGFAGFPGPAGPKGNLGSKGERGSPGPKGEKGEPGSIFSPDGGALGPAQKGAKGEPGFRGPPGPYGRPGYKGEIGFPGRPGRPGMNGLKGEKGEPGDASLGFGMRGMPGPPGPPGPPGPPGTPVYDSNVFAESSRPGPPGLPGNQGPPGPKGAKGEVGPPGPPGQFPFDFLQLEAEMKGEKGDRGDAGQKGERGEPGGGGFFGSSLPGPPGPPGPPGPRGYPGIPGPKGESIRGQPGPPGPQGPPGIGYEGRQGPPGPPGPPGPPSFPGPHRQTISVPGPPGPPGPPGPPGTMGASSGVRLWATRQAMLGQVHEVPEGWLIFVAEQEELYVRVQNGFRKVQLEARTPLPRGTDNEVAALQPPVVQLHDSNPYPRREHPHPTARPWRADDILASPPRLPEPQPYPGAPHHSSYVHLRPARPTSPPAHSHRDFQPVLHLVALNSPLSGGMRGIRGADFQCFQQARAVGLAGTFRAFLSSRLQDLYSIVRRADRAAVPIVNLKDELLFPSWEALFSGSEGPLKPGARIFSFDGKDVLRHPTWPQKSVWHGSDPNGRRLTESYCETWRTEAPSATGQASSLLGGRLLGQSAASCHHAYIVLCIENSFMTASK

SEQ ID NO: 18786 - protein, 1339 aa, Homo sapiens
MAPRCPWPWPRRRRLLDVLAPLVLLLGVRAASAEPERISEEVGLLQLLGDPPPQQVTQTDDPDVGLAYVFGPDANSGQVARYHFPSLFFRDFSLLFHIRPATEGPGVLFAITDSAQAMVLLGVKLSGVQDGHQDISLLYTEPGAGQTHTAASFRLPAFVGQWTHLALSVAGGFVALYVDCEEFQRMPLARSSRGLELEPGAGLFVAQAGGADPDKFQGVIAELKVRRDPQVSPMHCLDEEGDDSDGASGDSGSGLGDARELLREETGAALKPRLPAPPPVTTPPLAGGSSTEDSRSEEVEEQTTVASLGAQTLPGSDSVSTWDGSVRTPGGRVKEGGLKGQKGEPGVPGPPGRAGPPGSPCLPGPPGLPCPVSPLGPAGPALQTVPGPQGPPGPPGRDGTPGRDGEPGDPGEDGKPGDTGPQGFPGTPGDVGPKGDKGDPGVGERGPPGPQGPPGPPGPSFRHDKLTFIDMEGSGFGGDLEALRGPRGFPGPPGPPGVPGLPGEPGRFGVNSSDVPGPAGLPGVPGREGPPGFPGLPGPPGPPGREGPPGRTGQKGSLGEAGAPGHKGSKGAPGPAGARGESGLAGAPGPAGPPGPPGPPGPPGPGLPAGFDDMEGSGGPFWSTARSADGPQGPPGLPGLKGDPGVPGLPGAKGEVGADGVPGFPGLPGREGIAGPQGPKGDRGSRGEKGDPGKDGVGQPGLPGPPGPPGPVVYVSEQDGSVLSVPGPEGRPGFAGFPGPAGPKGNLGSKGERGSPGPKGEKGEPGSIFSPDGGALGPAQKGAKGEPGFRGPPGPYGRPGYKGEIGFPGRPGRPGMNGLKGEKGEPGDASLGFGMRGMPGPPGPPGPPGPPGTPVYDSNVFAESSRPGPPGLPGNQGPPGPKGAKGEVGPPGPPGQFPFDFLQLEAEMKGEKGDRGDAGQKGERGEPGGGGFFGSSLPGPPGPPGPPGPRGYPGIPGPKGESIRGQPGPPGPQGPPGIGYEGRQGPPGPPGPPGPPSFPGPHRQTISVPGPPGPPGPPGPPGTMGASSGVRLWATRQAMLGQVHEVPEGWLIFVAEQEELYVRVQNGFRKVQLEARTPLPRGTDNEVAALQPPVVQLHDSNPYPRREHPHPTARPWRADDILASPPRLPEPQPYPGAPHHSSYVHLRPARPTSPPAHSHRDFQPVLHLVALNSPLSGGMRGIRGADFQCFQQARAVGLAGTFRAFLSSRLQDLYSIVRRADRAAVPIVNLKDELLFPSWEALFSGSEGPLKPGARIFSFDGKDVLRHPTWPQKSVWHGSDPNGRRLTESYCETWRTEAPSATGQASSLLGGRLLGQSAASCHHAYIVLCIENSFMTASK

SEQ ID NO: 18787 - protein, 275 aa, Homo sapiens
MDTILVFSLIIASYDANKKDLRDSSCRLEQLPGIFPKDVRSIRELQMQETHTETKRTTFIQNRTIATLQCLGSDSKVKVNLVYLERRPKVKHILKNLRIIAAPRRNSSASSSCHLIPTSKFQTGSLLKGKAFLPGISQCKVLGASSETFPTTAPSITPGNKEGEKTTSTDTDENLEKRQKWSIVVKILIAVTLLLSGVAIIVFVIFEVPCPYQCLGARKLCQCQWLWRWQKKGGQPPGTAESKPDSQPQKVGQDAANSSNPKKAAEITVIHQTYF

SEQ ID NO: 18788 - protein, 159 aa, Homo sapiens
MDTILVFSLIIASYDANKKDLRDSSCRLEQLPGIFPKDVRSIRELQMQETHTETKRTTFIQNRTIATLQCLGSDSKVKVNLVYLERRPKVKHILKNLRIIAAPRRNSSASSSCHLIPTSKFQTGSLLKGKVSMPRSQEAVPMPVVVEMAKEGRPATWDS

SEQ ID NO: 18789 - protein, 815 aa, Homo sapiens
MKSNQERSNECLPPKKREIPATSRSSEEKAPTLPSDNHRVEGTAWLPGNPGGRGHGGGRHGPAGTSVELGLQQGIGLHKALSTGLDYSPPSAPRSVPVATTLPAAYATPQPGTPVSPVQYAHLPHTFQFIGSSQYSGTYASFIPSQLIPPTANPVTSAVASAAGATTPSQRSQLEAYSTLLANMGSLSQTPGHKAEQQQQQQQQQQQQHQHQQQQQQQQQQQQQQHLSRAPGLITPGSPPPAQQNQYVHISSSPQNTGRTASPPAIPVHLHPHQTMIPHTLTLGPPSQVVMQYADSGSHFVPREATKKAESSRLQQAIQAKEVLNGEMEKSRRYGAPSSADLGLGKAGGKSVPHPYESRHVVVHPSPSDYSSRDPSGVRASVMVLPNSNTPAADLEVQQATHREASPSTLNDKSGLHLGKPGHRSYALSPHTVIQTTHSASEPLPVGLPATAFYAGTQPPVIGYLSGQQQAITYAGSLPQHLVIPGTQPLLIPVGSTDMEASGAAPAIVTSSPQFAAVPHTFVTTALPKSENFNPEALVTQAAYPAMVQAQIHLPVVQSVASPAAAPPTLPPYFMKGSIIQLANGELKKVEDLKTEDFIQSAEISNDLKIDSSTVERIEDSHSPGVAVIQFAVGEHRAQVSVEVLVEYPFFVFGQGWSSCCPERTSQLFDLPCSKLSVGDVCISLTLKNLKNGSVKKGQPVDPASVLLKHSKADGLAGSRHRYAEQENGINQGSAQMLSENGELKFPEKMGLPAAPFLTKIEPSKPAATRKRRWSAPESRKLEKSEDEPPLTLPKPSLIPQEVKICIEGRSNVGK

SEQ ID NO: 18790 - protein, 576 aa, Homo sapiens
MAASETVRLRLQFDYPPPATPHCTAFWLLVDLNRCRVVTDLISLIRQRFGFSSGAFLGLYLEGGLLPPAESARLVRDNDCLRVKLEERGVAENSVVISNGDINLSLRKAKKRAFQLEEGEETEPDCKYSKKHWKSRENNNNNEKVLDLEPKAVTDQTVSKKNKRKNKATCGTVGDDNEEAKRKSPKKKEKCEYKKKAKNPKSPKVQAVKDWANQRCSSPKGSARNSLVKAKRKGSVSVCSKESPSSSSESESCDESISDGPSKVTLEARNSSEKLPTELSKEEPSTKNTTADKLAIKLGFSLTPSKGKTSGTTSSSSDSSAESDDQCLMSSSTPECAAGFLKTVGLFAGRGRPGPGLSSQTAGAAGWRRSGSNGGGQAPGASPSVSLPASLGRGWGREENLFSWKGAKGRGMRGRGRGRGHPVSCVVNRSTDNQRQQQLNDVVKNSSTIIQNPVETPKKDYSLLPLLAAAPQVGEKIAFKLLELTSSYSPDVSDYKEGRILSHNPETQQVDIEILSSLPALREPGKFDLVYHNENGAEVVEYAVTQESKITVFWKELIDPRLIIESPSNTSSTEPA

SEQ ID NO: 18791 - protein, 609 aa, Homo sapiens
MSDNPPRMEVCPYCKKPFKRLKSHLPYCKMIGPTIPTDQKVYQSKPATLPRAKKMKGPIKDLIKAKGKELETENEERNSKLVVDKPEQTVKTFPLPAVGLERAATTKADKDIKNPIQPSFKMLKNTKPMTTFQEETKAQFYASEKTSPKRELAKDLPKSGESRCNPSEAGASLLVGSIEPSLSNQDRKYSSTLPNDVQTTSGDLKLDKIDPQRQELLVKLLDVPTGDCHISPKNVSDGVKRVRTLLSNERDSKGRDHLSGVPTDVTVTETPEKNTESLILSLKMSSLGKIQVMEKQEKGLTLGVETCGSKGNAEKSMSATEKQERTVMSHGCENFNTRDSVTGKESQGERPHLSLFIPRETTYQFHSVSQSSSQSLASLATTFLQEKKAEAQNHHCVPDVKALMESPEGQLSLEPKSDSQFQASHTGCQSPLCSAQRHTPQSPFTNHAAAAGRKTLRSCMGLEWFPELYPGYLGLGVLPGKPQCWNAMTQKPQLISPQGERLSQVSLLERSSTHIRSLEPPAGLTTSNFSLMRLLGAVQKGWIRCNTTIRKSGFGGITMLFTGYFVLCCSWSFRRLKKLCRPLPWKSTVPPCIGVAKTTGDCRSKTCLD

SEQ ID NO: 18792 - protein, 573 aa, Homo sapiens
MSDNPPRMEVCPYCKKPFKRLKSHLPYCKMIGPTIPTDQKVYQSKPATLPRAKKMKGPIKDLIKAKGKELETENEERNSKLVVDKPEQTVKTFPLPAVGLERAATTKADKDIKNPIQPSFKMLKNTKPMTTFQEETKAQFYASEKTSPKRELAKDLPKSGESRCNPSEAGASLLVGSIEPSLSNQDRKYSSTLPNDVQTTSGDLKLDKIDPQRQELLVKLLDVPTGDCHISPKNVSDGVKRVRTLLSNERDSKGRDHLSGVPTDVTVTETPEKNTESLILSLKMSSLGKIQVMEKQEKGLTLGVETCGSKGNAEKSMSATEKQERTVMSHGCENFNTRDSVTGKESQGERPHLSLFIPRETTYQFHSVSQSSSQSLASLATTFLQEKKAEAQNHHCVPDVKALMESPEGQLSLEPKSDSQFQASHTGCQSPLCSAQRHTPQSPFTNHAAAAGRKTLRSCMGLEWFPELYPGYLGLGVLPGKPQCWNAMTQKPQLISPQGERLSQGWIRCNTTIRKSGFGGITMLFTGYFVLCCSWSFRRLKKLCRPLPWKSTVPPCIGVAKTTGDCRSKTCLD

SEQ ID NO: 18793 - protein, 583 aa, Homo sapiens
MSDNPPRMEVCPYCKKPFKRLKSHLPYCKMIGPTIPTDQKVYQSKPATLPRAKKMKGPIKDLIKAKGKELETENEERNSKLVVDKPEQTVKTFPLPAVGLERAATTKADKDIKNPIQPSFKMLKNTKPMTTFQEETKAQFYASEKTSPKRELAKDLPKSGESRCNPSEAGASLLVGSIEPSLSNQDRKYSSTLPNDVQTTSGDLKLDKIDPQRQELLVKLLDVPTGDCHISPKNVSDGVKRVRTLLSNERDSKGRDHLSGVPTDVTVTETPEKNTESLILSLKMSSLGKIQVMEKQEKGLTLGVETCGSKGNAEKSMSATEKQERTVMSHGCENFNTRDSVTGKESQGERPHLSLFIPRETTYQFHSVSQSSSQSLASLATTFLQEKKAEAQNHHCVPDVKALMESPEGQLSLEPKSDSQFQASHTGCQSPLCSAQRHTPQSPFTNHAAAAGRKTLRSCMGLEWFPELYPGYLGLGVLPGKPQCWNAMTQKPQLISPQGERLSQVSLLERSSTHIRSLEPPAGLTTSNFSLMRLLGAVQKGWIRCNTTIRKSGFGGITMLFTGYFVLCCSWSFRRLKLQRWRK

SEQ ID NO: 18794 - protein, 1284 aa, Homo sapiens
MSSGDPAHLGLCLWLWLGATLGREQVQASGLLRLAVLPEDRLQMKWRESEGSGLGYLVQVKPMAGDSEQEVILTTKTPKATVGGLSPSKGYTLQIFELTGSGRFLLARREFVIEDLKSSSLDRSSQRPLGSGAPEPTPSHTGSPDPEQASEPQVAFTPSQDPRTPAGPQFRCLPPVPADMVFLVDGSWSIGHSHFQQVKDFLASVIAPFEIGPDKVQVGLTQYSGDAQTEWDLNSLSTKEQVLAAVRRLRYKGGNTFTGLALTHVLGQNLQPAAGLRPEAAKVVILVTDGKSQDDVHTAARVLKDLGVNVFAVGVKNADEAELRLLASPPRDITVHSVLDFLQLGALAGLLSRLICQRLQGGSPRQGPAAAPALDTLPAPTSLVLSQVTSSSIRLSWTPAPRHPLKYLIVWRASRGGTPREVVVEGPAASTELHNLASRTEYLVSVFPIYEGGVGEGLRGLVTTAPLPPPRALTLAAVTPRTVHLTWQPSAGATHYLVRCSPASPKGEEEEREVQVGRPEVLLDGLEPGRDYEVSVQSLRGPEGSEARGIRARTPTLAPPRHLGFSDVSHDAARVFWEGAPRPVRLVRVTYVSSEGGHSGQTEAPGNATSATLGPLSSSTTYTVRVTCLYPGGGSSTLTGRVTTKKAPSPSQLSMTELPGDAVQLAWVAAAPSGVLVYQITWTPLGEGKAHEISVPGNLGTAVLPGLGRHTEYDVTILAYYRDGARSDPVSLRYTPSTVSRSPPSNLALASETPDSLQVSWTPPLGRVLHYWLTYAPASGLGPEKSVSVPGARSHVTLPDLQAATKYRVLVSAIYAAGRSEAVSATGQTACPALRPDGSLPGFDLMVAFSLVEKAYASIRGVAMEPSAFGGTPTFTLFKDAQLTRRVSDVYPAPLPPEHTIVFLVRLLPETPREAFALWQMTAEDFQPLLGVLLDAGKKSLTYFHRDPRAALQEATFDPQEVRKIFFGSFHKVHVAVGRSKVRLYVDCRKVAERPLGEMGSPPAAGFVTLGRLAKARGPRSSSAAFQLQMLQIVCSDTWADEDRCCELPASRDGETCPAFVSACSCSSETPGPPGPQGPPGLPGRNGTPGEQGFPGPRGPPGVKGEKGDHGLPGLQGHPGHQGIPGRVGLQGPKGMRGLEGTAGLPGPPGPRGFQGMAGARGTSGERGPPGTVGPTGLPGPKGERGEKGEPQSLATLYQLVSQASHVSKFDSFHENTRPPMPILEQKLEPGTEPLGSPGTRSKALVPGEWGRGGRHLEGRGEPGAVGQMGSPGQQGASTQGLWE

SEQ ID NO: 18795 - protein, 1297 aa, Homo sapiens
MSSGDPAHLGLCLWLWLGATLGREQVQASGLLRLAVLPEDRLQMKWRESEGSGLGYLVQVKPMAGDSEQEVILTTKTPKATVGGLSPSKGYTLQIFELTGSGRFLLARREFVIEDLKSSSLDRSSQRPLGSGAPEPTPSHTGSPDPEQASEPQVAFTPSQDPRTPGGSEWRETGPQFRCLPPVPADMVFLVDGSWSIGHSHFQQVKDFLASVIAPFEIGPDKVQVGLTQYSGDAQTEWDLNSLSTKEQVLAAVRRLRYKGGNTFTGLALTHVLGQNLQPAAGLRPEAAKVVILVTDGKSQDDVHTAARVLKDLGVNVFAVGVKNADEAELRLLASPPRDITVHSVLDFLQLGALAGLLSRLICQRLQGGSPRQGPAAAPALDTLPAPTSLVLSQVTSSSIRLSWTPAPRHPLKYLIVWRASRGGTPREVVVEGPAASTELHNLASRTEYLVSVFPIYEGGVGEGLRGLVTTAPLPPPRALTLAAVTPRTVHLTWQPSAGATHYLVRCSPASPKGEEEEREVQVGRPEVLLDGLEPGRDYEVSVQSLRGPEGSEARGIRARTPTLAPPRHLGFSDVSHDAARVFWEGAPRPVRLVRVTYVSSEGGHSGQTEAPGNATSATLGPLSSSTTYTVRVTCLYPGGGSSTLTGRVTTKKAPSPSQLSMTELPGDAVQLAWVAAAPSGVLVYQITWTPLGEGKAHEISVPGNLGTAVLPGLGRHTEYDVTILAYYRDGARSDPVSLRYTPSTVSRSPPSNLALASETPDSLQVSWTPPLGRVLHYWLTYAPASGLGPEKSVSVPGARSHVTLPDLQAATKYRVLVSAIYAAGRSEAVSATGQTACPALRPDGSLPGFDLMVAFSLVEKAYASIRGVAMEPSAFGGTPTFTLFKDAQLTRRVSDVYPAPLPPEHTIVFLVRLLPETPREAFALWQMTAEDFQPLLGVLLDAGKKSLTYFHRDPRAALQEATFDPQEVRKIFFGSFHKVHVAVGRSKVRLYVDCRKVAERPLGEMGSPPAAGFVTLGRLAKARGPRSSSAAFQLQMLQIVCSDTWADEDRCCELPASRDGETCPAFVSACSCSSETPGPPGPQGPPGLPGRNGTPGEQGFPGPRGPPGVKGEKGDHGLPGLQGHPGHQGIPGRVGLQGPKGMRGLEGTAGLPGPPGPRGFQGMAGARGTSGERGPPGTVGPTGLPGPKGERGEKGEPQSLATLYQLVSQACESAIQTHVSKFDSFHENTRPPMPILEQKLEPGTEPLGSPGTRSKALVPGEWGRGGRHLEGRGEPGAVGQMGSPGQQGASTQGLWE

SEQ ID NO: 18796 - protein, 1316 aa, Homo sapiens
MSSGDPAHLGLCLWLWLGATLGREQVQASGLLRLAVLPEDRLQMKWRESEGSGLGYLVQVKPMAGDSEQEVILTTKTPKATVGGLSPSKGYTLQIFELTGSGRFLLARREFVIEDLKSSSLDRSSQRPLGSGAPEPTPSHTGSPDPEQASEPQVAFTPSQDPRTPAGPQFRCLPPVPADMVFLVDGSWSIGHSHFQQVKDFLASVIAPFEIGPDKVQVGLTQYSGDAQTEWDLNSLSTKEQVLAAVRRLRYKGGNTFTGLALTHVLGQNLQPAAGLRPEAAKVVILVTDGKSQDDVHTAARVLKDLGVNVFAVGVKNADEAELRLLASPPRDITVHSVLDFLQLGALAGLLSRLICQRLQGGSPRQGPAAAPALDTLPAPTSLVLSQVTSSSIRLSWTPAPRHPLKYLIVWRASRGGTPREVVVEGPAASTELHNLASRTEYLVSVFPIYEGGVGEGLRGLVTTAPLPPPRALTLAAVTPRTVHLTWQPSAGATHYLVRCSPASPKGEEEEREVQVGRPEVLLDGLEPGRDYEVSVQSLRGPEGSEARGIRARTPTLAPPRHLGFSDVSHDAARVFWEGAPRPVRLVRVTYVSSEGGHSGQTEAPGNATSATLGPLSSSTTYTVRVTCLYPGGGSSTLTGRVTTKKAPSPSQLSMTELPGDAVQLAWVAAAPSGVLVYQITWTPLGEGKAHEISVPGNLGTAVLPGLGRHTEYDVTILAYYRDGARSDPVSLRYTPSTVSRSPPSNLALASETPDSLQVSWTPPLGRVLHYWLTYAPASGLGPEKSVSVPGARSHVTLPDLQAATKYRVLVSAIYAAGRSEAVSATGQTACPALRPDGSLPGFDLMVAFSLVEKAYASIRGVAMEPSAFGGTPTFTLFKDAQLTRRVSDVYPAPLPPEHTIVFLVRLLPETPREAFALWQMTAEDFQPLLGVLLDAGKKSLTYFHRDPRAALQEATFDPQEVRKIFFGSFHKVHVAVGRSKVRLYVDCRKVAERPLGEMGSPPAAGFVTLGRLAKARGPRSSSAAFQLQMLQIVCSDTWADEDRCCELPASRDGETCPAFVSACSCSSETPGPPGPQGPPGLPGRNGTPGEQGFPGPRGEPGPPGQMGPEGPGGQQGSPGTQGRAVQGPVGPPGVKGEKGDHGLPGLQGHPGHQGIPGRVGLQGPKGMRGLEGTAGLPGPPGPRGFQGMAGARGTSGERGPPGTVGPTGLPGPKGERGEKGEPQSLATLYQLVSQASHVSKFDSFHENTRPPMPILEQKLEPGTEPLGSPGTRSKALVPGEWGRGGRHLEGRGEPGAVGQMGSPGQQGASTQGLWE

SEQ ID NO: 18797 - protein, 490 aa, Homo sapiens
MEPFVVLVLCLSFMLLFSLWRQSCRRRKLPPGPTPLPIIGNMLQIDVKDICKSFTNFSKVYGPVFTVYFGMNPIVVFHGYEAVKEALIDNGEEFSGRGNSPISQRITKGLGIISSNGKRWKEIRRFSLTTLRNFGMGKRSIEDRVQEEAHCLVEELRKTKASPCDPTFILGCAPCNVICSVVFQKRFDYKDQNFLTLMKRFNENFRILNSPWIQVCNNFPLLIDCFPGTHNKVLKNVALTRSYIREKVKEHQASLDVNNPRDFIDCFLIKMEQEKDNQKSEFNIENLVGTVADLFVAGTETTSTTLRYGLLLLLKHPEVTAKVQEEIDHVIGRHRSPCMQDRSHMPYTDAVVHEIQRYSDLVPTGVPHAVTTDTKFRNYLIPKGTTIMALLTSVLHDDKEFPNPNIFDPGHFLDKNGNFKKSDYFMPFSAGKRICAGEGLARMELFLFLTTILQNFNLKSVDDLKNLNTTAVTKGIVSLPPSYQICFIPV

SEQ ID NO: 18798 - protein, 388 aa, Homo sapiens
MFLQPIAKGIISSNGKRWKEIRRFSLTTLRNFGMGKRSIEDRVQEEAHCLVEELRKTKASPCDPTFILGCAPCNVICSVVFQKRFDYKDQNFLTLMKRFNENFRILNSPWIQVCNNFPLLIDCFPGTHNKVLKNVALTRSYIREKVKEHQASLDVNNPRDFIDCFLIKMEQEKDNQKSEFNIENLVGTVADLFVAGTETTSTTLRYGLLLLLKHPEVTAKVQEEIDHVIGRHRSPCMQDRSHMPYTDAVVHEIQRYSDLVPTGVPHAVTTDTKFRNYLIPKGTTIMALLTSVLHDDKEFPNPNIFDPGHFLDKNGNFKKSDYFMPFSAGKRICAGEGLARMELFLFLTTILQNFNLKSVDDLKNLNTTAVTKGIVSLPPSYQICFIPV

SEQ ID NO: 18799 - protein, 493 aa, Homo sapiens
MADSEALPSLAGDPVAVEALLRAVFGVVVDEAIQKGTSVSQKVCEWKEPEELKQLLDLELRSQGESQKQILERCRAVIRYSVKTGHPRFFNQLFSGLDPHALAGRIITESLNTSQYTYEIAPVFVLMEEEVLRKLRALVGWSSGDGIFCPGGSISNMYAVNLARYQRYPDCKQRGLRTLPPLALFTSKECHYSIQKGAAFLGLGTDSVRVVKADERGKMVPEDLERQIGMAEAEGAVPFLVSATSGTTVLGAFDPLEAIADVCQRHGLWLHVDAAWGGSVLLSQTHRHLLDGIQRADSVAWNPHKLLAAGLQCSALLLQDTSNLLKRCHGSQASYLFQQDKFYDVALDTGDKVVQCGRRVDCLKLWLMWKAQGDQGLERRIDQAFVLARYLVEEMKKREGFELVMEPEFVNVCFWFVPPSLRGKQESPDYHERLSKVAPVLKERMVKEGSMMIGYQPHGTRGNFFRVVVANSALTCADMDFLLNELERLGQDL

SEQ ID NO: 18800 - protein, 346 aa, Homo sapiens
MADSEALPSLAGDPVAVEALLRAVFGVVVDEAIQKGTSVSQKCHYSIQKGAAFLGLGTDSVRVVKADERGKMVPEDLERQIGMAEAEGAVPFLVSATSGTTVLGAFDPLEAIADVCQRHGLWLHVDAAWGGSVLLSQTHRHLLDGIQRADSVAWNPHKLLAAGLQCSALLLQDTSNLLKRCHGSQASYLFQQDKFYDVALDTGDKVVQCGRRVDCLKLWLMWKAQGDQGLERRIDQAFVLARYLVEEMKKREGFELVMEPEFVNVCFWFVPPSLRGKQESPDYHERLSKVAPVLKERMVKEGSMMIGYQPHGTRGNFFRVVVANSALTCADMDFLLNELERLGQDL

SEQ ID NO: 18801 - protein, 520 aa, Homo sapiens
MSIPLKSSFLLSYLCTLPPALLSREILMADSEALPSLAGDPVAVEALLRAVFGVVVDEAIQKGTSVSQKVCEWKEPEELKQLLDLELRSQGESQKQILERCRAVIRYSVKTGHPRFFNQLFSGLDPHALAGRIITESLNTSQYTYEIAPVFVLMEEEVLRKLRALVGWSSGDGIFCPGGSISNMYAVNLARYQRYPDCKQRGLRTLPPLALFTSKECHYSIQKGAAFLGLGTDSVRVVKADERGKMVPEDLERQIGMAEAEGAVPFLVSATSGTTVLGAFDPLEAIADVCQRHGLWLHVDAAWGGSVLLSQTHRHLLDGIQRADSVAWNPHKLLAAGLQCSALLLQDTSNLLKRCHGSQASYLFQQDKFYDVALDTGDKVVQCGRRVDCLKLWLMWKAQGDQGLERRIDQAFVLARYLVEEMKKREGFELVMEPEFVNVCFWFVPPSLRGKQESPDYHERLSKVAPVLKERMVKEGSMMIGYQPHGTRGNFFRVVVANSALTCADMDFLLNELERLGQDL

SEQ ID NO: 18802 - protein, 675 aa, Homo sapiens
MVPPGKKPAGEASNSNKKCKRYFNEHWKEEFTWLDFDYERKLMFCLECRQALVRNKHGKAENAFTVGTDNFQRHALLRHVTSGAHRQALAVNQGQPPFEGQAEGGGACPGLATTPASRGVKVELDPAKVAVLTTVYCMAKEDVPNDRCSALLELQRFNLCQALLGTEHGDYYSPRRVRDMQVAIASVLHTEACQRLKASPYVGLVLDETRDWPESHSLALFATSVSPCDGQPATTFLGSVELQEGEATAGQLLDILQAFGVSAPKLAWLSSSLPSERLGSVGPQLRATCPLLAELHCLPGRTDPEPPAYLGQYESILDALFRLHGGPSSHLVPELRAALDLAAIDLAGPRPVPWASLLPVVEAVAEAWPGLVPTLEAAALASPVAGSLALALRQFTFVAFTHLLLDALPSVQKLSLVLQAEEPDLALLQPLVMAAAASLQAQRGSGGARLQGFLQELASMDPDASSGRCTYRGVELLGYSEAAVRGLEWLRGSFLDSMRKGLQDSYPGPSLDAVAAFAAIFDPRRYPQAPEELGTHGEGALRVLLRGFAPAVVRQRALGDFALFKRVVFGLGRLGPRALCTQLACAHSELHELFPDFAALAALALALPAGAGLLDKVGRSRELRWWGQSGAGEGRGGHMVKIAVDGPPLHEFDFGLAVEFLESGWGEGFLGSQLT

SEQ ID NO: 18803 - protein, 95 aa, Homo sapiens
MSHSYKKAISDEALRPFQMDYFGGLPPGQYATRMTGQVHGSGCHLRSAPCDLGASQRKLSSNFSEIDAGLFSQGKSAAYTDIGATKPVEQRETAS

SEQ ID NO: 18804 - protein, 490 aa, Homo sapiens
MDPAVALVLCLSCLFLLSLWRQSSGRGRLPSGPTPLPIIGNILQLDVKDMSKSLTNFSKVYGPVFTVYFGLKPIVVLHGYEAVKEALIDHGEEFSGRGSFPVAEKVNKGLGILFSNGKRWKEIRRFCLMTLRNFGMGKRSIEDRVQEEARCLVEELRKTNASPCDPTFILGCAPCNVICSVIFHDRFDYKDQRFLNLMEKFNENLRILSSPWIQVCNNFPALIDYLPGSHNKIAENFAYIKSYVLERIKEHQESLDMNSARDFIDCFLIKMEQEKHNQQSEFTVESLIATVTDMFGAGTETTSTTLRYGLLLLLKYPEVTAKVQEEIECVVGRNRSPCMQDRSHMPYTDAVVHEIQRYIDLLPTNLPHAVTCDVKFKNYLIPKGTTIITSLTSVLHNDKEFPNPEMFDPGHFLDKSGNFKKSDYFMPFSAGKRMCMGEGLARMELFLFLTTILQNFNLKSQVDPKDIDITPIANAFGRVPPLYQLCFIPV

SEQ ID NO: 18805 - protein, 431 aa, Homo sapiens
MDPAVALVLCLSCLFLLSLWRQSSGRGRLPSGPTPLPIIGNILQLDVKDMSKSLTNFSKVYGPVFTVYFGLKPIVVLHGYEAVKEALIDHGEEFSGRGSFPVAEKVNKGLGILFSNGKRWKEIRRFCLMTLRNFGMGKRSIEDRVQEEARCLVEELRKTNASPCDPTFILGCAPCNVICSVIFHDRFDYKDQRFLNLMEKFNENLRILSSPWIQEKHNQQSEFTVESLIATVTDMFGAGTETTSTTLRYGLLLLLKYPEVTAKVQEEIECVVGRNRSPCMQDRSHMPYTDAVVHEIQRYIDLLPTNLPHAVTCDVKFKNYLIPKGTTIITSLTSVLHNDKEFPNPEMFDPGHFLDKSGNFKKSDYFMPFSAGKRMCMGEGLARMELFLFLTTILQNFNLKSQVDPKDIDITPIANAFGRVPPLYQLCFIPV

SEQ ID NO: 18806 - protein, 220 aa, Homo sapiens
MRQKHYLEAAARGLHDSCPGQARYLLWAYTSSHDDKSTFEETCPYCFQLLVLDNSRVRLKPKARLTPKIQKLLNREARNYTLSFKEAKMVKKFKDSKSVLLITCKTCNRTVKHHGKSRSFVSTLKSNPATPTSKLSLKTPERRTANPNHDMSGSKGKSPASVFRTPTSGQSVSTCSSKNTSKTKKHFSQLKMLLSQNESQKIPKVDFRNFLSSLKGGLLK

SEQ ID NO: 18807 - protein, 132 aa, Homo sapiens
MVKKFKDSKSVLLITCKTCNRTVKHHGKSRSFVSTLKSNPATPTSKLSLKTPERRTANPNHDMSGSKGKSPASVFRTPTSGQSVSTCSSKNTSKTKKHFSQLKMLLSQNESQKIPKVDFRNFLSSLKGGLLK

SEQ ID NO: 18808 - protein, 490 aa, Homo sapiens [sequence omitted]

SEQ ID NO: 18809 - protein, 742 aa, Homo sapiens
MKDDFAEEEEVQSFGYKRFGIQEGTQCTKCKNNWALKFSIILLYILCALLTITVAILGYKVVEKMDNVTGGMETSRQTYDDKLTAVESDLKKLGDQTGKKAISTNSELSTFRSDILDLRQQLREITEKTSKNKDTLEKLQASGDALVDRQSQLKETLENNSFLITTVNKTLQAYNGYVTNLQQDTSVLQGNLQNQMYSHNVVIMNLNNLNLTQVQQRNLITNLQRSVDDTSQAIQRIKNDFQNLQQVFLQAKKDTDWLKEKVQSLQTLAANNSALAKANNDTLEDMNSQLNSFTGQMENITTISQANEQNLKDLQDLHKDAENRTAIKFNQLEERFQLFETDIVNIISNISYTAHHLRTLTSNLNEVRTTCTDTLTKHTDDLTSLNNTLANIRLDSVSLRMQQDLMRSRLDTEVANLSVIMEEMKLVDSKHGQLIKNFTILQGPPGPRGPRGDRGSQGPPGPTGNKGQKGEKGEPGPPGPAGERGPIGPAGPPGERGGKGSKGSQGPKGSRGSPGKPGPQGSSGDPGPPGPPGKEGLPGPQGPPGFQGLQGTVGEPGVPGPRGLPGLPGVPGMPGPKGPPGPPGPSGAVVPLALQNEPTPAPEDNGCPPHWKNFTDKCYYFSVEKEIFEDAKLFCEDKSSHLVFINTREEQQWIKKQMVGRESHWIGLTDSERENEWKWLDGTSPDYKNWKAGQPDNWGHGHGPGEDCAGLIYAGQWNDFQCEDVNNFICEKDRETVLSSAL

SEQ ID NO: 18810 - protein, 515 aa, Homo sapiens
MGLEALVPLAMIVAIFLLLVDLMHRHQRWAARYPPGPLPLPGLGNLLHVDFQNTPYCFDQLRRRFGDVFSLQLAWTPVVVLNGLAAVREAMVTRGEDTADRPPAPIYQVLGFGPRSQGVILSRYGPAWREQRRFSVSTLRNLGLGKKSLEQWVTEEAACLCAAFADQAGRPFRPNGLLDKAVSNVIASLTCGRRFEYDDPRFLRLLDLAQEGLKEESGFLREVLNAVPVLPHIPALAGKVLRFQKAFLTQLDELLTEHRMTWDPAQPPRDLTEAFLAKKEKAKGSPESSFNDENLRIVVGNLFLAGMVTTSTTLAWGLLLMILHLDVQRGRRVSPGCPIVGTHVCPVRVQQEIDDVIGQVRRPEMGDQAHMPCTTAVIHEVQHFGDIVPLGVTHMTSRDIEVQGFRIPKGTTLITNLSSVLKDEAVWKKPFRFHPEHFLDAQGHFVKPEAFLPFSAGRRACLGEPLARMELFLFFTSLLQHFSFSVAAGQPRPSHSRVVSFLVTPSPYELCAVPR

SEQ ID NO: 18811 - protein, 90 aa, Homo sapiens
MSTAMNFGTKSFQPRPPDKGSFPLDHLGECKSFKEKFMKCLHNNNFENALCRKESKEYLECRMERKLMLQEPLEKLGFGDLTSGKSEAKK

SEQ ID NO: 18812 - protein, 957 aa, Homo sapiens
MAHYITFLCMVLVLLLQNSVLAEDGEVRSSCRTAPTDLVFILDGSYSVGPENFEIVKKWLVNITKNFDIGPKFIQVGVVQYSDYPVLEIPLGSYDSGEHLTAAVESILYLGGNTKTGKAIQFALDYLFAKSSRFLTKIAVVLTDGKSQDDVKDAAQAARDSKITLFAIGVGSETEDAELRAIANKPSSTYVFYVEDYIAISKIREVMKQKLCEESVCPTRIPVAARDERGFDILLGLDVNKKVKKRIQLSPKKIKGYEVTSKVDLSELTSNVFPEGLPPSYVFVSTQRFKVKKIWDLWRILTIDGRPQIAVTLNGVDKILLFTTTSVINGSQVVTFANPQVKTLFDEGWHQIRLLVTEQDVTLYIDDQQIENKPLHPVLGILINGQTQIGKYSGKEETVQFDVQKLRIYCDPEQNNRETACEIPGFNGECLNGPSDVGSTPAPCICPPGKPGLQGPKGDPGLPGNPGYPGQPGQDGKPGYQGIAGTPGVPGSPGIQGARGLPGYKGEPGRDGDKGDRGLPGFPGLHGMPGSKGEMGAKGDKGSPGFYGKKGAKGEKGNAGFPGLPGPAGEPGRHGKDGLMGSPGFKGEAGSPGAPGQDGTRGEPGIPGFPGNRGLMGQKGEIGPPGQQGKKGAPGMPGLMGSNGSPGQPGTPGSKGSKGEPGIQGMPGASGLKGEPGATGSPGEPGYMGLPGIQGKKGDKGNQGEKGIQGQKGENGRQGIPGQQGIQGHHGAKGERGEKGEPGVRGAIGSKGESGVDGLMGPAGPKGQPGDPGPQGPPGLDGKPGREFSEQFIRQVCTDVIRAQLPVLLQSGRIRNCDHCLSQHGSPGIPGPPGPIGPEGPRGLPGLPGRDGVPGLVGVPGRPGVRGLKGLPGRNGEKGSQGFGYPGEQGPPGPPGPEGPPGISKEGPPGDPGLPGKDGDHGKPGIQGQPGPPGICDPSLCFSVIARRDPFRKGPNY

SEQ ID NO: 18813 - protein, 323 aa, Homo sapiens
MIASGIPGFPGNRGLMGQKGEIGPPGQQGKKGAPGMPGLMGSNGSPGQPGTPGSKGSKGEPGIQGMPGASGLKGEPGATGSPGEPGYMGLPGIQGKKGDKGNQGEKGIQGQKGENGRQGIPGQQGIQGHHGAKGERGEKGEPGVRGAIGSKGESGVDGLMGPAGPKGQPGDPGPQGPPGLDGKPGREFSEQFIRQVCTDVIRGPEGPRGLPGLPGRDGVPGLVGVPGRPGVRGLKGLPGRNGEKGSQGFGYPGEQGPPGPPGPEGPPGISKEGPPGDPGLPGKDGDHGKPGIQGQPGPPGICDPSLCFSVIARRDPFRKGPNY

SEQ ID NO: 18814 - protein, 954 aa, Homo sapiens
MAHYITFLCMVLVLLLQNSVLAEDGEVRSSCRTAPTDLVFILDGSYSVGPENFEIVKKWLVNITKNFDIGPKFIQVGVVQYSDYPVLEIPLGSYDSGEHLTAAVESILYLGGNTKTGKAIQFALDYLFAKSSRFLTKIAVVLTDGKSQDDVKDAAQAARDSKITLFAIGVGSETEDAELRAIANKPSSTYVFYVEDYIAISKIREVMKQKLCEESVCPTRIPVAARDERGFDILLGLDVNKKVKKRIQLSPKKIKGYEVTSKVDLSELTSNVFPEGLPPSYVFVSTQRFKVKKIWDLWRILTIDGRPQIAVTLNGVDKILLFTTTSVINGSQVVTFANPQVKTLFDEGWHQIRLLVTEQDVTLYIDDQQIENKPLHPVLGILINGQTQIGKYSGKEETVQFDVQKLRIYCDPEQNNRETACEIPGFCLNGPSDVGSTPAPCICPPGKPGLQGPKGDPGLPGNPGYPGQPGQDGKPGYQGIAGTPGVPGSPGIQGARGLPGYKGEPGRDGDKGDRGLPGFPGLHGMPGSKGEMGAKGDKGSPGFYGKKGAKGEKGNAGFPGLPGPAGEPGRHGKDGLMGSPGFKGEAGSPGAPGQDGTRGEPGIPGFPGNRGLMGQKGEIGPPGQQGKKGAPGMPGLMGSNGSPGQPGTPGSKGSKGEPGIQGMPGASGLKGEPGATGSPGEPGYMGLPGIQGKKGDKGNQGEKGIQGQKGENGRQGIPGQQGIQGHHGAKGERGEKGEPGVRGAIGSKGESGVDGLMGPAGPKGQPGDPGPQGPPGLDGKPGREFSEQFIRQVCTDVIRAQLPVLLQSGRIRNCDHCLSQHGSPGIPGPPGPIGPEGPRGLPGLPGRDGVPGLVGVPGRPGVRGLKGLPGRNGEKGSQGFGYPGEQGPPGPPGPEGPPGISKEGPPGDPGLPGKDGDHGKPGIQGQPGPPGICDPSLCFSVIARRDPFRKGPNY

SEQ ID NO: 18815 - protein, 168 aa, Homo sapiens
MLPAALLRRPGLGRLVRHARAYAEAAAAPAAASGPNQMSFTFASPTQVFFNGANVRQVDVPTLTGAFGILAAHVPTLQVLRPGLVVVHAEDGTTSKYFVSSGSIAVNADSSVQLLAEEAVTLDMLDLGAAKANLEKAQAELVGTADEATRAEIQIRIEANEALVKALE

SEQ ID NO: 18816 - protein, 361 aa, Homo sapiens
MESIFHEKQEGSLCAQHCLNNLLQGEYFSPVELSSIAHQLDEEERMRMAEGGVTSEDYRTFLQQPSGNMDDSGFFSIQVISNALKVWGLELILFNSPEYQRLRIDPINERSFICNYKEHWFTVRKLGKQWFNLNSLLTGPELISDTYLALFLAQLQQEGYSIFVVKGDLPDCEADQLLQMIRVQQMHRPKLIGEELAQLKEQRVHKTDLERVLEANDGSGMLDEDEEDLQRALALSRQEIDMEDEEADLRRAIQLSMQGSSRNISQDMTQTSGTNLTSEELRKRREAYFEKQQQKQQQQQQQQQQGDLSGQSSHPCERPATSSGALGSDLGDAMSEEDMLQAAVTMSLETVRNDLKTEGKK

SEQ ID NO: 18817 - protein, 364 aa, Homo sapiens
MESIFHEKQEGSLCAQHCLNNLLQGEYFSPVELSSIAHQLDEEERMRMAEGGVTSEDYRTFLQQPSGNMDDSGFFSIQVISNALKVWGLELILFNSPEYQRLRIDPINERSFICNYKEHWFTVRKLGKQWFNLNSLLTGPELISDTYLALFLAQLQQEGYSIFVVKGDLPDCEADQLLQMIRVQQMHRPKLIGEELAQLKEQRVHKTDLERVLEANDGSGMLDEDEEDLQRALALSRQEIDMEDEEADLRRAIQLSMQGSSRNISQDMTQTSGTNLTSEELRKRREAYFEKQQQKQQQQQQQQQQGDLSGQSSHPCERPATSSGALGSDLGKACSPFIMFATFTLYLTYELHVIFALHYSSFPL

SEQ ID NO: 18818 - protein, 306 aa, Homo sapiens
MESIFHEKQPSGNMDDSGFFSIQVISNALKVWGLELILFNSPEYQRLRIDPINERSFICNYKEHWFTVRKLGKQWFNLNSLLTGPELISDTYLALFLAQLQQEGYSIFVVKGDLPDCEADQLLQMIRVQQMHRPKLIGEELAQLKEQRVHKTDLERVLEANDGSGMLDEDEEDLQRALALSRQEIDMEDEEADLRRAIQLSMQGSSRNISQDMTQTSGTNLTSEELRKRREAYFEKQQQKQQQQQQQQQQGDLSGQSSHPCERPATSSGALGSDLGDAMSEEDMLQAAVTMSLETVRNDLKTEGKK

SEQ ID NO: 18819 - protein, 346 aa, Homo sapiens
MESIFHEKQEGSLCAQHCLNNLLQGEYFSPVELSSIAHQLDEEERMRMAEGGVTSEDYRTFLQVISNALKVWGLELILFNSPEYQRLRIDPINERSFICNYKEHWFTVRKLGKQWFNLNSLLTGPELISDTYLALFLAQLQQEGYSIFVVKGDLPDCEADQLLQMIRVQQMHRPKLIGEELAQLKEQRVHKTDLERVLEANDGSGMLDEDEEDLQRALALSRQEIDMEDEEADLRRAIQLSMQGSSRNISQDMTQTSGTNLTSEELRKRREAYFEKQQQKQQQQQQQQQQGDLSGQSSHPCERPATSSGALGSDLGDAMSEEDMLQAAVTMSLETVRNDLKTEGKK

SEQ ID NO: 18820 - protein, 182 aa, Homo sapiens
MIRVQQMHRPKLIGEELAQLKEQRVHKTDLERVLEANDGSGMLDEDEEDLQRALALSRQEIDMEDEEADLRRAIQLSMQGSSRNISQDMTQTSGTNLTSEELRKRREAYFEKQQQKQQQQQQQQQQGDLSGQSSHPCERPATSSGALGSDLGDAMSEEDMLQAAVTMSLETVRNDLKTEGKK

SEQ ID NO: 18821 - protein, 118 aa, Homo sapiens
MAAPPEPGEPEERKSLKLLGFLDVENTPCARHSILYGSLGSVVAGFGHFLFTSRIRRSCDVGVGGFILVTLGCWFHCRYNYAKQRIQERIAREEIKKKILYEGTHLDPERKHNGSSSN

SEQ ID NO: 18822 - protein, 130 aa, Homo sapiens
MAAPPEPGEPEERKASCTSLHLSYWKSLKLLGFLDVENTPCARHSILYGSLGSVVAGFGHFLFTSRIRRSCDVGVGGFILVTLGCWFHCRYNYAKQRIQERIAREEIKKKILYEGTHLDPERKHNGSSSN

SEQ ID NO: 18823 - protein, 892 aa, Homo sapiens
MSERAADDVRGEPRRAAAAAGGAAAAAARQQQQQQQQQQPPPPQPQRQQHPPPPPRRTRPEDGGPGAASTSAAAMATVGERRPLPSPEVMLGQSWNLWVEASKLPGKDGTELDESFKEFGKNREVMGLCREDMPIFGFCPAHDDFYLVVCNDCNQVVKPQAFQSHYERRHSSSSKPPLAVPPTSVFSFFPSLSKSKGGSASGSNRSSSGGVLSASSSSSKLLKSPKEKLQLRGNTRPMHPIQQSRVPHGRIMTPSVKVEKIHPKMDGTLLKSAVGPTCPATVSSLVKPGLNCPSIPKPTLPSPGQILNGKGLPAPPTLEKKPEDNSNNRKFLNKRLSEREFDPDIHCGVIDLDTKKPCTRSLTCKTHSLTQRRAVQGRRKRFDVLLAEHKNKTREKELIRHPDSQQPPQPLRDPHPAPPRTSQEPHQNPHGVIPSESKPFVASKPKPHTPSLPRPPGCPAQQGGSAPIDPPPVHESPHPPLPATEPASRLSSEEGEGDDKEESVEKLDCHYSGHHPQPASFCTFGSRQIGRGYYVFDSRWNRLRCALNLMVEKHLNAQLWKKIPPVPSTTSPISTRIPHRTNSVPTSQCGVSYLAAATVSTSPVLLSSTCISPNSKSVPAHGTTLNAQPAASGAMDPVCSMQSRQVSSSSSSPSTPSGLSSVPSSPMSRKPQKLKSSKSLRPKESSGNSTNCQNASSSTSGGSGKKRKNSSPLLVHSSSSSSSSSSSSHSMESFRKNCVAHSGPPYPSTVTSSHSIGLNCVTNKANAVNVRHDQSGRGPPTGSPAESIKRMSVMVNSSDSTLSLGPFIHQSNELPVNSHGSFSHSHTPLDKLIGKKRKCSPSSSSINNSSSKPTKVAKVPAVNNVHMKHTGTIPGAQGLMNSSLLHQPKARP

SEQ ID NO: 18824 - protein, 945 aa, Homo sapiens
MSERAADDVRGEPRRAAAAAGGAAAAAARQQQQQQQQQQPPPPQPQRQQHPPPPPRRTRPEDGGPGAASTSAAAMATVGERRPLPSPEVMLGQSWNLWVEASKLPGKDGTELDESFKEFGKNREVMGLCREDMPIFGFCPAHDDFYLVVCNDCNQVVKPQAFQSHYERRHSSSSKPPLAVPPTSVFSFFPSLSKSKGGSASGSNRSSSGGVLSASSSSSKLLKSPKEKLQLRGNTRPMHPIQQSRVPHGRIMTPSVKVEKIHPKMDGTLLKSAVGPTCPATVSSLVKPGLNCPSIPKPTLPSPGQILNGKGLPAPPTLEKKPEDNSNNRKFLNKRLSEREFDPDIHCGVIDLDTKKPCTRSLTCKTHSLTQRRAVQGRRKRFDVLLAEHKNKTREKELIRHPDSQQPPQPLRDPHPAPPRTSQEPHQNPHGVIPSESKPFVASKPKPHTPSLPRPPGCPAQQGGSAPIDPPPVHESPHPPLPATEPASRLSSEEGEGDDKEESVEKLDCHYSGHHPQPASFCTFGSRQIGRGYYVFDSRWNRLRCALNLMVEKHLNAQLWKKIPPVPSTTSPISTRIPHRTNSVPTSQCGVSYLAAATVSTSPVLLSSTCISPNSKSVPAHGTTLNAQPAASGAMDPVCSMQSRQVSSSSSSPSTPSGLSSVPSSPMSRKPQKLKSSKSLRPKESSGNSTNCQNASSSTSGGSGKKRKNSSPLLVHSSSSSSSSSSSSHSMESFRKNCVAHSGPPYPSTVTSSHSIGLNCVTNKANAVNVRHDQSGRGPPTGSPAESIKRMSVMVNSSDSTLSLGPFIHQSNELPVNSHGSFSHSHTPLDKLIGKKRKCSPSSSSINNSSSKPTKVAKVPAVNNVHMKHTGTIPGAQGLMNSSLLHQDISSPCLRTGISATSPQSPDLKSKGTSLTAENSTGRNNADTFEDKLHLHSALWTPRCL

SEQ ID NO: 18825 - protein, 747 aa, Homo sapiens
MEGSKTPLQSSPSAQELKAPLERRHSSSSKPPLAVPPTSVFSFFPSLSKSKGGSASGSNRSSSGGVLSASSSSSKLLKSPKEKLQLRGNTRPMHPIQQSRVPHGRIMTPSVKVEKIHPKMDGTLLKSAVGPTCPATVSSLVKPGLNCPSIPKPTLPSPGQILNGKGLPAPPTLEKKPEDNSNNRKFLNKRLSEREFDPDIHCGVIDLDTKKPCTRSLTCKTHSLTQRRAVQGRRKRFDVLLAEHKNKTREKELIRHPDSQQPPQPLRDPHPAPPRTSQEPHQNPHGVIPSESKPFVASKPKPHTPSLPRPPGCPAQQGGSAPIDPPPVHESPHPPLPATEPASRLSSEEGEGDDKEESVEKLDCHYSGHHPQPASFCTFGSRQIGRGYYVFDSRWNRLRCALNLMVEKHLNAQLWKKIPPVPSTTSPISTRIPHRTNSVPTSQCGVSYLAAATVSTSPVLLSSTCISPNSKSVPAHGTTLNAQPAASGAMDPVCSMQSRQVSSSSSSPSTPSGLSSVPSSPMSRKPQKLKSSKSLRPKESSGNSTNCQNASSSTSGGSGKKRKNSSPLLVHSSSSSSSSSSSSHSMESFRKNCVAHSGPPYPSTVTSSHSIGLNCVTNKANAVNVRHDQSGRGPPTGSPAESIKRMSVMVNSSDSTLSLGPFIHQSNELPVNSHGSFSHSHTPLDKLIGKKRKCSPSSSSINNSSSKPTKVAKVPAVNNVHMKHTGTIPGAQGLMNSSLLHQPKARP

SEQ ID NO: 18826 - protein, 258 aa, Homo sapiens
MARPPVPGSVVVPNWHESAEGKEYLACILRKNRRRVFGLLERPVLLPPVSIDTASYKIFVSGKSGVGKTALVAKLAGLEVPVVHHETTGIQTTVVFWPAKLQASSRVVMFRFEFWDCGESALKKFDHMLLACMENTDAFLFLFSFTDRASFEDLPGQLARIAGEAPGVVRMVIGSKFDQYMHTDVPERDLTAFRQAWELPLLRVKSVPGRRLADGRTLDGRAGLADVAHILNGLAEQLWHQDQVAAGLLPNPPESAPE

SEQ ID NO: 18827 - protein, 158 aa, Homo sapiens
MAFMVKTMVGGQLKNLTGSLGGGEDKGDGDKSAAEAQGMSREEYEEYQKQLVEEKMERDAQFTQRKAERATLRSHFRDKYRLPKNETDESQIQMAGGDVELPRELAKMIEEDTEEEEEKASVLGQLASLPGLNLGSLKDKAQATLGDLKQSAEKCHVM

SEQ ID NO: 18828 - protein, 291 aa, Homo sapiens
MAALQEKKTCGQRMEEFQRYCWNPDTGQMLGRTLSRWVWISLYYVAFYVVMTGLFALCLYVLMQTVDPYTPDYQDQLRSPGVTLRPDVYGEKGLEIVYNVSDNRTWADLTQTLHAFLAGYSPAAQEDSINCTSEQYFFQESFRAPNHTKFSCKFTADMLQNCSGLADPNFGFEEGKPCFIIKMNRIVKFLPSNGSAPRVDCAFLDQPRELGQPLQVKYYPPNGTFSLHYFPYYGKKAQPHYSNPLVAAKLLNIPRNAEVAIVCKVMAEHVTFNNPHDPYEGKVEFKLKIEK

SEQ ID NO: 18829 - protein, 103 aa, Homo sapiens
MAQFVRNLVEKTPALVNAAVTYSKPRLATFWYYAKVELVPPTPAEIPRAIQSLKKIVNSAQTGSFKQLTVKEAVLNGLVATEVLMWFYVGEIIGKRGIIGYDV

SEQ ID NO: 18830 - protein, 612 aa, Homo sapiens
MATAATIPSVATATAAALGEVEDEGLLASLFRDRFPEAQWRERPDVGRYLRELSGSGLERLRREPERLAEERAQLLQQTRDLAFANYKTFIRGAECTERIHRLFGDVEASLGRLLDRLPSFQQSCRNFVKEAEEISSNRRMNSLTLNRHTEILEILEIPQLMDTCVRNSYYEEALELAAYVRRLERKYSSIPVIQGIVNEVRQSMQLMLSQLIQQLRTNIQLPACLRVIGYLRRMDVFTEAELRVKFLQARDAWLRSILTAIPNDDPYFHITKTIEASRVHLFDIITQYRAIFSDEDPLLPPAMGEHTVNESAIFHGWVLQKVSQFLQVLETDLYRGIGGHLDSLLGQCMYFGLSFSRVGADFRGQLAPVFQRVAISTFQKAIQETVEKFQEEMNSYMLISAPAILGTSNMPAAVPATQPGTLQPPMVLLDFPPLACFLNNILVAFNDLRLCCPVALAQDVTGALEDALAKVTKIILAFHRAEEAAFSSGEQELFVQFCTVFLEDLVPYLNRCLQVLFPPAQIAQTLGIPPTQLSKYGNLGHVNIGAIQEPLAFILPKRETLFTLDDQALGPELTAPAPEPPAEEPRLEPAGPACPEGGRAETQAEPPSVGP

SEQ ID NO: 18831 - protein, 344 aa, Homo sapiens
MAQKENSYPWPYGRQTAPSGLSTLPQRVLRKEPVTPSALVLMSRSNVQPTAAPGQKVMENSSGTPDILTRHFTIDDFEIGRPLGKGKFGNVYLAREKKSHFIVALKVLFKSQIEKEGVEHQLRREIEIQAHLHHPNILRLYNYFYDRRRIYLILEYAPRGELYKELQKSCTFDEQRTATIMEELADALMYCHGKKVIHRDIKPENLLLGLKGELKIADFGWSVHAPSLRRKTMCGTLDYLPPEMIEGRMHNEKVDLWCIGVLCYELLVGNPPFESASHNETYRRIVKVDLKFPASVPMGAQDLISKLLRHNPSERLPLAQVSAHPWVRANSRRVLPPSALQSVA

SEQ ID NO: 18832 - protein, 312 aa, Homo sapiens
MAQKENSYPWPYGRQTAPSGLSTLPQRVLRKEPVTPSALVLMSRSNVQPTAAPGQKVMENSSGTPDILTRHFTIDDFEIGRPLGKALLCLWPEASSVSSPSHPNILRLYNYFYDRRRIYLILEYAPRGELYKELQKSCTFDEQRTATIMEELADALMYCHGKKVIHRDIKPENLLLGLKGELKIADFGWSVHAPSLRRKTMCGTLDYLPPEMIEGRMHNEKVDLWCIGVLCYELLVGNPPFESASHNETYRRIVKVDLKFPASVPMGAQDLISKLLRHNPSERLPLAQVSAHPWVRANSRRVLPPSALQSVA

SEQ ID NO: 18833 - protein, 142 aa, Homo sapiens
MAQKENSYPWPYGRQTAPSGLSTLPQRVLRKEPVTPSALVLMSRSNVQPTAAPGQKVMENSSGTPDILTRRHFTIDDFEIGRPLGKGKFGNVYLAREKKSHFIVALKVLFKSQIEKEGVEHQLRREIEIQAHLQSWRSWQML

SEQ ID NO: 18834 - protein, 303 aa, Homo sapiens
MSRSNVQPTAAPGQKVMENSSGTPDILTRHFTIDDFEIGRPLGKGKFGNVYLAREKKSHFIVALKVLFKSQIEKEGVEHQLRREIEIQAHLHHPNILRLYNYFYDRRRIYLILEYAPRGELYKELQKSCTFDEQRTATIMEELADALMYCHGKKVIHRDIKPENLLLGLKGELKIADFGWSVHAPSLRRKTMCGTLDYLPPEMIEGRMHNEKVDLWCIGVLCYELLVGNPPFESASHNETYRRIVKVDLKFPASVPMGAQDLISKLLRHNPSERLPLAQVSAHPWVRANSRRVLPPSALQSVA

SEQ ID NO: 18835 - protein, 345 aa, Homo sapiens
MAQKENSYPWPYGRQTAPSGLSTLPQRVLRKEPVTPSALVLMSRSNVQPTAAPGQKVMENSSGTPDILTRRHFTIDDFEIGRPLGKGKFGNVYLAREKKSHFIVALKVLFKSQIEKEGVEHQLRREIEIQAHLHHPNILRLYNYFYDRRRIYLILEYAPRGELYKELQKSCTFDEQRTATIMEELADALMYCHGKKVIHRDIKPENLLLGLKGELKIADFGWSVHAPSLRRKTMCGTLDYLPPEMIEGRMHNEKVDLWCIGVLCYELLVGNPPFESASHNETYRRIVKVDLKFPASVPMGAQDLISKLLRHNPSERLPLAQVSAHPWVRANSRRVLPPSALQSVA

SEQ ID NO: 18836 - protein, 224 aa, Homo sapiens
MSAVGAATPYLHHPGDSHSGRVSFLGAQLPPEVAAMARLLGDLDRSTFRKLLKFVVSSLQGEDCREAVQRLGVSANLPEEQLGALLAGMHTLLQQALRLPPTSLKPDTFRDQLQELCIPQDLVGDLASVVFGSQRPLLDSVAQQQGAWLPHVADFRWRVDVAISTSALARSLQPSVLMQLKLSDGSAYRFEVPTAKFQELRYSVALVLKEMADLEKRCERRLQD

SEQ ID NO: 18837 - protein, 129 aa, Homo sapiens
MRLKVGFQGGGCFRKDALCLEGGVSARWARAPHSAPLRPPRELHAAPPPATPTQTVVRPAGFPRRTRLMVRSAPPTQRPPTGSGCVSGLWRKGLGLRPQTLLRVGSVVLSSAPALRPRLGPCLRPPPSD

SEQ ID NO: 18838 - protein, 924 aa, Homo sapiens
MVSRMGWGGRRRRLGRWGDLGPGSVPLLPMPLPPPPPPSCRGPGGGRISIFSLSPAPHTRSSPSSFSPPTAGPPCSVLQGTGASQSCHSALPIPATPPTQAQPAMTPASASPSWGSHSTPPLAPATPTPSQQCPQDSPGLRVGPLIPEQDYERLEDCDPEGSQDSPIHGEEQQPLLHVPEGLRGSWHHIQNLDSFFTKIYSYHQRNGFACILLEDVFQLGQFIFIVTFTTFLLRCVDYNVLFANQPSNHTRPGPFHSKVTLSDAILPSAQCAERIRSSPLLVLLLVLAAGFWLVQLLRSVCNLFSYWDIQVFYREALHIPPEELSSVPWAEVQSRLLALQRSGGLCVQPRPLTELDIHHRILRYTNYQVALANKGLLPARCPLPWGGSAAFLSRGLALNVDLLLFRGPFSLFRGGWELPHAYKRSDQRGALAARWGRTVLLLAALNLALSPLVLAWQVLHVFYSHVELLRREPGALGARGWSRLARLQLRHFNELPHELRARLARAYRPAAAFLRTAAPPAPLRTLLARQLVFFAGALFAALLVLTVYDEDVLAVEHVLTAMTALGVTATVARSFIPEEQCQGRAPQLLLQTALAHMHYLPEEPGPGGRDRAYRQMAQLLQYRAVSLLEELLSPLLTPLFLLFWFRPRALEIIDFFHHFTVDVAGVGDICSFALMDVKRHGHPQWLSAGQTEASLSQRAEDGKTELSLMRFSLAHPLWRPPGHSSKFLGHLWGRVQQDAAAWGATSARGPSTPGVLSNCTSPLPEAFLANLFVHPLLPPRDLSPTAPCPAAATASLLASISRIAQDPSSVSPGGTGGQKLAQLPELASAEMSLHVIYLHQLHQQQQQQEPWGEAAASILSRPCSSPSQPPSPDEEKPSWSSDGSSPASSPRQQWGTQKARNLFPGGFQVTTDTQKEPDRASCTD

SEQ ID NO: 18839 - protein, 410 aa, Homo sapiens
MPSYPQPSVLRGSAPARCWSSSWSWLPASGWSNCFAQSATSSATGTSRCFTGRPCTSPRSFIPEEQCQGRAPQLLLQTALAHMHYLPEEPGPGGRDRAYRQMAQLLQYRAVSLLEELLSPLLTPLFLLFWFRPRALEIIDFFHHFTVDVAGVGDICSFALMDVKRHGHPQWLSAGQTEASLSQRAEDGKTELSLMRFSLAHPLWRPPGHSSKFLGHLWGRVQQDAAAWGATSARGPSTPGVLSNCTSPLPEAFLANLFVHPLLPPRDLSPTAPCPAAATASLLASISRIAQDPSSVSPGGTGGQKLAQLPELASAEMSLHVIYLHQLHQQQQQQEPWGEAAASILSRPCSSPSQPPSPDEEKPSWSSDGSSPASSPRQQWGTQKARNLFPGGFQVTTDTQKEPDRASCTD

SEQ ID NO: 18840 - protein, 340 aa, Homo sapiens
MVSRMGWGGRRRRLGRWGDLGPGSVPLLPMPLPPPPPPSCRGPGGGRISIFSLSPAPHTRSSPSSFSPPTAGPPCSVLQGTGASQSCHSALPIPATPPTQAQPAMTPASASPSWGSHSTPPLAPATPTPSQQCPQDSPGLRVGPLIPEQDYERLEDCDPEGSQDSPIHGEEQQPLLHVPEGLRGSWHHIQNLDSFFTKIYSYHQRNGFACILLEDVFQLGQFIFIVTFTTFLLRCVDYNVLFANQPSNHTRPGPFHSKVTLSDAILPSAQCAERIRSSPLLVLLLVLAAGFWLVQLLRSVCNLFSYWDIQVFYREALHIPPGKGREDTGMYWRGQPGGLD

SEQ ID NO: 18841 - protein, 423 aa, Homo sapiens
MAMVVSSWRDPQDDVAGGNPGGPNPAAQAARGGGGGAGEQQQQAGSGAPHTPQTPGQPGAPATPGTAGDKGQGPPGSGQSQQHIECVVCGDKSSGKHYGQFTCEGCKSFFKRSVRRNLTYTCRANRNCPIDQHHRNQCQYCRLKKCLKVGMRREAVQRGRMPPTQPNPGQYALTNGDPLNGHCYLSGYISLLLRAEPYPTSRYGSQCMQPNNIMGIENICELAARLLFSAVEWARNIPFFPDLQITDQVSLLRLTWSELFVLNAAQCSMPLHVAPLLAAAGLHASPMSADRVVAFMDHIRIFQEQVEKLKALHVDSAEYSCLKAIVLFTSDACGLSDAAHIESLQEKSQCALEEYVRSQYPNQPSRFGKLLLRLPSLRTVSSSVIEQLFFVRLVGKTPIETLIRDMLLSGSSFNWPYMSIQCS

SEQ ID NO: 18842 - protein, 186 aa, Homo sapiens
MEQPKDGAGPEGNNLSLPSSGTEPWPPAPLPAPPPLLLNSTDPTHLGLPESVASVTVPIRLDTLSCLLHSALLGAYTFQQALPSCPCCSQAGHSQPGAVRRPPRGRGGWEVRHRPGWGRGLHRRGLGRAEQPERGRAGGPGAGPRTPPMTLPSPPTLPAQDGKKEARGPEPPLETPLAAEDWETEY

SEQ ID NO: 18843 - protein, 109 aa, Homo sapiens
MAAGVVFLALSAQLLQARLMKEESPVVSWRLEPEDGTALDVHFVSTLEPLSNAVKRNVPRCIIILVLQEPTPFRISVTSSCFVQNTLTKLLKDRRKMQTVQCATAQETS

SEQ ID NO: 18844 - protein, 204 aa, Homo sapiens
MATASPSVFLLMVNGQVESAQFPEYDDLYCKYCFVYGQDWAPTAGLEEGISQITSKSQDVRQALVWNFPIDVTFKSTNPYGWPQIVLSVYGPDVFGNDVVRGYGAVHVPFSPGRHKRTIPMFVPESTSKLQKFTSWFMGRRPEYTDPKVVAQGEGREVTRVRSQGFVTLLFNVVTKDMRKLGYDTGPSDTQGVLGPSPPQSFPQ

SEQ ID NO: 18845 - protein, 153 aa, Homo sapiens
MATASPSVFLLMVNGQVESAQFPEYDDLYCKYCFVYGQDWAPTAGLEEGISQITSKSQDVRQALVWNFPIDVTFKSTNPYGWPQIVLSVYGPDVFGNDVVRGYGAVHVPFSPGRHKRTIPMFVPESTSKLQKFTSLCLVASSDLQAAPPTEDK

SEQ ID NO: 18846 - protein, 353 aa, Homo sapiens
MAATKRKRRGGFAVQAKKPKRNEIDAEPPAKRHATAEEVEEEERDRIPGPVCKGKWKNKERILIFSSRGINFRTRHLMQDLRMLMPHSKADTKMDRKDKLFVINEVCEMKNCNKCIYFEAKKKQDLYMWLSNSPHGPSAKFLVQNIHTLAELKMTGNCLKGSRPLLSFDPAFDELPHYALLKELLIQIFSTPRYHPKSQPFVDHVFTFTILDNRIWFRNFQIIEEDAALVEIGPRFVLNLIKIFQGSFGGPTLYENPHYQSPNMHRRVIRSITAAKYREKQQVKDVQKLRKKEPKTLLPHDPTADVFVTPAEEKPIEIQWVKPEPKVDLKARKKRIYKRQRKMKQRMDSGKTK

SEQ ID NO: 18847 - protein, 1802 aa, Homo sapiens
MAAAPTQIEAELYYLIARFLQSGPCNKSAQVLVQELEEHQLIPRRLDWEGKEHRRSFEDLVAANAHIPPDYLLKICERIGPLLDKEIPQSVPGVQTLLGVGRQSLLRDAKDCKSTLWNGSAFAALHRGRPPELPVNYVKPPNVVNITSARQLTGCSRFGHIFPSSAYQHIKMHKRILGHLSSVYCVAFDRSGRRIFTGSDDCLVKIWATDDGRLLATLRGHSAEISDMAVNYENTLIAAGSCDKVVRVWCLRTCAPVAVLQGHSASITSIQFCPSTKGTNRYLTSTGADGTICFWQWHVKTMKFRDRPVKFTERSRPGVQISCSSFSSGGMFITTGSTDHVIRIYYLGSEVPEKIAELESHTDKVVAVQFCNNGDSLRFVSGSRDGTARIWQYQQQEWKSIVLDMATKMTGNNLPSGEDKITKLKVTMVAWDRYDTTVITAVNNFLLKVWNSITGQLLHTLSGHDDEVFVLEAHPFDQRIILSAGHDGNIFIWDLDRGTKIRNYFNMIEGQGHGAVFDCKFSPDGNHFACTDSHGHLLLFGFGCSKYYEKIPDQMFFHTDYRPLIRDANNYVLDEQTQQAPHLMPPPFLVDVDGNPHPTKFQRLVPGRENCKDEQLIPQLGYVANGDGEVVEQVIGQQTNDQDESILDGIIRELQREQDLRLINEGDVPHLPVNRAYSVNGALRSPNMDISSSPNIRLRRHSSQIEGVRQMHNNAPRSQMATERDLMAWSRRVVVNELNNGVSRVQEECRTAKGDIEISLYTVEKKKKPSYTTQRNDYEPSCGRSLRRTQRKRQHTYQTRSNIEHNSQASCQNSGVQEDSDSSSEEDETVGTSDASVEDPVVEWQSESSSSDSSSEYSDWTADAGINLQPPKRQTRQTTRKICSSSDEENLKSLEERQKKPKQTRKKKGGLVSIAGEPNEEWFAPQWILDTIPRRSPFVPQMGDELIYFRQGHEAYVRAVRKSKIYSVNLQKQPWNKMDLREQEFVKIVGIKYEVGPPTLCCLKLAFLDPISGKMTGESFSIKYHDMPDVIDFLVLHQFYNEAKERNWQIGDRFRSIIDDAWWFGTVESQQPFQPEYPDSSFQCYSVHWDNNEREKMSPWDMEPIPEGTAFPDEVGAGVPVSQEELTALLYKPQEGEWGAHSRDEECERVIQGINHLLSLDFASPFAVPVDLSAYPLYCTVVAYPTDLNTIRRRLENRFYRRISALMWEVRYIEHNARTFNEPDSPIVKAAKIVTDVLLRFIGDQSCTDILDTYNKIKAEERNSTDAEEDTEIVDLDSDGPGTSSGRKVKCRGRRQSLKCNPDAWKKQCKELLSLIYEREDSEPFRQPADLLSYPGHQEQEGESSESVVPERQQDSSLSEDYQDVIDTPVDFSTVKETLEAGNYGSPLEFYKDVRQIFNNSKAYTSNKKSRIYSMMLRLSALFESHIKNIISEYKSAIQSQKRRRPRYRKRLRSSSSSLSSSGAPSPKGKQKQMKLQPKNDQNTSVSHARTSSPFSSPVSDAAEGLSLYLLDDEPDGPFSSSSFGGYSRSGNSHDPGKAKSFRNRVLPVKQDHSLDGPLTNGDGREPRTGIKRKLLSASEEDENMGGEDKEKKETKEKSHLSTSESGELGSSLSSESTCGSDSDSESTSRTDQDYVDGDHDYSKFIQTRPKRKLRKQHGNGKRNWKTRGTGGRGRWGRWGRWSRGGRGRGGRGRGSRGRGGGGTRGRGRGRGGRGASRGATRAKRARIADDEFDTMFSGRFSRLPRIKTRNQGRRTVLYNDDSDNDNFVSTEDPLNLGTSRSGRVRKMTEKARVSHLMGWNY

SEQ ID NO: 18848 - protein, 1631 aa, Homo sapiens
MHKRILGHLSSVYCVAFDRSGRRIFTGSDDCLVKIWATDDGRLLATLRGHSAEISDMAVNYENTLIAAGSCDKVVRVWCLRTCAPVAVLQGHSASITSIQFCPSTKGTNRYLTSTGADGTICFWQWHVKTMKFRDRPVKFTERSRPGVQISCSSFSSGGMFITTGSTDHVIRIYYLGSEVPEKIAELESHTDKVVAVQFCNNGDSLRFVSGSRDGTARIWQYQQQEWKSIVLDMATKMTGNNLPSGEDKITKLKVTMVAWDRYDTTVITAVNNFLLKVWNSITGQLLHTLSGHDDEVFVLEAHPFDQRIILSAGHDGNIFIWDLDRGTKIRNYFNMIEGQGHGAVFDCKFSPDGNHFACTDSHGHLLLFGFGCSKYYEKIPDQMFFHTDYRPLIRDANNYVLDEQTQQAPHLMPPPFLVDVDGNPHPTKFQRLVPGRENCKDEQLIPQLGYVANGDGEVVEQVIGQQTNDQDESILDGIIRELQREQDLRLINEGDVPHLPVNRAYSVNGALRSPNMDISSSPNIRLRRHSSQIEGVRQMHNNAPRSQMATERDLMAWSRRVVVNELNNGVSRVQEECRTAKGDIEISLYTVEKKKKPSYTTQRNDYEPSCGRSLRRTQRKRQHTYQTRSNIEHNSQASCQNSGVQEDSDSSSEEDETVGTSDASVEDPVVEWQSESSSSDSSSEYSDWTADAGINLQPPKRQTRQTTRKICSSSDEENLKSLEERQKKPKQTRKKKGGLVSIAGEPNEEWFAPQWILDTIPRRSPFVPQMGDELIYFRQGHEAYVRAVRKSKIYSVNLQKQPWNKMDLREQEFVKIVGIKYEVGPPTLCCLKLAFLDPISGKMTGESFSIKYHDMPDVIDFLVLHQFYNEAKERNWQIGDRFRSIIDDAWWFGTVESQQPFQPEYPDSSFQCYSVHWDNNEREKMSPWDMEPIPEGTAFPDEVGAGVPVSQEELTALLYKPQEGEWGAHSRDEECERVIQGINHLLSLDFASPFAVPVDLSAYPLYCTVVAYPTDLNTIRRRLENRFYRRISALMWEVRYIEHNARTFNEPDSPIVKAAKIVTDVLLRFIGDQSCTDILDTYNKIKAEERNSTDAEEDTEIVDLDSDGPGTSSGRKVKCRGRRQSLKCNPDAWKKQCKELLSLIYEREDSEPFRQPADLLSYPGHQEQEGESSESVVPERQQDSSLSEDYQDVIDTPVDFSTVKETLEAGNYGSPLEFYKDVRQIFNNSKAYTSNKKSRIYSMMLRLSALFESHIKNIISEYKSAIQSQKRRRPRYRKRLRSSSSSLSSSGAPSPKGKQKQMKLQPKNDQNTSVSHARTSSPFSSPVSDAAEGLSLYLLDDEPDGPFSSSSFGGYSRSGNSHDPGKAKSFRNRVLPVKQDHSLDGPLTNGDGREPRTGIKRKLLSASEEDENMGGEDKEKKETKEKSHLSTSESGELGSSLSSESTCGSDSDSESTSRTDQDYVDGDHDYSKFIQTRPKRKLRKQHGNGKRNWKTRGTGGRGRWGRWGRWSRGGRGRGGRGRGSRGRGGGGTRGRGRGRGGRGASRGATRAKRARIADDEFDTMFSGRFSRLPRIKTRNQGRRTVLYNDDSDNDNFVSTEDPLNLGTSRSGRVRKMTEKARVSHLMGWNY

SEQ ID NO: 18849 - protein, 1398 aa, Homo sapiens
MATKMTGNNLPSGEDKITKLKVTMVAWDRYDTTVITAVNNFLLKVWNSITGQLLHTLSGHDDEVFVLEAHPFDQRIILSAGHDGNIFIWDLDRGTKIRNYFNMIEGQGHGAVFDCKFSPDGNHFACTDSHGHLLLFGFGCSKYYEKIPDQMFFHTDYRPLIRDANNYVLDEQTQQAPHLMPPPFLVDVDGNPHPTKFQRLVPGRENCKDEQLIPQLGYVANGDGEVVEQVIGQQTNDQDESILDGIIRELQREQDLRLINEGDVPHLPVNRAYSVNGALRSPNMDISSSPNIRLRRHSSQIEGVRQMHNNAPRSQMATERDLMAWSRRVVVNELNNGVSRVQEECRTAKGDIEISLYTVEKKKKPSYTTQRNDYEPSCGRSLRRTQRKRQHTYQTRSNIEHNSQASCQNSGVQEDSDSSSEEDETVGTSDASVEDPVVEWQSESSSSDSSSEYSDWTADAGINLQPPKRQTRQTTRKICSSSDEENLKSLEERQKKPKQTRKKKGGLVSIAGEPNEEWFAPQWILDTIPRRSPFVPQMGDELIYFRQGHEAYVRAVRKSKIYSVNLQKQPWNKMDLREQEFVKIVGIKYEVGPPTLCCLKLAFLDPISGKMTGESFSIKYHDMPDVIDFLVLHQFYNEAKERNWQIGDRFRSIIDDAWWFGTVESQQPFQPEYPDSSFQCYSVHWDNNEREKMSPWDMEPIPEGTAFPDEVGAGVPVSQEELTALLYKPQEGEWGAHSRDEECERVIQGINHLLSLDFASPFAVPVDLSAYPLYCTVVAYPTDLNTIRRRLENRFYRRISALMWEVRYIEHNARTFNEPDSPIVKAAKIVTDVLLRFIGDQSCTDILDTYNKIKAEERNSTDAEEDTEIVDLDSDGPGTSSGRKVKCRGRRQSLKCNPDAWKKQCKELLSLIYEREDSEPFRQPADLLSYPGHQEQEGESSESVVPERQQDSSLSEDYQDVIDTPVDFSTVKETLEAGNYGSPLEFYKDVRQIFNNSKAYTSNKKSRIYSMMLRLSALFESHIKNIISEYKSAIQSQKRRRPRYRKRLRSSSSSLSSSGAPSPKGKQKQMKLQPKNDQNTSVSHARTSSPFSSPVSDAAEGLSLYLLDDEPDGPFSSSSFGGYSRSGNSHDPGKAKSFRNRVLPVKQDHSLDGPLTNGDGREPRTGIKRKLLSASEEDENMGGEDKEKKETKEKSHLSTSESGELGSSLSSESTCGSDSDSESTSRTDQDYVDGDHDYSKFIQTRPKRKLRKQHGNGKRNWKTRGTGGRGRWGRWGRWSRGGRGRGGRGRGSRGRGGGGTRGRGRGRGGRGASRGATRAKRARIADDEFDTMFSGRFSRLPRIKTRNQGRRTVLYNDDSDNDNFVSTEDPLNLGTSRSGRVRKMTEKARVSHLMGWNY

SEQ ID NO: 18850 - protein, 1472 aa, Homo sapiens
MFITTGSTDHVIRIYYLGSEVPEKIAELESHTDKVVAVQFCNNGDSLRFVSGSRDGTARIWQYQQQEWKSIVLDMATKMTGNNLPSGEDKITKLKVTMVAWDRYDTTVITAVNNFLLKVWNSITGQLLHTLSGHDDEVFVLEAHPFDQRIILSAGHDGNIFIWDLDRGTKIRNYFNMIEGQGHGAVFDCKFSPDGNHFACTDSHGHLLLFGFGCSKYYEKIPDQMFFHTDYRPLIRDANNYVLDEQTQQAPHLMPPPFLVDVDGNPHPTKFQRLVPGRENCKDEQLIPQLGYVANGDGEVVEQVIGQQTNDQDESILDGIIRELQREQDLRLINEGDVPHLPVNRAYSVNGALRSPNMDISSSPNIRLRRHSSQIEGVRQMHNNAPRSQMATERDLMAWSRRVVVNELNNGVSRVQEECRTAKGDIEISLYTVEKKKKPSYTTQRNDYEPSCGRSLRRTQRKRQHTYQTRSNIEHNSQASCQNSGVQEDSDSSSEEDETVGTSDASVEDPVVEWQSESSSSDSSSEYSDWTADAGINLQPPKRQTRQTTRKICSSSDEENLKSLEERQKKPKQTRKKKGGLVSIAGEPNEEWFAPQWILDTIPRRSPFVPQMGDELIYFRQGHEAYVRAVRKSKIYSVNLQKQPWNKMDLREQEFVKIVGIKYEVGPPTLCCLKLAFLDPISGKMTGESFSIKYHDMPDVIDFLVLHQFYNEAKERNWQIGDRFRSIIDDAWWFGTVESQQPFQPEYPDSSFQCYSVHWDNNEREKMSPWDMEPIPEGTAFPDEVGAGVPVSQEELTALLYKPQEGEWGAHSRDEECERVIQGINHLLSLDFASPFAVPVDLSAYPLYCTVVAYPTDLNTIRRRLENRFYRRISALMWEVRYIEHNARTFNEPDSPIVKAAKIVTDVLLRFIGDQSCTDILDTYNKIKAEERNSTDAEEDTEIVDLDSDGPGTSSGRKVKCRGRRQSLKCNPDAWKKQCKELLSLIYEREDSEPFRQPADLLSYPGHQEQEGESSESVVPERQQDSSLSEDYQDVIDTPVDFSTVKETLEAGNYGSPLEFYKDVRQIFNNSKAYTSNKKSRIYSMMLRLSALFESHIKNIISEYKSAIQSQKRRRPRYRKRLRSSSSSLSSSGAPSPKGKQKQMKLQPKNDQNTSVSHARTSSPFSSPVSDAAEGLSLYLLDDEPDGPFSSSSFGGYSRSGNSHDPGKAKSFRNRVLPVKQDHSLDGPLTNGDGREPRTGIKRKLLSASEEDENMGGEDKEKKETKEKSHLSTSESGELGSSLSSESTCGSDSDSESTSRTDQDYVDGDHDYSKFIQTRPKRKLRKQHGNGKRNWKTRGTGGRGRWGRWGRWSRGGRGRGGRGRGSRGRGGGGTRGRGRGRGGRGASRGATRAKRARIADDEFDTMFSGRFSRLPRIKTRNQGRRTVLYNDDSDNDNFVSTEDPLNLGTSRSGRVRKMTEKARVSHLMGWNY

SEQ ID NO: 18851 - protein, 1386 aa, Homo sapiens
MAAAPTQIEAELYYLIARFLQSGPCNKSAQVLVQELEEHQLIPRRLDWEGKEHRRSFEDLVAANAHIPPDYLLKICERIGPLLDKEIPQSVPGVQTLLGVGRQSLLRDAKDCKSTLWNGSAFAALHRGRPPELPVNYVKPPNVVNITSARQLTGCSRFGHIFPSSAYQHIKMHKRILGHLSSVYCVAFDRSGRRIFTGSDDCLVKIWATDDGRLLATLRGHSAEISDMAVNYENTLIAAGSCDKVVRVWCLRTCAPVAVLQGHSASITSIQFCPSTKGTNRYLTSTGADGTICFWQWHVKTMKFRDRPVKFTERSRPGVQISCSSFSSGGMFITTGSTDHVIRIYYLGSEVPEKIAELESHTDKVVAVQFCNNGDSLRFVSGSRDGTARIWQYQQQEWKSIVLDMATKMTGNNLPSGEDKITKLKVTMVAWDRYDTTVITAVNNFLLKVWNSITGQLLHTLSGHDDEVFVLEAHPFDQRIILSAGHDGNIFIWDLDRGTKIRNYFNMIEGQGHGAVFDCKFSPDGNHFACTDSHGHLLLFGFGCSKYYEKIPDQMFFHTDYRPLIRDANNYVLDEQTQQAPHLMPPPFLVDVDGNPHPTKFQRLVPGRENCKDEQLIPQLGYVANGDGEVVEQVIGQQTNDQDESILDGIIRELQREQDLRLINEGDVPHLPVNRAYSVNGALRSPNMDISSSPNIRLRRHSSQIEGVRQMHNNAPRSQMATERDLMAWSRRVVVNELNNGVSRVQEECRTAKGDIEISLYTVEKKKKPSYTTQRNDYEPSCGRSLRRTQRKRQHTYQTRSNIEHNSQASCQNSGVQEDSDSSSEEDETVGTSDASVEDPVVEWQSESSSSDSSSEYSDWTADAGINLQPPKRQTRQTTRKICSSSDEENLKSLEERQKKPKQTRKKKGGLVSIAGEPNEEWFAPQWILDTIPRRSPFVPQMGDELIYFRQGHEAYVRAVRKSKIYSVNLQKQPWNKMDLREQEFVKIVGIKYEVGPPTLCCLKLAFLDPISGKMTGESFSIKYHDMPDVIDFLVLHQFYNEAKERNWQIGDRFRSIIDDAWWFGTVESQQPFQPEYPDSSFQCYSVHWDNNEREKMSPWDMEPIPEGTAFPDEVGAGVPVSQEELTALLYKPQEGEWGAHSRDEECERVIQGINHLLSLDFASPFAVPVDLSAYPLYCTVVAYPTDLNTIRRRLENRFYRRISALMWEVRYIEHNARTFNEPDSPIVKAAKIVTDVLLRFIGDQSCTDILDTYNKIKAEERNSTDAEEDTEIVDLDSDGPGTSSGRKVKCRGRRQSLKCNPDAWKKQCKELLSLIYEREDSEPFRQPADLLSYPGHQEQEGESSESVVPERQQDSSLSEDYQDVIDTPVDFSTVKETLEAGNYDL

SEQ ID NO: 18852 - protein, 4857 aa, Homo sapiens
MVTGGGAAPPGTVTEPLPSVIVLSAGRKMAAAAAAASGPGCSSAAGAGAAGVSEWLVLRDGCMHCDADGLHSLSYHPALNAILAVTSRGTIKVIDGTSGATLQASALSAKPGGQVKCQYISAVDKVIFVDDYAVGCRKDLNGILLLDTALQTPVSKQDDVVQLELPVTEAQQLLSACLEKVDISSTEGYDLFITQLKDGLKNTSHETAANHKVAKWATVTFHLPHHVLKSIASAIVNELKKINQNVAALPVASSVMDRLSYLLPSARPELGVGPGRSVDRSLMYSEANRRETFTSWPHVGYRWAQPDPMAQAGFYHQPASSGDDRAMCFTCSVCLVCWEPTDEPWSEHERHSPNCPFVKGEHTQNVPLSVTLATSPAQFPCTDGTDRISCFGSGSCPHFLAAATKRGKICIWDVSKLMKVHLKFEINAYDPAIVQQLILSGDPSSGVDSRRPTLAWLEDSSSCSDIPKLEGDSDDLLEDSDSEEHSRSDSVTGHTSQKEAMEVSLDITALSILQQPEKLQWEIVANVLEDTVKDLEELGANPCLTNSKSEKTKEKHQEQHNIPFPCLLAGGLLTYKSPATSPISSNSHRSLDGLSRTQGESISEQGSTDNESCTNSELNSPLVRRTLPVLLLYSIKESDEKAGKIFSQMNNIMSKSLHDDGFTVPQIIEMELDSQEQLLLQDPPVTYIQQFADAAANLTSPDSEKWNSVFPKPGTLVQCLRLPKFAEEENLCIDSITPCADGIHLLVGLRTCPVESLSAINQVEALNNLNKLNSALCNRRKGELESNLAVVNGANISVIQHESPADVQTPLIIQPEQRNVSGGYLVLYKMNYATRIVTLEEEPIKIQHIKDPQDTITSLILLPPDILDNREDDCEEPIEDMQLTSKNGFEREKTSDISTLGHLVITTQGGYVKILDLSNFEILAKVEPPKKEGTEEQDTFVSVIYCSGTDRLCACTKGGELHFLQIGGTCDDIDEADILVDGSLSKGIEPSSEGSKPLSNPSSPGISGVDLLVDQPFTLEILTSLVELTRFETLTPRFSATVPPCWVEVQQEQQQRRHPQHLHQQHHGDAAQHTRTWKLQTDSNSWDEHVFELVLPKACMVGHVDFKFVLNSNITNIPQIQVTLLKNKAPGLGKVNALNIEVEQNGKPSLVDLNEEMQHMDVEESQCLRLCPFLEDHKEDILCGPVWLASGLDLSGHAGMLTLTSPKLVKGMAGGKYRSFLIHVKAVNERGTEEICNGGMRPVVRLPSLKHQSNKGYSLASLLAKVAAGKEKSSNVKNENTSGTRKSENLRGCDLLQEVSVTIRRFKKTSISKERVQRCAMLQFSEFHEKLVNTLCRKTDDGQITEHAQSLVLDTLCWLAGVHSNGPGSSKEGNENLLSKTRKFLSDIVRVCFFEAGRSIAHKCARFLALCISNGKCDPCQPAFGPVLLKALLDNMSFLPAATTGGSVYWYFVLLNYVKDEDLAGCSTACASLLTAVSRQLQDRLTPMEALLQTRYGLYSSPFDPVLFDLEMSGSSCKNVYNSSIGVQSDEIDLSDVLSGNGKVSSCTAAEGSFTSLTGLLEVEPLHFTCVSTSDGTRIERDDAMSSFGVTPAVGGLSSGTVGEASTALSSAAQVALQSLSHAMASAEQQLQVLQEKQQQLLKLQQQKAKLEAKLHQTTAAAAAAASAVGPVHNSVPSNPVAAPGFFIHPSDVIPPTPKTTPLFMTPPLTPPNEAVSVVINAELAQLFPGSVIDPPAVNLAAHNKNSNKSRMNPLGSGLALAISHASHFLQPPPHQSIIIERMHSGARRFVTLDFGRPILLTDVLIPTCGDLASLSIDIWTLGEEVDGRRLVVATDISTHSLILHDLIPPPVCRFMKITVIGRYGSTNARAKIPLGFYYGHTYILPWESELKLMHDPLKGEGESANQPEIDQHLAMMVALQEDIQCRYNLACHRLETLLQSIDLPPLNSANNAQYFLRKPDKAVEEDSRVFSAYQDCIQLQLQLNLAHNAVQRLKVALGASRKMLSETSNPEDLIQTSSTEQLRTIIRYLLDTLLSLLHASNGHSVPAVLQSTFHAQACEELFKHLCISGTPKIRLHTGLLLVQLCGGERWWGQFLSNVLQELYNSEQLLIFPQDRVFMLLSCIGQRSLSNSGVLESLLNLLDNLLSPLQPQLPMHRRTEGVLDIPMISWVVMLVSRLLDYVATVEDEAAAAKKPLNGNQWSFINNNLHTQSLNRSSKGSSSLDRLYSRKIRKQLVHHKQQLNLLKAKQKALVEQMEKEKIQSNKGSSYKLLVEQAKLKQATSKHFKDLIRLRRTAEWSRSNLDTEVTTAKESPEIEPLPFTLAHERCISVVQKLVLFLLSMDFTCHADLLLFVCKVLARIANATRPTIHLCEIVNEPQLERLLLLLVGTDFNRGDISWGGAWAQYSLTCMLQDILAGELLAPVAAEAMEEGTVGDDVGATAGDSDDSLQQSSVQLLETIDEPLTHDITGAPPLSSLEKDKEIDLELLQDLMEVDIDPLDIDLEKDPLAAKVFKPISSTWYDYWGADYGTYNYNPYIGGLGIPVAKPPANTEKNGSQTVSVSVSQALDARLEVGLEQQAELMLKMMSTLEADSILQALTNTSPTLSQSPTGTDDSLLGGLQAANQTSQLIIQLSSVPMLNVCFNKLFSMLQVHHVQLESLLQLWLTLSLNSSSTGNKENGADIFLYNANRIPVISLNQASITSFLTVLAWYPNTLLRTWCLVLHSLTLMTNMQLNSGSSSAIGTQESTAHLLVSDPNLIHVLVKFLSGTSPHGTNQHSPQVGPTATQAMQEFLTRLQVHLSSTCPQIFSEFLLKLIHILSTERGAFQTGQGPLDAQVKLLEFTLEQNFEVVSVSTISAVIESVTFLVHHYITCSDKVMSRSGSDSSVGARACFGGLFANLIRPGDAKAVCGEMTRDQLMFDLLKLVNILVQLPLSGNREYSARVSVTTNTTDSVSDEEKVSGGKDGNGSSTSVQGSPAYVADLVLANQQIMSQILSALGLCNSSAMAMIIGASGLHLTKHENFHGGLDAISVGDGLFTILTTLSKKASTVHMMLQPILTYMACGYMGRQGSLATCQLSEPLLWFILRVLDTSDALKAFHDMGGVQLICNNMVTSTRAIVNTARSMVSTIMKFLDSGPNKAVDSTLKTRILASEPDNAEGIHNFAPLGTITSSSPTAQPAEVLLQATPPHRRARSAAWSYIFLPEEAWCDLTIHLPAAVLLKEIHIQPHLASLATCPSSVSVEVSADGVNMLPLSTPVVTSGLTYIKIQLVKAEVASAVCLRLHRPRDASTLGLSQIKLLGLTAFGTTSSATVNNPFLPSEDQVSKTSIGWLRLLHHCLTHISDLEGMMASAAAPTANLLQTCAALLMSPYCGMHSPNIEVVLVKIGLQSTRIGLKLIDILLRNCAASGSDPTDLNSPLLFGRLNGLSSDSTIDILYQLGTTQDPGTKDRIQALLKWVSDSARVAAMKRSGRMNYMCPNSSTVEYGLLMPSPSHLHCVAAILWHSYELLVEYDLPALLDQELFELLFNWSMSLPCNMVLKKAVDSLLCSMCHVHPNYFSLLMGWMGITPPPVQCHHRLSMTDDSKKQDLSSSLTDDSKNAQAPLALTESHLATLASSSQSPEAIKQLLDSGLPSLLVRSLASFCFSHISSSESIAQSIDISQDKLRRHHVPQQCNKMPITADLVAPILRFLTEVGNSHIMKDWLGGSEVNPLWTALLFLLCHSGSTSGSHNLGAQQTSARSASLSSAATTGLTTQQRTAIENATVAFFLQCISCHPNNQKLMAQVLCELFQTSPQRGNLPTSGNISGFIRRLFLQLMLEDEKVTMFLQSPCPLYKGRINATSHVIQHPMYGAGHKFRTLHLPVSTTLSDVLDRVSDTPSITAKLISEQKDDKEKKNHEEKEKVKAENGFQDNYSVVVASGLKSQSKRAVSATPPRPPSRRGRTIPDKIGSTSGAEAANKIITVPVFHLFHKLLAGQPLPAEMTLAQLLTLLYDRKLPQGYRSIDLTVKLGSRVITDPSLSKTDSYKRLHPEKDHGDLLASCPEDEALTPGDECMDGILDESLLETCPIQSPLQVFAGMGGLALIAERLPMLYPEVIQQVSAPVVTSTTQEKPKDSDQFEWVTIEQSGELVYEAPETVAAEPPPIKSAVQTMSPIPAHSLAAFGLFLRLPGYAEVLLKERKHAQCLLRLVLGVTDDGEGSHILQSPSANVLPTLPFHVLRSLFSTTPLTTDDGVLLRRMALEIGALHLILVCLSALSHHSPRVPNSSVNQTEPQVSSSHNPTSTEEQQLYWAKGTGFGTGSTASGWDVEQALTKQRLEEEHVTCLLQVLASYINPVSSAVNGEAQSSHETRGQNSNALPSVLLELLSQSCLIPAMSSYLRNDSVLDMARHVPLYRALLELLRAIASCAAMVPLLLPLSTENGEEEEEQSECQTSVGTLLAKMKTCVDTYTNRLRSKRENVKTGVKPDASDQEPEGLTLLVPDIQKTAEIVYAATTSLRQANQEKKLGEYSKKAAMKPKPLSVLKSLEEKYVAVMKKLQFDTFEMVSEDEDGKLGFKVNYHYMSQVKNANDANSAARARRLAQEAVTLSTSLPLSSSSSVFVRCDEERLDIMKVLITGPADTPYANGCFEFDVYFPQDYPSSPPLVNLETTGGHSVRFNPNLYNDGKVCLSILNTWHGRPEEKWNPQTSSFLQVLVSVQSLILVAEPYFNEPGYERSRGTPSGTQSSREYDGNIRQATVKWAMLEQIRNPSPCFKEVIHKHFYLKRVEIMAQCEEWIADIQQYSSDKRVGRTMSHHAAALKRHTAQLREELLKLPCPEGLDPDTDDAPEVCRATTGAEETLMHDQVKPSSSKELPSDFQL

SEQ ID NO: 18853 - protein, 219 aa, Homo sapiens
MSSHLVEPPPPLHNNNNNCEENEQSLPPPAGLNSSWVELPMNSSNGNDNGNGKNGGLEHVPSSSSIHNGDMEKILLDAQHESGQSSSRGSSHCDSPSPQEDGQIMFDVEMHTSRDHSSQSEEEVVEGEKEVEALKKSADWVSDWSSRPENIPPKEFHFRHPKRSVSLSMRKSGAMKKGGIFSAEFLKVFIPSLFLSHVLALGLGIYIGKRLSTPSASTY

SEQ ID NO: 18854 - protein, 179 aa, Homo sapiens
MNSSNGNDNGNGKNGGLEHVPSSSSIHNGDMEKILLDAQHESGQSSSRGSSHCDSPSPQEDGQIMFDVEMHTSRDHSSQSEEEVVEGEKEVEALKKSADWVSDWSSRPENIPPKEFHFRHPKRSVSLSMRKSGAMKKGGIFSAEFLKVFIPSLFLSHVLALGLGIYIGKRLSTPSASTY

SEQ ID NO: 18855 - protein, 314 aa, Homo sapiens
MEGVELKEEWQDEDFPIPLPEDDSIEADILAITGPEDQPGSLEVNGNKVRKKLMAPDISLTLDPSDGSVLSDDLDESGEIDLDGLDTPSENSNEFEWEDDLPKPKTTEVIRKGSITEYTAAEEKEDGRRWRMFRIGEQDHRVDMKAIEPYKKVISHGGYYGDGLNAIVVFAVCFMPESSQPNYRYLMDNLFKYVIGTLELLVAENYMIVYLNGATTRRKMPSLGWLRKCYQQIDRRLRKNLKSLIIVHPSWFIRTLLAVTRPFISSKFSQKIRYVFNLAELAELVPMEYVGIPECIKQVDQELNGKQDEPKNEQ

SEQ ID NO: 18856 - protein, 376 aa, Homo sapiens
MEPCPSSAPPPFYPGVGEVAGLRWFSIYDQRPSWYRTKKLGLLDIGSLDYQEFVVDIESRLRMEGVELKEEWQDEDFPIPLPEDDSIEADILAITGPEDQPGSLEVNGNKVRKKLMAPDISLTLDPSDGSVLSDDLDESGEIDLDGLDTPSENSNEFEWEDDLPKPKTTEVIRKGSITEYTAAEEKEDGRRWRMFRIGEQDHRVDMKAIEPYKKVISHGGYYGDGLNAIVVFAVCFMPESSQPNYRYLMDNLFKYVIGTLELLVAENYMIVYLNGATTRRKMPSLGWLRKCYQQIDRRLRKNLKSLIIVHPSWFIRTLLAVTRPFISSKFSQKIRYVFNLAELAELVPMEYVGIPECIKQVDQELNGKQDEPKNEQ

SEQ ID NO: 18857 - protein, 492 aa, Homo sapiens
MASPSGKGARALEAPGCGPRPLARDLVDSVDDAEGLYVAVERCPLCNTTRRRLTCAKCVQSGDFVYFDGRDRERFIDKKERLSRLKSKQEEFQKEVLKAMEGKWITDQLRWKIMSCKMRIEQLKQTICKGNEEMEKNSEGLLKTKEKNQKLYSRAQRHQEKKEKIQRHNRKLGDLVEKKTIDLRSHYERLANLRRSHILELTSVIFPIEEVKTGVRDPADVSSESDSAMTSSTVSKLAEARRTTYLSGRWVCDDHNGDTSISITGPWISLPNNGDYSAYYSWVEEKKTTQGPDMEQSNPAYTISAALCYATQLVNILSHILDVNLPKKLCNSEFCGENLSKQKFTRAVKKLNANILYLCFSQHVNLDQLQPLHTLRNLMYLVSPSSEHLGRSGPFEVRADLEESMEFVDPGVAGESDESGDERVSDEETDLGTDWENLPSPRFCDIPSQSVEVSQSQSTQASPPIASSSAGGMISSAAASVTSWFKAYTGHR

SEQ ID NO: 18858 - protein, 379 aa, Homo sapiens
MSCKMRIEQLKQTICKGNEEMEKNSEGLLKTKEKNQKLYSRAQRHQEKKEKIQRHNRKLGDLVEKKTIDLRSHYERLANLRRSHILELTSVIFPIEEVKTGVRDPADVSSESDSAMTSSTVSKLAEARRTTYLSGRWVCDDHNGDTSISITGPWISLPNNGDYSAYYSWVEEKKTTQGPDMEQSNPAYTISAALCYATQLVNILSHILDVNLPKKLCNSEFCGENLSKQKFTRAVKKLNANILYLCFSQHVNLDQLQPLHTLRNLMYLVSPSSEHLGRSGPFEVRADLEESMEFVDPGVAGESDESGDERVSDEETDLGTDWENLPSPRFCDIPSQSVEVSQSQSTQASPPIASSSAGGMISSAAASVTSWFKAYTGHR

SEQ ID NO: 18859 - protein, 86 aa, Homo sapiens
MELSAEYLREKLQRDLEAEHVEVEDTTLNRCSCSFRVLVVSAKFEGKPLLQRHRLVNACLAEELPHIHAFEQKTLTPDQWARERQK

SEQ ID NO: 18860 - protein, 58 aa, Homo sapiens
MELSAEYLREKLQRDLEAEHVEVEDTTLNRCSCSFRVLVVSAKFEGKPLLQRHRFCTE

SEQ ID NO: 18861 - protein, 1785 aa, Homo sapiens
MQESQTKSMFVSRALEKILADKEVKRPQHSQLRRACQVALDEIKAEIEKQRLGTAAPPKANFIEADKYFLPFELACQSKSPRVVSTSLDCLQKLIAYGHITGNAPDSGAPGKRLIDRIVETICSCFQGPQTDEGVQLQIIKALLTAVTSPHIEIHEGTILQTVRTCYNIYLASKNLINQTTAKATLTQMLNVIFTRMENQVLQEARELEKPIQSKPQSPVIQAAAVSPKFVRLKHSQAQSKPTTPEKTDLTNGEHARSDSGKVSTENGDAPRERGSSLSGTDDGAQEVVKDILEDVVTSAIKEAAEKHGLTEPERVLGELECQECAIPPGVDENSQTNGIADDRQSLSSADNLESDAQGHQVAARFSHVLQKDAFLVFRSLCKLSMKPLGEGPPDPKSHELRSKVVSLQLLLSVLQNAGPVFRTHEMFINAIKQYLCVALSKNGVSSVPDVFELSLAIFLTLLSNFKMHLKMQIEVFFKEIFLNILETSTSSFEHRWMVIQTLTRICADAQCVVDIYVNYDCDLNAANIFERLVNDLSKIAQGRSGHELGMTPLQELSLRKKGLECLVSILKCMVEWSKDLYVNPNHQTSLGQERLTDQEIGDGKGLDMARRCSVTSMESTVSSGTQTTVQDDPEQFEVIKQQKEIIEHGIELFNKKPKRGIQFLQEQGMLGTSVEDIAQFLHQEERLDSTQVGDFLGDSARFNKEVMYAYVDQLDFCEKEFVSALRTFLEGFRLPGEAQKIDRLMEKFAARYIECNQGQTLFASADTAYVLAYSIIMLTTDLHSPQVKNKMTKEQYIKMNRGINDSKDLPEEYLSSIYEEIEGKKIAMKETKELTIATKSTKQNVASEKQRRLLYNLEMEQMAKTAKALMEAVSHAKAPFTSATHLDHVRPMFKLVWTPLLAAYSIGLQNCDDTEVASLCLEGIRCAIRIACIFGMQLERDAYVQALARFSLLTASSSITEMKQKNIDTIKTLITVAHTDGNYLGNSWHEILKCISQLELAQLIGTGVKTRYLSGSGREREGSLKGHTLAGEEFMGLGLGNLVSGGVDKRQMASFQESVGETSSQSVVVAVDRIFTGSTRLDGNAIVDFVRWLCAVSMDELASPHHPRMFSLQKIVEISYYNMNRIRLQWSRIWHVIGDHFNKVGCNPNEDVAIFAVDSLRQLSMKFLEKGELANFRFQKDFLRPFEHIMKKNRSPTIRDMAIRCIAQMVNSQAANIRSGWKNIFAVFHQAASDHDGNIVELAFQTTCHIVTTIFQHHFPAAIDSFQDAVKCLSEFACNAAFPDTSMEAIRLIRFCGKYVSERPRVLQEYTSDDMNVAPGDRVWVRGWFPILFELSCIINRCKLDVRTRGLTVMFEIMKSYGHTFEKHWWQDLFRIVFRIFDNMKLPEQLSEKSEWMTTTCNHALYAICDVFTQFYEALNEVLLSDVFAQLQWCVKQDNEQLARSGTNCLENLVISNGEKFSPEVWDETCNCMLDIFKTTIPHVLLTWRPVGMEEDSSEKHLDVDLDRQSLSSIDKNPSERGQSQLSNPTDDSWKGRPYANQKLFASLLIKCVVQLELIQTIDNIVFYPATSKKEDAEHMVAAQQDTLDADIHIETEDQGMYKYMSSQHLFKLLDCLQESHSFSKAFNSNYEQRTVLWRAGFKGKSKPNLLKQETSSLACCLRILFRMYVDENRRDSWEEIQQRLLTVCSEALAYFITVNSESHREAWTSLLLLLLTKTLKINDEKFKAHASMYYPYLCEIMQFDLIPELRAVLRKFFLRIGVVYKIWIPEEPSQVPAALSPVW

SEQ ID NO: 18862 - protein, 396 aa, Homo sapiens
MVAGTRCLLALLLPQVLLGGAAGLVPELGRRKFAAASSGRPSSQPSDEVLSEFELRLLSMFGLKQRPTPSRDAVVPPYMLDLYRRHSGQPGSPAPDHRLERAASRANTVRSFHHEESLEELPETSGKTTRRFFFNLSSIPTEEFITSAELQVFREQMQDALGNNSSFHHRINIYEIIKPATANSKFPVTRLLDTRLVNQNASRWESFDVTPAVMRWTAQGHANHGFVVEVAHLEEKQGVSKRHVRISRSLHQDEHSWSQIRPLLVTFGHDGKGHPLHKREKRQAKHKQRKRLKSSCKRHPLYVDFSDVGWNDWIVAPPGYHAFYCHGECPFPLADHLNSTNHAIVQTLVNSVNSKIPKACCVPTELSAISMLYLDENEKVVLKNYQDMVVEGCGCR

SEQ ID NO: 18863 - protein, 402 aa, Homo sapiens
MTALPGPLWLLGLALCALGGGGPGLRPPPGCPQRRLGARERRDVQREILAVLGLPGRPRPRAPPAASRLPASAPLFMLDLYHAMAGDDDEDGAPAERRLGRADLVMSFVNMVERDRALGHQEPHWKEFRFDLTQIPAGEAVTAAEFRIYKVPSIHLLNRTLHVSMFQVVQEQSNRESDLFFLDLQTLRAGDEGWLVLDVTAASDCWLLKRHKDLGLRLYVETEDGHSVDPGLAGLLGQRAPRSQQPFVVTFFRASPSPIRTPRAVRPLRRRQPKKSNELPQANRLPGIFDDVHGSHGRQVCRRHELYVSFQDLGWLDWVIAPQGYSAYYCEGECSFPLDSCMNATNHAILQSLVHLMMPDAVPKACCAPTKLSATSVLYYDSSNNVILRKHRNMVVKACGCH

SEQ ID NO: 18864 - protein, 349 aa, Homo sapiens
MTALPGPLWLLGLALCALGGGGPGLRPPPGCPQRRLGARERRDVQREILAVLGLPGRPRPRAPPAASRLPASAPLFMLDLYHAMAGDDDEDGAPAERRLGRADLVMSFVNMVERDRALGHQEPHWKEFRFDLTQIPAGEAVTAAEFRIYKVPSIHLLNRTLHVSMFQVVQEQSNRESDLFFLDLQTLRAGDEGWLVLDVTAASDCWLLKRHKDLGLRLYVETEDGETWTGWGWTKDSRLQMWKLRLSRTPWVLSLHAPGPAQAPAERPLLCLLQGHCPASPSPIRTPRAVRPLRRRQPKKSNELPQANRLPGIFDDVHGSHGRQVCRRHELYVSFQDLGWLVIADSSCF

SEQ ID NO: 18865 - protein, 406 aa, Homo sapiens
MPPVGGKKAKKGILERLNAGEIVIGDGGFVFALEKRGYVKAGPWTPEAAVEHPEAVRQLHREFLRAGSNVMQTFTFYASEDKLENRGNYVLEKISGQEVNEAACDIARQVADEGDALVAGGVSQTPSYLSCKSETEVKKVFLQQLEVFMKKNVDFLIAEYFEHVEEAVWAVETLIASGKPVAATMCIGPEGDLHGVPPGECAVRLVKAGASIIGVNCHFDPTISLKTVKLMKEGLEAARLKAHLMSQPLAYHTPDCNKQGFIDLPEFPFGLEPRVATRWDIQKYAREAYNLGVRYIGGCCGFEPYHIRAIAEELAPERGFLPPASEKHGSWGSGLDMHTKPWVRARARKEYWENLRIASGRPYNPSMSKPDGWGVTKGTAELMQQKEATTEQQLKELFEKQKFKSQ

SEQ ID NO: 18866 - protein, 409 aa, Homo sapiens
MQRRRRPPPPTSRLPEGCGGGGGGSEEVEVQFSAGRWGSAAAVSAAAAAATRSTEEEEERLEREHFWKIINAFRYYGTSMHERVNRTERQFRSLPANQQKLLPQFLLHLDKIRKCIDHNQEILLTIVNDCIHMFENKEYGEDGNGKIMPASTFDMDKLKSTLKQFVRDWSETGKAERDACYQPIIKEILKNFPKERWDPSKVNILVPGAGLGRLAWEIAMLGYACQGNEWSFFMLFSSNFVLNRCSEINKYKLYPWIHQFSNNRRSADQIRPIFFPDVDPHSLPPGSNFSMTAGDFQEIYSECNTWDCIATCFFIDTAHNVIDYIDTIWKILKPGGIWINLGPLLYHFENLANELSIELSYEDIKNVVLQYGFKVEVEKESVLSTYTVNDLSMMKYYYECVLFVVRKPQ

SEQ ID NO: 18867 - protein, 308 aa, Homo sapiens
MASSNTVLMRLVASAYSIAQKAGMIVRRVIAEGDLGIVEKTCATDLQTKADRLAQMSICSSLARKFPKLTIIGEEDLPSEEVDQELIEDSQWEEILKQPCPSQYSAIKEEDLVVWVDPLDGTKEYTEGLLDNVTVLIGIAYEGKAIAGVINQPYYNYEAGPDAVLGRTIWGVLGLGAFGFQLKEVPAGKHIITTTRSHSNKLVTDCVAAMNPDAVLRVGGAGNKIIQLIEGKASAYVFASPGCKKWDTCAPEVILHAVGGKLTDIHGNVLQYHKDVKHMNSAGVLATLRNYDYYASRVPESIKNALVP

SEQ ID NO: 18868 - protein, 325 aa, Homo sapiens
MASSNTVLMRLVASAYSIAQKAGMIVRRVIAEGDLGIVEKTCATDLQTKADRLAQMSICSSLARKFPKLTIIGEEDLPSEEVDQELIEDSQWEEILKQPCPSQYSAIKEEDLVVWVDPLDGTKEYTEGLLDNVTVLIGIAYEGKAIAGVINQPYYNYEAGPDAVLGRTIWGVLGLGAFGFQLKEVPAGKHIITTTRSHSNKLVTDCVAAMNPDAVLRVGGAGNKIIQLIEGKASAYVFASPGCKKWDTCAPEVILHAVGGKLTDIHGNVLQYHKDVSHRTWPKPDFFRAQFFLESHSCFSRNFKNVSTPIKNIYDVIIYAYETDL

SEQ ID NO: 18869 - protein, 253 aa, Homo sapiens
MSICSSLARKFPKLTIIGEEDLPSEEVDQELIEDSQWEEILKQPCPSQYSAIKEEDLVVWVDPLDGTKEYTEGLLDNVTVLIGIAYEGKAIAGVINQPYYNYEAGPDAVLGRTIWGVLGLGAFGFQLKEVPAGKHIITTTRSHSNKLVTDCVAAMNPDAVLRVGGAGNKIIQLIEGKASAYVFASPGCKKWDTCAPEVILHAVGGKLTDIHGNVLQYHKDVKHMNSAGVLATLRNYDYYASRVPESIKNALVP

SEQ ID NO: 18870 - protein, 272 aa, Homo sapiens
MASSNTVLMRLVASAYSIAQKAGMIVRRVIAEGDLGIVEKTCATDLQTKADRLAQMSICSSLARKFPKLTIIGEELVVWVDPLDGTKEYTEGLLDNVTVLIGIAYEGKAIAGVINQPYYNYEAGPDAVLGRTIWGVLGLGAFGFQLKEVPAGKHIITTTRSHSNKLVTDCVAAMNPDAVLRVGGAGNKIIQLIEGKASAYVFASPGCKKWDTCAPEVILHAVGGKLTDIHGNVLQYHKDVKHMNSAGVLATLRNYDYYASRVPESIKNALVP

SEQ ID NO: 18871 - protein, 721 aa, Homo sapiens
MLLPVFTLKLRHKISPRMVAIGRYDGTHPCLAAATQTGKVFIHNPHTRNQHVSASRVFQSPLESDVSLLNINQAVSCLTAGVLNPELGYDALLVGTQTNLLAYDVYNNSDLFYREVADGANAIVLGTLGDISSPLAIIGGNCALQGFNHEGSDLFWTVTGDNVNSLALCDFDGDGKKELLVGSEDFDIRVFKEDEIVAEMTETEIVTSLCPMYGSRFGYALSNGTVGVYDKTSRYWRIKSKNHAMSIHAFDLNSDGVNELITGWSNGKVDARSDRTGEVIFKDNFSSAIAGVVEGDYRMDGHIQLICCSVDGEIRGYLPGTAEMRGNLMDTSAEQDLIRELSQKKQNLLLELRNYEENAKAELASPLNEADGHRGIIPANTRLHTTLSVSLGNETQTAHTELRISTSNDTIIRAVLIFAEGIFTGESHVVHPSIHNLSSSICIPIVPPKDVPVDLHLKAFVGYRSSTQFHVFESTRQLPRFSMYALTSLDPASEPISYVNFTIAERAQRVVVWLGQNFLLPEDTHIQNAPFQVCFTSLRNGGHLHIKIKLSGEITINTDDIDLAGDIIQSMASFFAIEDLQVEADFPVYFEELRKVLVKVDEYHSVHQKLSADMADHSNLIRSLLVGAEDARLMRDMKTMKSRYMELYDLNRDLLNGYKIRCNNHTELLGNLKAVNQAIQRAGRLRVGKPKNQVITACRDAIRSNNINTLFKIMRVGTASS

SEQ ID NO: 18872 - protein, 128 aa, Homo sapiens
MGFQKFSPFLALSILVLLQAGSLHAAPFRSALESSPADPATLSEDEARLLLAALVQDYVQMKASELEQEQEREGSRIIAQKRACDTATCVTHRLAGLLSRSGGVVKNNFVPTNVGSKAFGRRRRDLQA

SEQ ID NO: 18873 - protein, 333 aa, Homo sapiens [sequence omitted]

SEQ ID NO: 18874 - protein, 278 aa, Homo sapiens
MKMIELHNQEYREGKHSFTMAMNAFGDMTSEEFRQVMNGFQNRKPRKGKVFQEPLFYEAPRSVDWREKGYVTPVKNQGQCGSCWAFSATGALEGQMFRKTGRLISLSEQNLVDCSGPQGNEGCNGGLMDYAFQYVQDNGGLDSEESYPYEATEESCKYNPKYSVANDTGFVDIPKQEKALMKAVATVGPISVAIDAGHESFLFYKEGIYFEPDCSSEDMDHGVLVVGYGFESTESDNNKYWLVKNSWGEEWGMGGYVKMAKDRRNHCGIASAASYPTV

SEQ ID NO: 18875 - protein, 405 aa, Homo sapiens
MPLLLYTCLLWLPTSGLWTVQAMDPNAAYVNMSNHHRGLASANVDFAFSLYKHLVALSPKKNIFISPVSISMALAMLSLGTCGHTRAQLLQGLGFNLTERSETEIHQGFQHLHQLFAKSDTSLEMTMGNALFLDGSLELLESFSADIKHYYESEVLAMNFQDWATASRQINSYVKNKTQGKIVDLFSGLDSPAILVLVNYIFFKGTWTQPFDLASTREENFYVDETTVVKVPMMLQSSTISYLHDSELPCQLVQMNYVGNGTVFFILPDKGKMNTVIAALSRDTINRWSAGLTSSQVDLYIPKVTISGVYDLGDVLEEMGIADLFTNQANFSRITQDAQLKSSKVVHKAVLQLNEEGVDTAGSTGVTLNLTSKPIILRFNQPFIIMIFDHFTWSSLFLARVMNPV

SEQ ID NO: 18876 - protein, 378 aa, Homo sapiens
MSGAGVAAGTRPPSSPTPGSRRRRQRPSVGVQSLRPQSPQLRQSDPQKRNLDLEKSLQFLQQQHSEMLAKLHEEIEHLKRENKDLHYKLIMNQTSQKKDGPSGNHLSRASAPLGARWVCINGVWVEPGGPSPARLKEGSSRTHRPGGKRGRLAGGSADTVRSPADSLSMSSFQSVKSISNSGKARPQPGSFNKQDSKADVSQKADLEEEPLLHNSKLDKVPGVQGQARKEKAEASNAGAACMGNSQHQGRQMGAGAHPPMILPLPLRKPTTLRQCEVLIRELWNTNLLQTQELRHLKSLLEGSQRPQAAPEEASFPRDQEATHFPKVSTKSLSKKCLSPPVAERAILPALKQTPKNNFAERQKRLQAMQKRRLHRSVL

SEQ ID NO: 18877 - protein, 312 aa, Homo sapiens
MSGAGVAAGTRPPSSPTPGSRRRRQRPSVGVQSLRPQSPQLRQSDPQKRNLDLEKSLQFLQQQHSEMLAKLHEEIEHLKRENKDLHYKLIMNQTSQKKDSLSMSSFQSVKSISNSGKARPQPGSFNKQDSKADVSQKADLEEEPLLHNSKLDKVPGVQGQARKEKAEASNAGAACMGNSQHQGRQMGAGAHPPMILPLPLRKPTTLRQCEVLIRELWNTNLLQTQELRHLKSLLEGSQRPQAAPEEASFPRDQEATHFPKVSTKSLSKKCLSPPVAERAILPALKQTPKNNFAERQKRLQAMQKRRLHRSVL

SEQ ID NO: 18878 - protein, 202 aa, Homo sapiens
MEAEAGGLEELTDEEMAALGKEELVRRLRREEAARLAALVQRGRLMQEVNRQLQGHLGEIRELKQLNRRLQAENRELRDLCCFLDSERQRGRRAARQWQLFGTQASRAVREDLGGCWQKLAELEGRQEELLRENLALKELCLALGEEWGPRGGPSGAGGSGAGPAPELALPPCGPRDLGDGSSSTGSVGSPDQLPLACSPDD

SEQ ID NO: 18879 - protein, 254 aa, Homo sapiens
MNSRQAWRLFLSQGRGDRWVSRPRGHFSPALRREFFTTTTKEGYDRRPVDITPLEQRKLTFDTHALVQDLETHGFDKTQAETIVSALTALSNVSLDTIYKEMVTQAQQEITVQQLMAHLDAIRKDMVILEKSEFANLRAENEKMKIELDQVKQQLMHETSRIRADNKLDINLERSRVTDMFTDQEKQLMETTTEFTKKDTQTKSIISETSNKIDAEIASLKTLMESNKLETIRYLAASVFTCLAIALGFYRFWK

SEQ ID NO: 18880 - protein, 245 aa, Homo sapiens
MLANCGSVCEETQFRGTTVAPALGEFFTTTTKEGYDRRPVDITPLEQRKLTFDTHALVQDLETHGFDKTQAETIVSALTALSNVSLDTIYKEMVTQAQQEITVQQLMAHLDAIRKDMVILEKSEFANLRAENEKMKIELDQVKQQLMHETSRIRADNKLDINLERSRVTDMFTDQEKQLMETTTEFTKKDTQTKSIISETSNKIDAEIASLKTLMESNKLETIRYLAASVFTCLAIALGFYRFWK

SEQ ID NO: 18881 - protein, 153 aa, Homo sapiens
MVTQAQQEITVQQLMAHLDAIRKDMVILEKSEFANLRAENEKMKIELDQVKQQLMHETSRIRADNKLDINLERSRVTDMFTDQEKQLMETTTEFTKKDTQTKSIISETSNKIDAEIASLKTLMESNKLETIRYLAASVFTCLAIALGFYRFWK

SEQ ID NO: 18882 - protein, 380 aa, Homo sapiens
MSGAGVAAGTRPPSSPTPGSRRRRQRPSVGVQSLRPQSPQLRQSDPQKRNLDLEKSLQFLQQQHSEMLAKLHEEIEHLKRENKDLRYKLIMNQTSQKKDGPSGNHLSRASAPLGARWVCINGVWVEPGGPSPARLKEGSSRTHRPGGKHGRLAGGSADTVRSPADSLSTSSFQSVKSISNSGKARPQPGSFNKQDSKADVPQKADLEEEPLLHNSKLDKVPGVQGQARKEKAEASNAGAACMGNSQHQGRQMGAAAHPPMILPLPLRKPTTLRQCEVLIRELWNTNLLQTQELQHLKSLLEGSQRPQAVPEEASFPRDQEATHFPKVSTKSLSKKCLLLSPPVAERAILPALKQTPKNNFAERQKRLQAMQKRRLHRSVL

SEQ ID NO: 18883 - protein, 314 aa, Homo sapiens
MSGAGVAAGTRPPSSPTPGSRRRRQRPSVGVQSLRPQSPQLRQSDPQKRNLDLEKSLQFLQQQHSEMLAKLHEEIEHLKRENKDLRYKLIMNQTSQKKDSLSTSSFQSVKSISNSGKARPQPGSFNKQDSKADVPQKADLEEEPLLHNSKLDKVPGVQGQARKEKAEASNAGAACMGNSQHQGRQMGAAAHPPMILPLPLRKPTTLRQCEVLIRELWNTNLLQTQELQHLKSLLEGSQRPQAVPEEASFPRDQEATHFPKVSTKSLSKKCLLLSPPVAERAILPALKQTPKNNFAERQKRLQAMQKRRLHRSVL

SEQ ID NO: 18884 - protein, 377 aa, Homo sapiens
MAEGNHRKKPLKVLESLGKDFLTGVLDNLVEQNVLNWKEEEKKKYYDAKTEDKVRVMADSMQEKQRMAGQMLLQTFFNIDQISPNKKAHPNMEAGPPESGESTDALKLCPHEEFLRLCKERAEEIYPIKERNNRTRLALIICNTEFDHLPPRNGADFDITGMKELLEGLDYSVDVEENLTARDMESALRAFATRPEHKSSDSTFLVLMSHGILEGICGTVHDEKKPDVLLYDTIFQIFNNRNCLSLKDKPKVIIVQACRGANRGELWVRDSPASLEVASSQSSENLEEDAVYKTHVEKDFIAFCSSTPHNVSWRDSTMGSIFITQLITCFQKYSWCCHLEEVFRKVQQSFETPRAKAQMPTIERLSMTRYFYLFPGN

SEQ ID NO: 18885 - protein, 321 aa, Homo sapiens
MADSMQEKQRMAGQMLLQTFFNIDQISPNKKAHPNMEAGPPESGESTDALKLCPHEEFLRLCKERAEEIYPIKERNNRTRLALIICNTEFDHLPPRNGADFDITGMKELLEGLDYSVDVEENLTARDMESALRAFATRPEHKSSDSTFLVLMSHGILEGICGTVHDEKKPDVLLYDTIFQIFNNRNCLSLKDKPKVIIVQACRGANRGELWVRDSPASLEVASSQSSENLEEDAVYKTHVEKDFIAFCSSTPHNVSWRDSTMGSIFITQLITCFQKYSWCCHLEEVFRKVQQSFETPRAKAQMPTIERLSMTRYFYLFPGN

SEQ ID NO: 18886 - protein, 116 aa, Homo sapiens
MAEGNHRKKPLKVLESLGKDFLTGVLDNLVEQNVLNWKEEEKKKYYDAKTEDKVRVMADSMQEKQRMAGQMLLQTFFNIDQISPNKKGDKLGHRGRNHNLCSAISCSSSEYGGWTT

SEQ ID NO: 18887 - protein, 263 aa, Homo sapiens
MAEGNHRKKPLKVLESLGKDFLTGVLDNLVEQNVLNWKEEEKKKYYDAKTEDKVRVMADSMQEKQRMAGQMLLQTFFNIDQISPNKKAHPNMEAGPPESGESTDALKLCPHEEFLRLCKERAEEIYPIKERNNRTRLALIICNTEFDHLPPRNGADFDITGMKELLEGLDYSVDVEENLTARDMESALRAFATRPEHKSSDSTFLVLMSHGILEGICGTVHDEKKPDVLLYDTIFQIFNNRNCLSLKDKPKVIIVQACRGGEC

SEQ ID NO: 18888 - protein, 157 aa, Homo sapiens
MAEGNHRKKPLKVLESLGKDFLTGVLDNLVEQNVLNWKEEEKKKYYDAKTEDKVRVMADSMQEKQRMAGQMLLQTFFNIDQISPNKKAHPNMEAGPPESGESTDALKLCPHEEFLRLCKERAEEVLCYLYEIEKKEEISLLSFSAPFLTALNDWGWG

SEQ ID NO: 18889 - protein, 170 aa, Homo sapiens
MKTQRDGHSLGRWSLVLLLLGLVMPLAIIAQVLSYKEAVLRAIDGINQRSSDANLYRLLDLDPRPTMDGDPDTPKPVSFTVKETVCPRTTQQSPEDCDFKKDGLVKRCMGTVTLNQARGSFDISCDKDNKRFALLGDFFRKSKEKIGKEFKRIVQRIKDFLRNLVPRTES

SEQ ID NO: 18890 - protein, 185 aa, Homo sapiens
MRLLILTCLVAVALARPKLPLRYPERLQNPSESSEPIPLESREEYMNGMNRQRNILREKQTDEIKDTRNESTQNCVVAEPEKMESSISSSSEEMSLSKCAEQFCRLNEYNQLQLQAAHAQEQIRRMNENSHVQVPFQQLNQLAAYPYAVWYYPQIMQYVPFPPFSDISNPTAHENYEKNNVMLQW

SEQ ID NO: 18891 - protein, 184 aa, Homo sapiens
MRLLILTCLVAVALARPKLPLRYPERLQNPSESSEPIPLESREEYMNGMNRRNILREKQTDEIKDTRNESTQNCVVAEPEKMESSISSSSEEMSLSKCAEQFCRLNEYNQLQLQAAHAQEQIRRMNENSHVQVPFQQLNQLAAYPYAVWYYPQIMQYVPFPPFSDISNPTAHENYEKNNVMLQW

SEQ ID NO: 18892 - protein, 177 aa, Homo sapiens
MRLLILTCLVAVALARPKLPLRYPERLQNPSESSEPIPLESREEYMNGMNRQRNILREKQTDEIKNCVVAEPEKMESSISSSSEEMSLSKCAEQFCRLNEYNQLQLQAAHAQEQIRRMNENSHVQVPFQQLNQLAAYPYAVWYYPQIMQYVPFPPFSDISNPTAHENYEKNNVMLQW

SEQ ID NO: 18893 - protein, 176 aa, Homo sapiens
MRLLILTCLVAVALARPKLPLRYPERLQNPSESSEPIPLESREEYMNGMNRRNILREKQTDEIKDTRNESTQNCVVAEPEKMESSISSSSEEQFCRLNEYNQLQLQAAHAQEQIRRMNENSHVQVPFQQLNQLAAYPYAVWYYPQIMQYVPFPPFSDISNPTAHENYEKNNVMLQW

SEQ ID NO: 18894 - protein, 1150 aa, Homo sapiens
MAQFGGQKNPPWATQFTATAVSQPAALGVQQPSLLGASPTIYTQQTALAAAGLTTQTPANYQLTQTAALQQQAAAAAAALQQQYSQPQQALYSVQQQLQQPQQTLLTQPAVALPTSLSLSTPQPTAQITVSYPTPRSSQQQTQPQKQRVFTGVVTKLHDTFGFVDEDVFFQLSAVKGKTPQVGDRVLVEATYNPNMPFKWNAQRIQTLPNQNQSQTQPLLKTPPAVLQPIAPQTTFGVQTQPQPQSLLQAQISAASITPLLQTQPQPLLQQPQQKAGLLQPPVRIVSQPQPARRLDPPSRFSGRNDRGDQVPNRKDDRSRERERERRRSRERSPQRKRSRERSPRRERERSPRRVRRVVPRYTVQFSKFSLDCPSCDMMELRRRYQNLYIPSDFFDAQFTWVDAFPLSRPFQLGNYCNFYVMHREVESLEKNMAILDPPDADHLYSAKVMLMASPSMEDLYHKSCALAEDPQELRDGFQHPARLVKFLVGMKGKDEAMAIGGHWSPSLDGPDPEKDPSVLIKTAIRCCKALTGIDLSVCTQWYRFAEIRYHRPEETHKGRTVPAHVETVVLFFPDVWHCLPTRSEWETLSRGYKQQLVEKLQGERKEADGEQDEEEKDDGEAKEISTPTHWSKLDPKTMKVNDLRKELESRALSSKGLKSQLIARLTKQLKVEEQKEEQKELEKSEKEEDEDDDRKSEDDKEEEERKRQEEIERQRRERRYILPDEPAIIVHPNWAAKSGKFDCSIMSLSVLLDYRLEDNKEHSFEVSLFAELFNEMLQRDFGVRIYKSLLSLPEKEDKKEKDKKSKKDERKDKKEERDDETDEPKPKRRKSGDDKDKKEDRDERKKEDKRKDDSKDDDETEEDNNQDEYDPMEAEEAEDEEDDRDEEEMTKRDDKRDINRYCKERPSKDKEKEKTQMITINRDLLMAFVYFDQSHCGYLLEKDLEEILYTLGLHLSRAQVKKLLNKVVLRESCFYRKLTDTSKDEENHEESESLQEDMLGNRLLLPTPTVKQESKDVEENVGLIVYNGAMVDVGSLLQKLEKSEKVRAEVEQKLQLLEEKTDEDEKTILNLENSNKSLSGELREVKKDLSQLQENLKISENMNLQFENQMNKTIRNLSTVMDEIHTVLKKDNVKNEDKDQKSKENGASV

SEQ ID NO: 18895 - protein, 1135 aa, Homo sapiens
MAQFGGQKNPPWATQFTATAVSQPAALGVQQPSLLGASPTIYTQQTALAAAGLTTQTPANYQLTQTAALQQQAAAAAAALQQLQQPQQTLLTQPAVALPTSLSLSTPQPTAQITVSYPTPRSSQQQTQPQKQRVFTGVVTKLHDTFGFVDEDVFFQLSAVKGKTPQVGDRVLVEATYNPNMPFKWNAQRIQTLPNQNQSQTQPLLKTPPAVLQPIAPQTTFGVQTQPQPQSLLQAQISAASITPLLQTQPQPLLQQPQQKAGLLQPPVRIVSQPQPARRLDPPSRFSGRNDRGDQVPNRKDDRSRERERERRRSRERSPQRKRSRERSPRRERERSPRRVRRVVPRYTVQFSKFSLDCPSCDMMELRRRYQNLYIPSDFFDAQFTWVDAFPLSRPFQLGNYCNFYVMHREVESLEKNMAILDPPDADHLYSAKVMLMASPSMEDLYHKSCALAEDPQELRDGFQHPARLVKFLVGMKGKDEAMAIGGHWSPSLDGPDPEKDPSVLIKTAIRCCKALTGIDLSVCTQWYRFAEIRYHRPEETHKGRTVPAHVETVVLFFPDVWHCLPTRSEWETLSRGYKQQLVEKLQGERKEADGEQDEEEKDDGEAKEISTPTHWSKLDPKTMKVNDLRKELESRALSSKGLKSQLIARLTKQLKVEEQKEEQKELEKSEKEEDEDDDRKSEDDKEEEERKRQEEIERQRRERRYILPDEPAIIVHPNWAAKSGKFDCSIMSLSVLLDYRLEDNKEHSFEVSLFAELFNEMLQRDFGVRIYKSLLSLPEKEDKKEKDKKSKKDERKDKKEERDDETDEPKPKRRKSGDDKDKKEDRDERKKEDKRKDDSKDDDETEEDNNQDEYDPMEAEEAEDEEDDRDEEEMTKRDDKRDINRYCKERPSKDKEKEKTQMITINRDLLMAFVYFDQSHCGYLLEKDLEEILYTLGLHLSRAQVKKLLNKVVLRESCFYRKLTDTSKDEENHEESESLQEDMLGNRLLLPTPTVKQESKDVEENVGLIVYNGAMVDVGSLLQKLEKSEKVRAEVEQKLQLLEEKTDEDEKTILNLENSNKSLSGELREVKKDLSQLQENLKISENMNLQFENQMNKTIRNLSTVMDEIHTVLKKDNVKNEDKDQKSKENGASV

SEQ ID NO: 18896 - protein, 151 aa, Homo sapiens
MMAEEHTDLEAQIVKDIHCKEIDLVNRDPKNINEDIVKVDFEDVIAEPVGTYSFDGVWKVSYTTFTVSKYWCYRLLSTLLGVPLALLWGFLFACISFCHIWAVVPCIKSYLIEIQCISHIYSLCIRTFCNPLFAALGQVCSSIKVVLRKEV

SEQ ID NO: 18897 - protein, 521 aa, Homo sapiens
MKSQGQHWYSSSDKNCKVSFREKLLIIDSNLGVQDVENLKFLCIGLVPNKKLEKSSSASDVFEHLLAEDLLSEEDPFFLAELLYIIRQKKLLQHLNCTKEEVERLLPTRQRVSLFRNLLYELSEGIDSENLKDMIFLLKDSLPKTEMTSLSFLAFLEKQGKIDEDNLTCLEDLCKTVVPKLLRNIEKYKREKAIQIVTPPVDKEAESYQGEEELVSQTDVKTFLEALPQESWQNKHAGSNGNRATNGAPSLVSRGMQGASANTLNSETSTKRAAVYRMNRNHRGLCVIVNNHSFTSLKDRQGTHKDAEILSHVFQWLGFTVHIHNNVTKVEMEMVLQKQKCNPAHADGDCFVFCILTHGRFGAVYSSDEALIPIREIMSHFTALQCPRLAEKPKLFFIQACQGEEIQPSVSIEADALNPEQAPTSLQDSIPAEADFLLGLATVPGYVSFRHVEEGSWYIQSLCNHLKKLVPRMLKFLEKTMEIRGRKRTVWGAKQISATSLPTAISAQTPRPPMRRWSSVS

SEQ ID NO: 18898 - protein, 479 aa, Homo sapiens
MKSQGQHWYSSSDKNCKVSFREKLLIIDSNLGVQDVENLKFLCIGLVPNKKLEKSSSASDVFEHLLAEDLLSEEDPFFLAELLYIIRQKKLLQHLNCTKEEVERLLPTRQRVSLFRNLLYELSEGIDSENLKDMIFLLKDSLPKTEMTSLSFLAFLEKQGKIDEDNLTCLEDLCKTVVPKLLRNIEKYKREKAIQIVTPPVDKEAESYQGEEELVSQTDVKTFLEALPRAAVYRMNRNHRGLCVIVNNHSFTSLKDRQGTHKDAEILSHVFQWLGFTVHIHNNVTKVEMEMVLQKQKCNPAHADGDCFVFCILTHGRFGAVYSSDEALIPIREIMSHFTALQCPRLAEKPKLFFIQACQGEEIQPSVSIEADALNPEQAPTSLQDSIPAEADFLLGLATVPGYVSFRHVEEGSWYIQSLCNHLKKLVPRHEDILSILTAVNDDVSRRVDKQGTKKQMPQPAFTLRKKLVFPVPLDALSL

SEQ ID NO: 18899 - protein, 522 aa, Homo sapiens
MKSQGQHWYSSSDKNCKVSFREKLLIIDSNLGVQDVENLKFLCIGLVPNKKLEKSSSASDVFEHLLAEDLLSEEDPFFLAELLYIIRQKKLLQHLNCTKEEVERLLPTRQRVSLFRNLLYELSEGIDSENLKDMIFLLKDSLPKTEMTSLSFLAFLEKQGKIDEDNLTCLEDLCKTVVPKLLRNIEKYKREKAIQIVTPPVDKEAESYQGEEELVSQTDVKTFLEALPQESWQNKHAGSNGNRATNGAPSLVSRGMQGASANTLNSETSTKRAAVYRMNRNHRGLCVIVNNHSFTSLKDRQGTHKDAEILSHVFQWLGFTVHIHNNVTKVEMEMVLQKQKCNPAHADGDCFVFCILTHGRFGAVYSSDEALIPIREIMSHFTALQCPRLAEKPKLFFIQACQGEEIQPSVSIEADALNPEQAPTSLQDSIPAEADFLLGLATVPGYVSFRHVEEGSWYIQSLCNHLKKLVPRHEDILSILTAVNDDVSRRVDKQGTKKQMPQPAFTLRKKLVFPVPLDALSL

SEQ ID NO: 18900 - protein, 273 aa, Homo sapiens
MKSQGQHWYSSSDKNCKVSFREKLLIIDSNLGVQDVENLKFLCIGLVPNKKLEKSSSASDVFEHLLAEDLLSEEDPFFLAELLYIIRQKKLLQHLNCTKEEVERLLPTRQRVSLFRNLLYELSEGIDSENLKDMIFLLKDSLPKTEMTSLSFLAFLEKQGKIDEDNLTCLEDLCKTVVPKLLRNIEKYKREKAIQIVTPPVDKEAESYQGEEELVSQTDVKTFLEALPQESWQNKHAGSNEGSCVQDESEPQRPLCHCQQPQLYLPEGQTRNP

SEQ ID NO: 18901 - protein, 478 aa, Homo sapiens
MKSQGQHWYSSSDKNCKVSFREKLLIIDSNLGVQDVENLKFLCIGLVPNKKLEKSSSASDVFEHLLAEDLLSEEDPFFLAELLYIIRQKKLLQHLNCTKEEVERLLPTRQRVSLFRNLLYELSEGIDSENLKDMIFLLKDSLPKTEMTSLSFLAFLEKQGKIDEDNLTCLEDLCKTVVPKLLRNIEKYKREKAIQIVTPPVDKEAESYQGEEELVSQTDVKTFLEALPRAAVYRMNRNHRGLCVIVNNHSFTSLKDRQGTHKDAEILSHVFQWLGFTVHIHNNVTKVEMEMVLQKQKCNPAHADGDCFVFCILTHGRFGAVYSSDEALIPIREIMSHFTALQCPRLAEKPKLFFIQACQGEEIQPSVSIEADALNPEQAPTSLQDSIPAEADFLLGLATVPGYVSFRHVEEGSWYIQSLCNHLKKLVPRMLKFLEKTMEIRGRKRTVWGAKQISATSLPTAISAQTPRPPMRRWSSVS

SEQ ID NO: 18902 - protein, 455 aa, Homo sapiens
MKSQGQHWYSSSDKNCKVSFREKLLIIDSNLGVQDVENLKFLCIGLVPNKKLEKSSSASDVFEHLLAEDLLSEEDPFFLAELLYIIRQKKLLQHLNCTKEEVERLLPTRQRVSLFRNLLYELSEGIDSENLKDMIFLLKDSLPKTEMTSLSFLAFLEKQGKIDEDNLTCLEDLCKTVVPKLLRNIEKYKREKAIQIVTPPVDKEAESYQGEEELVSQTDVKTFLEALPQESWQNKHAGSNEILSHVFQWLGFTVHIHNNVTKVEMEMVLQKQKCNPAHADGDCFVFCILTHGRFGAVYSSDEALIPIREIMSHFTALQCPRLAEKPKLFFIQACQGEEIQPSVSIEADALNPEQAPTSLQDSIPAEADFLLGLATVPGYVSFRHVEEGSWYIQSLCNHLKKLVPRHEDILSILTAVNDDVSRRVDKQGTKKQMPQPAFTLRKKLVFPVPLDALSL

SEQ ID NO: 18903 - protein, 247 aa, Homo sapiens
MKSQGQHWYSSSDKNCKVSFREKLLIIDSNLGVQDVENLKFLCIGLVPNKKLEKSSSASDVFEHLLAEDLLSEEDPFFLAELLYIIRQKKLLQHLNCTKEEVERLLPTRQRVSLFRNLLYELSEGIDSENLKDMIFLLKDSLPKTEMTSLSFLAFLEKQGKIDEDNLTCLEDLCKTVVPKLLRNIEKYKREKAIQIVTPPVDKEAESYQGEEELVSQTDVKTFLEALPEGVFVFLNEGDRGNSPDDL

SEQ ID NO: 18904 - protein, 923 aa, Homo sapiens
MSQFKRQRINPLPGGRNFSGTASTSLLGPPPGLLTPPVATELSQNARHLQGGEKQRVFTGIVTSLHDYFGVVDEEVFFQLSVVKGRLPQLGEKVLVKAAYNPGQAVPWNAVKVQTLSNQPLLKSPAPPLLHVAALGQKQGILGAQPQLIFQPHRIPPLFPQKPLSLFQTSHTLHLSHLNRFPARGPHGRLDQGRSDDYDSKKRKQRAGGEPWGAKKPRHDLPPYRVHLTPYTVDSPICDFLELQRRYRSLLVPSDFLSVHLSWLSAFPLSQPFSLHHPSRIQVSSEKEAAPDAGAEPITADSDPAYSSKVLLLSSPGLEELYRCCMLFVDDMAEPRETPEHPLKQIKFLLGRKEEEAVLVGGEWSPSLDGLDPQADPQVLVRTAIRCAQAQTGIDLSGCTKWWRFAEFQYLQPGPPRRLQTVVVYLPDVWTIMPTLEEWEALCQQKAAEAAPPTQEAQGETEPTEQAPDALEQAADTSRRNAETPEATTQQETDTDLPEAPPPPLEPAVIARPGCVNLSLHGIVEDRRPKERISFEVMVLAELFLEMLQRDFGYRVYKMLLSLPEKVVSPPEPEKEEAAKEEATKEEEAIKEEVVKEPKDEAQNEGPATESEAPLKEDGLLPKPLSSGGEEEEKPRGEASEDLCEMALDPELLLLRDDGEEEFAGAKLEDSEVRSVASNQSEMEFSSLQDMPKELDPSAVLPLDCLLAFVFFDANWCGYLHRRDLERILLTLGIRLSAEQAKQLVSRVVTQNICQYRSLQYSRQEGLDGGLPEEVLFGNLDLLPPPGKSTKPGAAPTEHKALVSHNGSLINVGSLLQRAEQQDSGRLYLENKIHTLELKLEESHNRFSATEVTNKTLAAEMQELRVRLAEAEETARTAERQKSQLQRLLQELRRRLTPLQLEIQRVVEKADSWVEKEEPAPSN

SEQ ID NO: 18905 - protein, 923 aa, Homo sapiens
MSQFKRQRINPLPGGRNFSGTASTSLLGPPPGLLTPPVATELSQNARHLQGGEKQRVFTGIVTSLHDYFGVVDEEVFFQLSVVKGRLPQLGEKVLVKAAYNPGQAVPWNAVKVQTLSNQPLLKSPAPPLLHVAALGQKQGILGAQPQLIFQPHRIPPLFPQKPLSLFQTSHTLHLSHLNRFPARGPHGRLDQGRSDDYDSKKRKQRAGGEPWGAKKPRHDLPPYRVHLTPYTVDSPICDFLELQRRYRSLLVPSDFLSVHLSWLSAFPLSQPFSLHHPSRIQVSSEKEAAPDAGAEPITADSDPAYSSKVLLLSSPGLEELYRCCMLFVDDMAEPRETPEHPLKQIKFLLGRKEEEAVLVGGEWSPSLDGLDPQADPQVLVRTAIRCAQAQTGIDLSGCTKWWRFAEFQYLQPGPPRRLQTVVVYLPDVWTIMPTLEEWEALCQQKAAEAAPPTQEAQGETEPTEQAPDALEQAADTSRRNAETPEATTQQETDTDLPEAPPPPLEPAVIARPGCVNLSLHGIVEDRRPKERISFEVMVLAELFLEMLQRDFGYRVYKMLLSLPEKVVSPPEPEKEEAAKEEATKEEEAIKEEVVKEPKDEAQNEGPATESEAPLKEDGLLPKPLSSGGEEEEKPRGEASEDLCEMALDPELLLLRDDGEEEFAGAKLEDSEVRSVASNQSEMEFSSLQDMPKELDPSAVLPLDCLLAFVFFDANWCGYLHRRDLERILLTLGIRLSAEQAKQLVSRVVTQNICQYRSLQYSRQEGLDGGLPEEVLFGNLDLLPPPGKSTKPGAAPTEHKALVSHNGSLINVGSLLQRAEQQDSGRLYLENKIHTLELKLEESHNRFSATEVTNKTLAAEMQELRVRLAEAEETARTAERQKSQLQRLLQELRRRLTPLQLEIQRVVEKVRWGWTRRQHSSFP

SEQ ID NO: 18906 - protein, 425 aa, Homo sapiens
MGEDAAQAEKFQHPGSDMRQEKPSSPSPMPSSTPSPSLNLGNTEEAIRDNSQVNAVTVLTLLDKLVNMLDAVQENQHKMEQRQISLEGSVKGIQNDLTKLSKYQASTSNTVSKLLEKSRKVSAHTRAVKERMDRQCAQVKRLENNHAQLLRRNHFKVLIFQEENEIPASVFVKQPVSGAVEGKEELPDENKSLEETLHTVDLSSDDDLPHDEEALEDSAEEKVEESRAEKIKRSSLKKVDSLKKAFSRQNIEKKMNKLGTKIVSVERREKIKKSLTSNHQKISSGKSSPFKVSPLTFGRKKVREGESHAENETKSEDLPSSEQMPNDQEEESFAEGHSEASLASALVEGEIAEEAAEKATSRGSNSGMDSNIDLTIVEDEEEESVALEQAQKVRYEGSYALTSEEAERSDGDPVQPAVLQVHQTS

SEQ ID NO: 18907 - protein, 739 aa, Homo sapiens [sequence omitted]

SEQ ID NO: 18908 - protein, 672 aa, Homo sapiens
MRAGRGATPARELFRDAAFPAADSSLFCDLSTPLAQFREDITWRRPQEICATPRLFPDDPREGQVKQGLLGDCWFLCACAALQKSRHLLDQVIPPGQPSWADQEYRGSFTCRIWQFGRWVEVTTDDRLPCLAGRLCFSRCQREDVFWLPLLEKVYAKVHGSYEHLWAGQVADALVDLTGGLAERWNLKGVAGSGGQQDRPGRWEHRTCRQLLHLKDQCLISCCVLSPRAGARELGEFHAFIVSDLRELQGQAGQCILLLRIQNPWGRRCWQGLWREGGEGWSQVDAAVASELLSQLQEGEFWVEEEEFLREFDELTVGYPVTEAGHLQSLYTERLLCHTRALPGAWVKGQSAGGCRNNSGFPSNPKFWLRVSEPSEVYIAVLQRSRLHAADWAGRARALVGDSHTSWSPASIPGKHYQAVGLHLWKVEKRRVNLPRVLSMPPVAGTACHAYDREVHLRCELSPGYYLAVPSTFLKDAPGEFLLRVFSTGRVSLSAIRAVAKNTTPGAALPAGEWGTVQLRGSWRVGQTAGGSRNFASYPTNPCFPFSVPEGPGPRCVRITLHQHCRPSDTEFHPIGFHIFQVPEGGRSQDAPPLLLQEPLLSCVPHRYAQEVSRLCLLPAGTYKVVPSTYLPDTEGAFTVTIATRIDRPSIHSQEMLGQFLQEVSIMAVMKT

SEQ ID NO: 18909 - protein, 544 aa, Homo sapiens
MRAGRGATPARELFRDAAFPAADSSLFCDLSTPLAQFREDITWRRPQEICATPRLFPDDPREGQVKQGLLGDCWFLCACAALQKSRHLLDQVIPPGQPSWADQEYRGSFTCRIWQFGRWVEVTTDDRLPCLAGRLCFSRCQREDVFWLPLLEKVYAKVHGSYEHLWAGQVADALVDLTGGLAERWNLKGVAGSGGQQDRPGRWEHRTCRQLLHLKDQCLISCCVLSPRAGARELGEFHAFIVSDLRELQGQAGQCILLLRIQNPWGRRCWQGLWREGGEGWSQVDAAVASELLSQLQEGEFWVEEEEFLREFDELTVGYPVTEAGHLQSLYTERLLCHTRALPGAWVKGQSAGGCRNNSGFPSNPKFWLRVSEPSEVYIAVLQRSRLHAADWAGRARALVGDSHTSWSPASIPGKHYQAVGLHLWKVEKRRVNLPRVLSMPPVAGTACHAYDREVHLRCELSPGYYLAVPSTFLKDAPGEFLLRVFSTGRVSLRALAPAASASLCISTAGPVTPSSTPSASISSRSQRVEGARTHPHCCCRSRC

SEQ ID NO: 18910 - protein, 517 aa, Homo sapiens
MRAGRGATPARELFRDAAFPAADSSLFCDLSTPLAQFREDITWRRPQEICATPRLFPDDPREGQVKQGLLGDCWFLCACAALQKSRHLLDQVIPPGQPSWADQEYRGSFTCRIWQFGRWVEVTTDDRLPCLAGRLCFSRCQREDVFWLPLLEKVYAKVHGSYEHLWAGQVADALVDLTGGLAERWNLKGVAGSGGQQDRPGRWEHRTCRQLLHLKDQCLISCCVLSPRAGARELGEFHAFIVSDLRELQGQAGQCILLLRIQNPWGRRCWQGLWREGGEGWSQVDAAVASELLSQLQEGEFWVEEEEFLREFDELTVGYPVTEAGHLQSLYTERLLCHTRALPGAWVKGQSAGGCRNNSGFPSNPKFWLRVSEPSEVYIAVLQRSRLHAADWAGRARALVGDSHTSWSPASIPGKHYQAVGLHLWKVPEGGRSQDAPPLLLQEPLLSCVPHRYAQEVSRLCLLPAGTYKVVPSTYLPDTEGAFTVTIATRIDRPSIHSQEMLGQFLQEVSIMAVMKT

SEQ ID NO: 18911 - protein, 513 aa, Homo sapiens
MRAGRGATPARELFRDAAFPAADSSLFCDLSTPLAQFREDITWRRPQEICATPRLFPDDPREGQVKQGLLGDCWFLCACAALQKSRHLLDQVIPPGQPSWADQEYRGSFTCRIWQFGRWVEVTTDDRLPCLAGRLCFSRCQREDVFWLPLLEKVYAKVHGSYEHLWAGQVADALVDLTGGLAERWNLKGVAGSGGQQDRPGRWEHRTCRQLLHLKDQCLISCCVLSPRAGARELGEFHAFIVSDLRELQGQAGQCILLLRIQNPWGRRCWQGLWREGGEGWSQVDAAVASELLSQLQEGEFWVEEEEFLREFDELTVGYPVTEAGHLQSLYTERLLCHTRALPGAWVKGQSAGGCRNNSGFPSNPKFWLRVSEPSEVYIAVLQRSRLHAADWAGRARALVGDSHTSWSPASIPGKHYQAVGLHLWKVEKRRVNLPRVLSMPPVAGTACHAYDREVHLRCELSPGYYLAVPSTFLKDAPGEFLLRVFSTGRVSLRSQRVEGARTHPHCCCRSRC

SEQ ID NO: 18912 - protein, 444 aa, Homo sapiens
MRAGRGATPARELFRDAAFPAADSSLFCDLSTPLAQFREDITWRRPQEICATPRLFPDDPREGQVKQGLLGDCWFLCACAALQKSRHLLDQVIPPGQPSWADQEYRGSFTCRIWQFGRWVEVTTDDRLPCLAGRLCFSRCQREDVFWLPLLEKVYAKVHGSYEHLWAGQVADALVDLTGGLAERWNLKGVAGSGGQQDRPGRWEHRTCRQLLHLKDQCLISCCVLSPRAGARELGEFHAFIVSDLRELQGQAGQCILLLRIQNPWGRRCWQGLWREGGEGWSQVDAAVASELLSQLQEGEFWVEEEEFLREFDELTVGYPVTEAGHLQSLYTERLLCHTRALPGAWVKGQSAGGCRNNSGFPSNPKFWLRVSEPSEVYIAVLQRSRLHAADWAGRARALVGDSHTSWSPASIPGKHYQAVGLHLWKGVTLGTTLFPVPSWMWPT

SEQ ID NO: 18913 - protein, 274 aa, Homo sapiens
MRAGRGATPARELFRDAAFPAADSSLFCDLSTPLAQFREDITWRRPQEICATPRLFPDDPREGQVKQGLLGDCWFLCACAALQKSRHLLDQVIPPGQPSWADQEYRGSFTCRIWQFGRWVEVTTDDRLPCLAGRLCFSRCQREDVFWLPLLEKGPWVLRAPVGRAGGGCPGGPDRRPGRKMEPEGRSRKRRPAGQARPLGAQDLSAAAPPEGPVSDQLLRAQPQSRCPGAGGVPCLHCLGPAGAPGSGGPVHPAAADPEPLGPAVLAGALERGG

SEQ ID NO: 18914 - protein, 139 aa, Homo sapiens
MRAGRGATPARELFRDAAFPAADSSLFCDLSTPLAQFREDITWRRPQEICATPRLFPDDPREGQVKQGLLGDCWFLCACAALQKSRHLLDQVSCPVQLPADWTCKVQPVWLEFPCLPISCRLRVSSDTSPDSATWGSWK

SEQ ID NO: 18915 - protein, 138 aa, Homo sapiens
MRAGRGATPARELFRDAAFPAADSSLFCDLSTPLAQFREDITWRRPQVPEGGRSQDAPPLLLQEPLLSCVPHRYAQEVSRLCLLPAGTYKVVPSTYLPDTEGAFTVTIATRIDRPSIHSQEMLGQFLQEVSIMAVMKT

SEQ ID NO: 18916 - protein, 719 aa, Homo sapiens
MASSSGRVTIQLVDEEAGVGAGRLQLFRGQSYEAIRAACLDSGILFRDPYFPAGPDALGYDQLGPDSEKAKGVKWMRPHEFCAEPKFICEDMSRTDVCQGSLGNCWFLAAAASLTLYPRLLRRVVPPGQDFQHGYAGVFHFQLWQFGRWMDVVVDDRLPVREGKLMFVRSEQRNEFWAPLLEKAYAKLHGSYEVMRGGHMNEAFVDFTGGVGEVLYLRQNSMGLFSALRHALAKESLVGATALSDRGEYRTEEGLVKGHAYSITGTHKVFLGFTKVRLLRLRNPWGCVEWTGAWSDSCPRWDTLPTECRDALLVKKEDGEFWMELRDFLLHFDTVQICSLSPEVLGPSPEGGGWHVHTFQGRWVRGFNSGGSQPNAETFWTNPQFRLTLLEPDEEDDEDEEGPWGGWGAAGARGPARGGRTPKCTVLLSLIQRNRRRLRAKGLTYLTVGFHVFQIPEELLGLWDSPRSHALLPRLLRADRSPLSARRDVTRRCCLRPGHYLVVPSTAHAGDEADFTLRVFSERRHTAVEIDDVISADLQSLQGPYLPLELGLEQLFQELAGEEEELNASQLQALLSIALEPARAHTSTPREIGLRTCEQLLQCFGHGQSLALHHFQQLWGYLLEWQAIFNKFDEDTSGTMNSYELRLALNAAGFHLNNQLTQTLTSRYRDSRLRVDFERFVSCVAHLTCIFCHCSQHLDGGEGVICLTHRQWMEVATFS

SEQ ID NO: 18917 - protein, 631 aa, Homo sapiens
MGLPRGPEGQGLPEVETREDEEQNVKLTEILELLVAAGYFRARIKGLSPFDKVVGGMTWCITTCNFDVDVDLLFQENSTIGQKIALSEKIVSVLPRMKCPHQLEPHQIQGMDFIHIFPVVQWLVKRAIETKEEMGDYIRSYSVSQFQKTYSLPEDDDFIKRKEKAIKTVVDLSEVYKPRRKYKRHQGAEELLDEESRIHATLLEYGRRYGFSRQSKMEKAEDKKTALPAGLSATEKADAHEEDELRAAEEQRIQSLMTKMTAMANEESRLTASSVGQIVGLCSAEIKQIVSEYAEKQSELSAEESPEKLGTSQLHRRKVISLNKQIAQKTKHLEELRASHTSLQARYNEAKKTLTELKTYSEKLDKEQAALEKIESKADPSILQNLRALVAMNENLKSQEQEFKAHCREEMTRLQQEIENLKAERAPRGDEKTLSSGEPPGTLTSAMTHDEDLDRRYNMEKEKLYKIRLLQARRNREIAILHRKIDEVPSRAELIQYQKRFIELYRQISAVHKETKQFFTLYNTLDDKKVYLEKEISLLNSIHENFSQAMASPAARDQFLRQMEQIVEGIKQSRMKMEKKKQENKMRRDQLNDQYLELLEKQRLYFKTVKEFKEEGRKNEMLLSKVKAKAS

SEQ ID NO: 18918 - protein, 784 aa, Homo sapiens
MQRLMMLLATSGACLGLLAVAAVAAAGANPAQRDTHSLLPTHRRQKRDWIWNQMHIDEEKNTSLPHHVGKIKSSVSRKNAKYLLKGEYVGKVFRVDAETGDVFAIERLDRENISEYHLTAVIVDKDTGENLETPSSFTIKVHDVNDNWPVFTHRLFNASVPESSAVGTSVISVTAVDADDPTVGDHASVMYQILKGKEYFAIDNSGRIITITKSLDREKQARYEIVVEARDAQGLRGDSGTATVLVTLQDINDNFPFFTQTKYTFVVPEDTRVGTSVGSLFVEDPDEPQNRMTKYSILRGDYQDAFTIETNPAHNEGIIKPMKPLDYEYIQQYSFIVEATDPTIDLRYMSPPAGNRAQVIINITDVDEPPIFQQPFYHFQLKENQKKPLIGTVLAMDPDAARHSIGYSIRRTSDKGQFFRVTKKGDIYNEKELDREVYPWYNLTVEAKELDSTGTPTGKESIVQVHIEVLDENDNAPEFAKPYQPKVCENAVHGQLVLQISAIDKDITPRNVKFKFILNTENNFTLTDNHDNTANITVKYGQFDREHTKVHFLPVVISDNGMPSRTGTSTLTVAVCKCNEQGEFTFCEDMAAQVGVSIQAVVAILLCILTITVITLLIFLRRRLRKQARAHGKSVPEIHEQLVTYDEEGGGEMDTTSYDVSVLNSVRRGGAKPPRPALDARPSLYAQVQKPPRHAPGAHGGPGEMAAMIEVKKDEADHDGDGPPYDTLHIYGYEGSESIAESLSSLGTDSSDSDVDYDFLNDWGPRFKMLAELYGSDPREELLY

SEQ ID NO: 18919 - protein, 669 aa, Homo sapiens
MQRLMMLLATSGACLGLLAVAAVAAAGANPAQRDTHSLLPTHRRQKRDWIWNQMHIDEEKNTSLPHHVGKIKSSVSRKNAKYLLKGEYVGKVFRVDAETGDVFAIERLDRENISEYHLTAVIVDKDTGENLETPSSFTIKVHDVNDNWPVFTHRLFNASVPESSAVGTSVISVTAVDADDPTVGDHASVMYQILKGKEYFAIDNSGRIITITKSLDREKQARYEIVVEARDAQGLRGDSGTATVLVTLQDINDNFPFFTQTKYTFVVPEDTRVGTSVGSLFVEDPDEPQNRMTKYSILRGDYQDAFTIETNPAHNEGIIKPMKPLDYEYIQQYSFIVEATDPTIDLRYMSPPAGNRAQVIINITDVDEPPIFQQPFYHFQLVLQISAIDKDITPRNVKFKFILNTENNFTLTDNHDNTANITVKYGQFDREHTKVHFLPVVISDNGMPSRTGTSTLTVAVCKCNEQGEFTFCEDMAAQVGVSIQAVVAILLCILTITVITLLIFLRRRLRKQARAHGKSVPEIHEQLVTYDEEGGGEMDTTSYDVSVLNSVRRGGAKPPRPALDARPSLYAQVQKPPRHAPGAHGGPGEMAAMIEVKKDEADHDGDGPPYDTLHIYGYEGSESIAESLSSLGTDSSDSDVDYDFLNDWGPRFKMLAELYGSDPREELLY

SEQ ID NO: 18920 - protein, 337 aa, Homo sapiens
MADAAPQLGKRKRELDVEEAHAASTEEKEAGVGNGTCAPVRLPFSGFRLQKVLRESARDKIIFLHGKVNEASGDGDGEDAVVILEKTPFQVEQVAQLLTGSPELQLQFSNDIYSTYHLFPPRQLNDVKTTVVYPATEKHLQKYLRQDLRLIRETGDDYRNITLPHLESQSLSIQWVYNILDKKAEADRIVFENPDPSDGFVLIPDLKWNQQQLDDLYLIAICHRRGIRSLRDLTPEHLPLLRNILHQGQEAILQRYRMKGDHLRVYLHYLPSYYHLHVHFTALGFEAPGSGVERAHLLAEVIENLECDPRHYQQRTLTFALRADDPLLKLLQEAQQS

SEQ ID NO: 18921 - protein, 916 aa, Homo sapiens
MTAGAGVLLLLLSLSGALRAHNEDLTTRETCKAGFSEDDYTALISQNILEGEKLLQVKFSSCVGTKGTQYETNSMDFKVGADGTVFATRELQVPSEQVAFTVTAWDSQTAEKWDAVVRLLVAQTSSPHSGHKPQKGKKVVALDPSPPPKDTLLPWPQHQNANGLRRRKRDWVIPPINVPENSRGPFPQQLVRIRSDKDNDIPIRYSITGVGADQPPMEVFSIDSMSGRMYVTRPMDREEHASYHLRAHAVDMNGNKVENPIDLYIYVIDMNDNRPEFINQVYNGSVDEGSKPGTYVMTVTANDADDSTTANGMVRYRIVTQTPQSPSQNMFTINSETGDIVTVAAGLDREKVQQYTVIVQATDMEGNLNYGLSNTATAIITVTDVNDNPPEFTASTFAGEVPENRVETVVANLTVMDRDQPHSPNWNAVYRIISGDPSGHFSVRTDPVTNEGMVTVVKAVDYELNRAFMLTVMVSNQAPLASGIQMSFQSTAGVTISIMDINEAPYFPSNHKLIRLEEGVPPGTVLTTFSAVDPDRFMQQAVRYSKLSDPASWLHINATNGQITTAAVLDRESLYTKNNVYEATFLAADNGIPPASGTGTLQIYLIDINDNAPELLPKEAQICEKPNLNAINITAADADVDPNIGPYVFELPFVPAAVRKNWTITRLNGDYAQLSLRILYLEAGMYDVPIIVTDSGNPPLSNTSIIKVKVCPCDDNGDCTTIGAVAAAGLGTGAIVAILICILILLTMVLLFVMWMKRREKERHTKQLLIDPEDDVRDNILKYDEEGGGEEDQDYDLSQLQQPEAMGHVPSKAPGVRRVDERPVGAEPQYPIRPMVPHPGDIGDFINEGLRAADNDPTAPPYDSLLVFDYEGSGSTAGSVSSLNSSSSGDQDYDYLNDWGPRFKKLADMYGGGEED

SEQ ID NO: 18922 - protein, 842 aa, Homo sapiens
MDFKVGADGTVFATRELQVPSEQVAFTVTAWDSQTAEKWDAVVRLLVAQTSSPHSGHKPQKGKKVVALDPSPPPKDTLLPWPQHQNANGLRRRKRDWVIPPINVPENSRGPFPQQLVRIRSDKDNDIPIRYSITGVGADQPPMEVFSIDSMSGRMYVTRPMDREEHASYHLRAHAVDMNGNKVENPIDLYIYVIDMNDNRPEFINQVYNGSVDEGSKPGTYVMTVTANDADDSTTANGMVRYRIVTQTPQSPSQNMFTINSETGDIVTVAAGLDREKVQQYTVIVQATDMEGNLNYGLSNTATAIITVTDVNDNPPEFTASTFAGEVPENRVETVVANLTVMDRDQPHSPNWNAVYRIISGDPSGHFSVRTDPVTNEGMVTVVKAVDYELNRAFMLTVMVSNQAPLASGIQMSFQSTAGVTISIMDINEAPYFPSNHKLIRLEEGVPPGTVLTTFSAVDPDRFMQQAVRYSKLSDPASWLHINATNGQITTAAVLDRESLYTKNNVYEATFLAADNGIPPASGTGTLQIYLIDINDNAPELLPKEAQICEKPNLNAINITAADADVDPNIGPYVFELPFVPAAVRKNWTITRLNGDYAQLSLRILYLEAGMYDVPIIVTDSGNPPLSNTSIIKVKVCPCDDNGDCTTIGAVAAAGLGTGAIVAILICILILLTMVLLFVMWMKRREKERHTKQLLIDPEDDVRDNILKYDEEGGGEEDQDYDLSQLQQPEAMGHVPSKAPGVRRVDERPVGAEPQYPIRPMVPHPGDIGDFINEGLRAADNDPTAPPYDSLLVFDYEGSGSTAGSVSSLNSSSSGDQDYDYLNDWGPRFKKLADMYGGGEED

SEQ ID NO: 18923 - protein, 190 aa, Homo sapiens
MTAVGVQAQRPLGQRQPRRSFFESFIRTLIITCVALAVVLSSVSICDGHWLLAEDRLFGLWHFCTTTNQTICFRDLGQAHVPGLAVGMGLVRSVGALAVVAAIFGLEFLMVSQLCEDKHSQCKWVMGSILLLVSFVLSSGGLLGFVILLRNQVTLIGFTLMFWCEFTASFLLFLNAISGLHINSITHPWE

SEQ ID NO: 18924 - protein, 211 aa, Homo sapiens
MRPEVGREPAALQPRQRPRSDHQLHRSPFTVPPRTPACRSPGPSPPIAVALEVKPQLEDAIGKLAAEAVAVRVFPLAVDDLESDVLVGRPRVEAQDGEILVVGAGLQEVLGRGALVDEVGVEDVELVSLHDLGRWVVKVVVRLVVLVPLEARVHAVEEARLAWPVLVGPQDGGCPGSARTAAGKSFHHLWPQGQWASKPRMNEGTPQCACR

SEQ ID NO: 18925 - protein, 652 aa, Homo sapiens
MPPPLPLLLLTVLVVAAARPGCEFERNPAGECHRPPAADSATCVDLQLRTCSDAAYNHTTFPNLLQHRSWEVVEASSEYILLSVLHQLLEGQCNPDLRLLGCAVLAPRCEGGWVRRPCRHICEGLREVCQPAFDAIDMAWPYFLDCHRYFTREDEGCYDPLEKLRGGLEADEALPSGLPPTFIRFSHHSYAQMVRVLRRTASRCAHVARTYSIGRSFDGRELLVIEFSSRPGQHELMEPEVKLIGNIHGNEVAGREMLIYLAQYLCSEYLLGNPRIQRLLNTTRIHLLPSMNPDGYEVAAAEGAGYNGWTSGRQNAQNLDLNRNFPDLTSEYYRLAETRGARSDHIPIPQHYWWGKVAPETKAIMKWMQTIPFVLSASLHGGDLVVSYPFDFSKHPQEEKMFSPTPDEKMFKLLSRAYADVHPMMMDRSENRCGGNFLKRGSIINGADWYSFTGGMSDFNYLHTNCFEITVELGCVKFPPEEALYILWQHNKESLLNFVETVHRGIKGVVTDKFGKPVKNARISVKGIRHDITTAPDGDYWRLLPPGIHIVIAQAPGYAKVIKKVIIPARMKRAGRVDFILQPLGMGPKNFIHGLRRTGPHDPLGGASSLGEATEPDPLRARRQPSADGSKPWWWSYFTSLSTHRPRWLLKY

SEQ ID NO: 18926 - protein, 641 aa, Homo sapiens
MPPPLPLLLLTVLVVAAARPGCEFERNPAATCVDLQLRTCSDAAYNHTTFPNLLQHRSWEVVEASSEYILLSVLHQLLEGQCNPDLRLLGCAVLAPRCEGGWVRRPCRHICEGLREVCQPAFDAIDMAWPYFLDCHRYFTREDEGCYDPLEKLRGGLEADEALPSGLPPTFIRFSHHSYAQMVRVLRRTASRCAHVARTYSIGRSFDGRELLVIEFSSRPGQHELMEPEVKLIGNIHGNEVAGREMLIYLAQYLCSEYLLGNPRIQRLLNTTRIHLLPSMNPDGYEVAAAEGAGYNGWTSGRQNAQNLDLNRNFPDLTSEYYRLAETRGARSDHIPIPQHYWWGKVAPETKAIMKWMQTIPFVLSASLHGGDLVVSYPFDFSKHPQEEKMFSPTPDEKMFKLLSRAYADVHPMMMDRSENRCGGNFLKRGSIINGADWYSFTGGMSDFNYLHTNCFEITVELGCVKFPPEEALYILWQHNKESLLNFVETVHRGIKGVVTDKFGKPVKNARISVKGIRHDITTAPDGDYWRLLPPGIHIVIAQAPGYAKVIKKVIIPARMKRAGRVDFILQPLGMGPKNFIHGLRRTGPHDPLGGASSLGEATEPDPLRARRQPSADGSKPWWWSYFTSLSTHRPRWLLKY

SEQ ID NO: 18927 - protein, 515 aa, Homo sapiens
MAWPYFLDCHRYFTREDEGCYDPLEKLRGGLEADEALPSGLPPTFIRFSHHSYAQMVRVLRRTASRCAHVARTYSIGRSFDGRELLVIEFSSRPGQHELMEPEVKLIGNIHGNEVAGREMLIYLAQYLCSEYLLGNPRIQRLLNTTRIHLLPSMNPDGYEVAAAEGAGYNGWTSGRQNAQNLDLNRNFPDLTSEYYRLAETRGARSDHIPIPQHYWWGKVAPETKAIMKWMQTIPFVLSASLHGGDLVVSYPFDFSKHPQEEKMFSPTPDEKMFKLLSRAYADVHPMMMDRSENRCGGNFLKRGSIINGADWYSFTGGMSDFNYLHTNCFEITVELGCVKFPPEEALYILWQHNKESLLNFVETVHRGIKGVVTDKFGKPVKNARISVKGIRHDITTAPDGDYWRLLPPGIHIVIAQAPGYAKVIKKVIIPARMKRAGRVDFILQPLGMGPKNFIHGLRRTGPHDPLGGASSLGEATEPDPLRARRQPSADGSKPWWWSYFTSLSTHRPRWLLKY

SEQ ID NO: 18928 - protein, 128 aa, Homo sapiens
MTSLFAQEIRLSKRHEEIVSQRLMLLQQMENKLGDQHTEKASQLQTVETAFKRNLSLLKDIEAAEKSLQTRIHPLPRPEVVSLETRYWASVEEYIPKWEQFLLGRAPYPFAVENQNEAENTIQNEAQR

SEQ ID NO: 18929 - protein, 242 aa, Homo sapiens
MERNDIINFKALEKELQAALTADEKYKRENAAKLRAVEQRVASYEEFRGIVLASHLKPLERKDKMGGKRTVPWNCHTIQGRTFQDVATEISPEKAPLQPETSADFYRDWRRHLPSGPERYQALLQLGGPRLGCLFQTDVGFGLLGELLVALADHVGPADRAAVLGILCSLASTGRFTLNLSLLSRAERESCKGLFQKLQAMGNPRSVKEGLSWEEQGLEEQSGGLQEEERLLQELLELYQVD

SEQ ID NO: 18930 - protein, 98 aa, Homo sapiens
MERNDIINFKALEKELQAALTADEKYKRENAAKLRAVEQRVASYEEFRGIVLASHLKPLERKDKMGGKRTVPWNCHTIQGRTFQDVATEISPNSWKSS

SEQ ID NO: 18931 - protein, 344 aa, Homo sapiens
MDKFRMLFQHFQSSSESVMNGICLLLAAVTVKLYSSFDFNCPCLVHYNALYGLGLLLTPPLALFLCGLLANRQSVVMVEEWRRPAGHRRKDPGIIRYMCSSVLQRALAAPLVWILLALLDGKCFVCAFSSSVDPEKFLDFANMTPSQVQLFLAKVPCKEDELVRDSPARKAVSRYLRCLSQAIGWSVTLLLIIAAFLARCLRPCFDQTVFLQRRYWSNYVDLEQKLFDETCCEHARDFAHRCVLHFFASMRSELQARGLRRGNAGRRLELPAVPEPPEGLDSGSGKAHLRAISSREQVDRLLSTWYSSKPPLDLAASPGLCGGGLSHRAPTLALGTRLSQHTDV

SEQ ID NO: 18932 - protein, 1237 aa, Homo sapiens
MVSWGGEKRGGAEGSPKPAVYATRKTGSVRSQEDQWYLGYPGDQWSSGFSYSWWKNSVGSESKHGEGALDQPQHDVRLEDLGELHRAARSGDVPGVEHVLVPGDTGVDKRDRKKSIQQLVPEYKEKQTPESLPQNNNPDWHPTNLTLSDETCQRSKNLKVDDKCPSVSPSMPENQSATKELGQMNLTEREKMDTGVKTSQEPEMAKDCDREDIPIYPVLPHVQKSEEMRIEQGKLEWKNQLKLVINELKQRFGEIYEKYKIPACPEEEPLLDNSTRGTDVKDIPFNLTNNIPGCEEEDASEISVSVVFETFPEQKEPSLKNIIHSYYHPYSGSQEHVCQSSSKLHLHENKLDCDNDNKPGIGHIFSTDKNFHNDASTKKARNPEVVTVEMKEDQEFDLQMTKNMNQNSDSGSTNNYKSLKPKLENLSSLPPDSDRTSEVYLHEELQQDMQKFKNEVNTLEEEFLALKKENVQLHKEVEEEMEKHRSNSTELSGTLTDGTTVGNDDDGLNQQIPRKENGEHDRLALKQENEEKRNADMLYNKDSEQLRIKEEECGKVVETKQQLKWNLRRLVKELRTVVQERNDAQKQLSEEQDARILQDQILTSKQKELEMAQKKRNPEISHRHQKEKDLFHENCMLQEEIALLRLEIDTIKNQNKQKEKKYFEDIEVVKEKNDNLQKIIKRNEETLTETILQYSGQLNNLTAENKMLNSELENGKENQERLEIEMESYRCRLAAAVHDCDQSQTARDLKLDFQRTRQEWVRLHDKMKVDMSGLQAKNEILSEKLSNAESKINSLQIQLHNTRDALGRESLILERVQRDLSQTQCQKKETEQMYQSKLKKYIAKQESVEERLSQLQSENMLLRQQLDDVHKKANSQEKTISTIQDQFHSAAKNLQAESEKQILSLQEKNKELMDEYNHLKERMDQCEKEKAGRKIDLTEAQETVPSRCLHLDAENEVLQLQQTLFSMKAIQKQCETLQKNKKQLKQEVVNLKSYMERNMLERGEAEWHKLLIEERARKEIEEKLNEAILTLQKQAAVSHEQLAQLREDNTTSIKTQMELTVIDLESEISRIKTSQADFNKTKLERYKELYLEEVKVRESLSNELSRTNEMIAEVSTQLTVEKEQTRSRSLFTAYATRPVLESPCVGNLNDSEGLNRKHIPRKKRSALKDMESYLLKMQQKLQNDLTAEVAGSSQTGLHRIPQCSSFSSSSLHLLLCSICQPFFLILQLLLNMNLDPI

SEQ ID NO: 18933 - protein, 279 aa, Homo sapiens
MAALGRPFSGLPLSGGSDFLQPPQPAFPGRAFPPGADGAELAPRPGPRAVPSSPAGSAARGRVSVHCKKKHKREEEEDDDCPVRKKRITEAELCAGPNDWILCAHQDVEGHGVNPSVSGLSIPGILDVICEEMDQTTGEPQCEVARRKLQEIEDRIIDEDEEVEADRNVNHLPSLVLSDTMKTGLKREFDEVFTKKMIESMSRPSMELVLWKPLPELLSDKPKPSSNTKNYTGESQAKHVAAGTAFPQRTELFSEPRPTGMSLYNSLETATSTEEEMEL

SEQ ID NO: 18934 - protein, 170 aa, Homo sapiens
MAALGRPFSGLSIPGILDVICEEMDQTTGEPQCEVARRKLQEIEDRIIDEDEEVEADRNVNHLPSLVLSDTMKTGLKREFDEVFTKKMIESMSRPSMELVLWKPLPELLSDKPKPSSNTKNYTGESQAKHVAAGTAFPQRTELFSEPRPTGMSLYNSLETATSTEEEMEL

SEQ ID NO: 18935 - protein, 261 aa, Homo sapiens
MAALGRPFSGLPLSGGSDFLQPPQPAFPGRAFPPGADGAELAPRPGPRAVPSSPAGSAARGRCPVRKKRITEAELCAGPNDWILCAHQDVEGHGVNPSVSGLSIPGILDVICEEMDQTTGEPQCEVARRKLQEIEDRIIDEDEEVEADRNVNHLPSLVLSDTMKTGLKREFDEVFTKKMIESMSRPSMELVLWKPLPELLSDKPKPSSNTKNYTGESQAKHVAAGTAFPQRTELFSEPRPTGMSLYNSLETATSTEEEMEL

SEQ ID NO: 18936 - protein, 204 aa, Homo sapiens
MAALGRPFSGLPLSGGSDFLQPPQPAFPGRAFPPGADGAELAPRPGPRAVPSSPAGSAARGRVSVHCKKKHKREEEEDDEIIDEDEEVEADRNVNHLPSLVLSDTMKTGLKREFDEVFTKKMIESMSRPSMELVLWKPLPELLSDKPKPSSNTKNYTGESQAKHVAAGTAFPQRTELFSEPRPTGMSLYNSLETATSTEEEMEL

SEQ ID NO: 18937 - protein, 328 aa, Homo sapiens
MYTLHTKRVKAAARQMWTSNLSKVRQSLKNVYHKCKIRHQDSTGYPTVTSDDCNQDDDSYDGKMNLPVVLQDVKTAQVELFSQMTDIVHMIPKVQEKTDLYQKQMEVLETRMNVNEDKQCTTTKDILSMKEDIKALKKKVTELEIQNSCSTIHCLEILEGERGKEITELLYKLIQPATLKNTLASTDMEISSAEPEKVPSYPKSTDHLEKKTISPQMKTLKKRNHQNASRSFEKAKPNIYIYPDFSTWIKLTFVHGGKWTFFLSATKLEEFIQWLLSRPTILPEEPQVITQRYCPFTGPILSLTTICLSIFNNIYGFICSLKEEVTRL

SEQ ID NO: 18938 - protein, 941 aa, Homo sapiens
MSSEFLAELHWEDGFAIPVANEENKLLEDQLSKLKDERASLQDELREYEERINSMTSHFKNVKQELSITQSLCKARERETESEEHFKAIAQRELGRVKDEIQRLENEMASILEKKSDKENGIFKATQKLDGLKCQMNWDQQALEAWLEESAHKDSDALTLQKYAQQDDNKIRALTLQLERLTLECNQKRKILDNELTETISAQLELDKAAQDFRKIHNERQELIKQWENTIEQMQKRDGDIDNCALELARIKQETREKENLVKEKIKFLESEIGNNTEFEKRISVADRKLLKCRTAYQDHETSRIQLKGELDSLKATVNRTSSDLEALRKNISKIKKDIHEETARLQKTKNHNEIIQTKLKEITEKTMSVEEKATNLEDMLKEEEKDVKEVDVQLNLIKGVLFKKAQELQTETMKEKAVLSEIEGTRSSLKHLNHQLQKLDFETLKQQEIMYSQDFHIQQVERRMSRLKGEINSEEKQALEAKIVELRKSLEEKKSTCGLLETQIKKLHNDLYFIKKAHSKNSDEKQSLMTKINELNLFIDRSEKELDKAKGFKQDLMIEDNLLKLEVKRTREMLHSKAEEVLSLEKRKQQLYTAMEERTEEIKVHKTMLASQIRYVDQERENISTEFRERLSKIEKLKNRYEILTVVMLPPEGEEEKTQAYYVIKAAQEKEELQREGDCLDAKINKAEKEIYALENTLQVLNSCNNNYKQSFKKVTPSSDEYELKIQLEEQKRAVDEKYRYKQRQIRELQEDIQSMENTLDVIEHLANNVKEKLSEKQAYSFQLSKETEEQKPKLERVTKQCAKLTKEIRLLKDTKDETMEEQDIKLREMKQFHKVIDEMLVDIIEENTEIRIILQTYFQQSGLELPTASTKGSRQSSRSPSHTSLSARSSRSTSTSTSQSSIKVLELKFPASSSLVGSPSRPSSASSSSSNVKSKKSSK

SEQ ID NO: 18939 - protein, 755 aa, Homo sapiens
MEYIFPNTGVLWSWLINILCNRRIVWFTSSQLPRGPPASSGGHSFHTLRERSESRLFVESYAAAWQPPGTSGGASCCSSLSAQVMSSEFLAELHWEDGFAIPVANEENKLLEDQLSKLKDERASLQDELREYEERINSMTSHFKNVKQELSITQSLCKARERETESEEHFKAIAQRELGRVKDEIQRLENEMASILEKKSDKENGIFKATQKLDGLKCQMNWDQQALEAWLEESAHKDSDALTLQKYAQQDDNKIRALTLQLERLTLECNQKRKILDNELTETISAQLELDKAAQDFRKIHNERQELIKQWENTIEQMQKRDGDIDNCALELARIKQETREKENLVKEKIKFLESEIGNNTEFEKRISVADRKLLKCRTAYQDHETSRIQLKGELDSLKATVNRTSSDLEALRKNISKIKKDIHEETARLQKTKNHNEIIQTKLKEITEKTMSVEEKATNLEDMLKEEEKDVKEVDVQLNLIKGVLFKKAQELQTETMKEKAVLSEIEGTRSSLKHLNHQLQKLDFETLKQQEIMYSQDFHIQQVERRMSRLKGEINSEEKQALEAKIVELRKSLEEKKSTCGLLETQIKKLHNDLYFIKKAHSKNSDEKQSLMTKINELNLFIDRSEKELDKAKGFKQDLMIEDNLLKLEVKRTREMLHSKAEEVLSLEKRKQQLYTAMEERTEEIKVHKTMLASQIRYVDQERENISTEFRERLSKIEKLKNRYEILTVVMLPPEGEEEKTQAYYVIKVMSMS

SEQ ID NO: 18940 - protein, 684 aa, Homo sapiens
MNPPAAFLAGRQNIGSEVEISTIEKQRKELQLLIGELKDRDKELNDMVAVHQQQLLSWEEDRQKVLTLEERCSKLEGELHKRTEIIRSLTKKVKALESNQMECQTALQKTQLQLQEMAQKATHSSLLSEDLEARNETLSNTLVELSAQVGQLQAREQALTTMIKLKDKDIIEAVNHIADCSGKFKMLEHALRDAKMAETCIVKEKQDYKQKLKALKIEVNKLKEDLNEKTTENNEQREEIIRLKQEKSCLHDELLFTVEREKRKDELLNIAKSKQERTNSELHNLRQIYVKQQSDLQFLNFNVENSQELIQMYDSKMEESKALDSSRDMCLSDLENNHPKVDIKREKNQKSLFKDQKFEAMLVQQNRSDKSSCDECKEKKQQIDTVFGEKSVITLSSIFTKDLVEKHNLPWSLGGKTQIEPENKITLCKIHTKSPKCHGTGVQNEGKQPSETPTLSDEKQWHDVSVYLGLTNCPSSKHPEKLDVECQDQMERSEISCCQKNEACLGESGMCDSKCCHPSNFIIEAPGHMSDVEWMSIFKPSKMQRIVRLKSGCTCSESICGTQHDSPASELIAIQDSHSLGSSKSALREDETESSSNKKNSPTSLLIYKDAPAFNEKASIVLPSQDDFSPTSKLQRLLAESRQMVTDLELSTLLPISHENLTGSATNKSEVPEESAQKNTFVSY

SEQ ID NO: 18941 - protein, 682 aa, Homo sapiens
MNPPAAFLAGRQNIGSEVEISTIEKQRKELQLLIGELKDRDKELNDMVAVHQQQLLSWEEDRQKVLTLEERCSKLEGELHKRTEIIRSLTKKVKALESNQMECQTALQKTQLQLQEMAQKATHSSLLSEDLEARNETLSNTLVELSAQVGQLQAREQALTTMIKLKDKDIIEAVNHIADCSGKFKMLEHALRDAKMAETCIVKEKQDYKQKLKALKIEVNKLKEDLNEKTTENNEQREEIIRLKQEKSCLHDELLFTVEREKRKDELLNIAKSKQERTNSELHNLRQIYVKQQSDLQFLNFNVENSQELIQMYDSKMEESKALDSSRDMCLSDLENNHPKVDIKREKNQKSLFKDQKFEAMLVQQNRSDKSSCDECKEKKQQIDTVFGEKSVITLSSIFTKDLVEKHNLPWSLGGKTQIEPENKITLCKIHTKSPKCHGTGVQNEGKQPSETPTLSDEKQWHDVSVYLGLTNCPSSKHPEKLDVECQDQMERSEISCCQKNEACLGESGMCDSKCCHPSNFIIEAPGHMSDVEWMSIFKPSKMQRIVRLKSGCTCSESICGTQHDSPASELIAIQDSHSLGSSKSALREDETESSSNKKNSPTSLLIYKDAPAFNEKASIVLPSQDDFSPTSKLQRLLAESRQMVTDLELSTLLPISHENLTGSATNISHLCGRQKADTNTE

SEQ ID NO: 18942 - protein, 445 aa, Homo sapiens
MPNSSPKDPTTASGNGSKVEREKRKDELLNIAKSKQERTNSELHNLRQIYVKQQSDLQFLNFNVENSQELIQMYDSKMEESKALDSSRDMCLSDLENNHPKVDIKREKNQKSLFKDQKFEAMLVQQNRSDKSSCDECKEKKQQIDTVFGEKSVITLSSIFTKDLVEKHNLPWSLGGKTQIEPENKITLCKIHTKSPKCHGTGVQNEGKQPSETPTLSDEKQWHDVSVYLGLTNCPSSKHPEKLDVECQDQMERSEISCCQKNEACLGESGMCDSKCCHPSNFIIEAPGHMSDVEWMSIFKPSKMQRIVRLKSGCTCSESICGTQHDSPASELIAIQDSHSLGSSKSALREDETESSSNKKNSPTSLLIYKDAPAFNEKASIVLPSQDDFSPTSKLQRLLAESRQMVTDLELSTLLPISHENLTGSATNKSEVPEESAQKNTFVSY

SEQ ID NO: 18943 - protein, 141 aa, Homo sapiens
MDSSACKKSHQSKKWRIQAQENFAKKFPYRLSWLTEPDPEPLQPWEVTNDSNTVQLPLQKRLVPTRSIPVRGLGAPDFTSPSGSCPAPLPAPSPPPLCNLWELKLLSRRFPRQLAFLLSTRHTEAACPQTSKAAGLSRGLS

SEQ ID NO: 18944 - protein, 102 aa, Homo sapiens
MDSSACKKSHQSKKWRIQAQENFAKKFPYRLSWLTEPDPEPLQPWEVTNDSNTVQLPLQKRLVPTRSIPVRGVGVRIKKSMNVTSRTLSQMYTHTGKWAPFH

SEQ ID NO: 18945 - protein, 1977 aa, Homo sapiens
MSESEGGKDTTPEPSPANGAGPGPEWGLCPGPPAVEGESSGASGLGTPKRRNQHSKHKTVAVASAQRSPRALFCLTLANPLRRSCISIVEWKPFDILILLTIFANCVALGVYIPFPEDDSNTANHNLEQVEYVFLVIFTVETVLKIVAYGLVLHPSAYIRNGWNLLDFIIVVVGLFSVLLEQGPGRPGDAPHTGGKPGGFDVKALRAFRVLRPLRLVSGVPSLHIVLNSIMKALVPLLHIALLVLFVIIIYAIIGLELFLGRMHKTCYFLGSDMEAEEDPSPCASSGSGRACTLNQTECRGRWPGPNGGITNFDNFFFAMLTVFQCVTMEGWTDVLYWMQDAMGYELPWVYFVSLVIFGSFFVLNLVLGVLSGEFSKEREKAKARGDFQKQREKQQMEEDLRGYLDWITQAEELDMEDPSADDNLGSMAEEGRAGHRPQLAELTNRRRGRLRWFSHSTRSTHSTSSHASLPASDTGSMTETQGDEDEEEGALASCTRCLNKIMKTRVCRRLRRANRVLRARCRRAVKSNACYWAVLLLVFLNTLTIASEHHGQPVWLTQIQEYANKVLLCLFTVEMLLKLYGLGPSAYVSSFFNRFDCFVVCGGILETTLVEVGAMQPLGISVLRCVRLLRIFKVTRHWASLSNLVASLLNSMKSIASLLLLLFLFIIIFSLLGMQLFGGKFNFDQTHTKRSTFDTFPQALLTVFQILTGEDWNVVMYDGIMAYGGPFFPGMLVCIYFIILFICGNYILLNVFLAIAVDNLASGDAGTAKDKGGEKSNEKDLPQENEGLVPGVEKEEEEGARREGADMEEEEEEEEEEEEEEEEEGAGGVELLQEVVPKEKVVPIPEGSAFFCLSQTNPLRKGCHTLIHHHVFTNLILVFIILSSVSLAAEDPIRAHSFRNHILGYFDYAFTSIFTVEILLKMTVFGAFLHRGSFCRSWFNMLDLLVVSVSLISFGIHSSAISVVKILRVLRVLRPLRAINRAKGLKHVVQCVFVAIRTIGNIMIVTTLLQFMFACIGVQLFKGKFYTCTDEAKHTPQECKGSFLVYPDGDVSRPLVRERLWVNSDFNFDNVLSAMMALFTVSTFEGWPALLYKAIDAYAEDHGPIYNYRVEISVFFIVYIIIIAFFMMNIFVGFVIITFRAQGEQEYQNCELDKNQRQCVEYALKAQPLRRYIPKNPHQYRVWATVNSAAFEYLMFLLILLNTVALAMQHYEQTAPFNYAMDILNMVFTGLFTIEMVLKIIAFKPKHYFTDAWNTFDALIVVGSIVDIAVTEVNNGGHLGESSEDSSRISITFFRLFRVMRLVKLLSKGEGIRTLLWTFIKSFQALPYVALLIAMIFFIYAVIGMQMFGKVALQDGTQINRNNNFQTFPQAVLLLFRCATGEAWQEIMLASLPGNRCDPESDFGPGEEFTCGSNFAIAYFISFFMLCAFLIINLFVAVIMDNFDYLTRDWSILGPHHLDEFKRIWSEYDPGAKGRIKHLDVVALLRRIQPPLGFGKLCPHRVACKRLVAMNMPLNSDGTVTFNATLFALVRTSLKIKTEGNLEQANQELRIVIKKIWKRMKQKLLDEVIPPPDEEEVTVGKFYATFLIQDYFRKFRRRKEKGLLGNDAAPSTSSALQAGLRSLQDLGPEMRQALTCDTEEEEEEGQEGVEEEDEKDLETNKATMVSQPSARRGSGISVSLPVGDRLPDSLSFGPSDDDRGTPTSSQPSVPQAGSNTHRRGSGALIFTIPEEGNSQPKGTKGQNKQDEDEEVPDRLSYLDEQAGTPPCSVLLPPHRAQRYMDGHLVPRRRLLPPTPAGRKPSFTIQCLQRQGSCEDLPIPGTYHRGRNSGPNRAQGSWATPPQRGRLLYAPLLLVEEGAAGEGYLGRSSGPLRTFTCLHVPGTHSDPSHGKRGSADSLVEAVLISEGLGLFARDPRFVALAKQEIADACRLTLDEMDNAASDLLAQGTSSLYSDEESILSRFDEEDLGDEMACVHAL

SEQ ID NO: 18946 - protein, 1966 aa, Homo sapiens
MSESEGGKDTTPEPSPANGAGPGPEWGLCPGPPAVEGESSGASGLGTPKRRNQHSKHKTVAVASAQRSPRALFCLTLANPLRRSCISIVEWKPFDILILLTIFANCVALGVYIPFPEDDSNTANHNLEQVEYVFLVIFTVETVLKIVAYGLVLHPSAYIRNGWNLLDFIIVVVGLFSVLLEQGPGRPGDAPHTGGKPGGFDVKALRAFRVLRPLRLVSGVPSLHIVLNSIMKALVPLLHIALLVLFVIIIYAIIGLELFLGRMHKTCYFLGSDMEAEEDPSPCASSGSGRACTLNQTECRGRWPGPNGGITNFDNFFFAMLTVFQCVTMEGWTDVLYWMQDAMGYELPWVYFVSLVIFGSFFVLNLVLGVLSGEFSKEREKAKARGDFQKQREKQQMEEDLRGYLDWITQAEELDMEDPSADDNLGPQLAELTNRRRGRLRWFSHSTRSTHSTSSHASLPASDTGSMTETQGDEDEEEGALASCTRCLNKIMKTRVCRRLRRANRVLRARCRRAVKSNACYWAVLLLVFLNTLTIASEHHGQPVWLTQIQEYANKVLLCLFTVEMLLKLYGLGPSAYVSSFFNRFDCFVVCGGILETTLVEVGAMQPLGISVLRCVRLLRIFKVTRHWASLSNLVASLLNSMKSIASLLLLLFLFIIIFSLLGMQLFGGKFNFDQTHTKRSTFDTFPQALLTVFQILTGEDWNVVMYDGIMAYGGPFFPGMLVCIYFIILFICGNYILLNVFLAIAVDNLASGDAGTAKDKGGEKSNEKDLPQENEGLVPGVEKEEEEGARREGADMEEEEEEEEEEEEEEEEEGAGGVELLQEVVPKEKVVPIPEGSAFFCLSQTNPLRKGCHTLIHHHVFTNLILVFIILSSVSLAAEDPIRAHSFRNHILGYFDYAFTSIFTVEILLKMTVFGAFLHRGSFCRSWFNMLDLLVVSVSLISFGIHSSAISVVKILRVLRVLRPLRAINRAKGLKHVVQCVFVAIRTIGNIMIVTTLLQFMFACIGVQLFKGKFYTCTDEAKHTPQECKGSFLVYPDGDVSRPLVRERLWVNSDFNFDNVLSAMMALFTVSTFEGWPALLYKAIDAYAEDHGPIYNYRVEISVFFIVYIIIIAFFMMNIFVGFVIITFRAQGEQEYQNCELDKNQRQCVEYALKAQPLRRYIPKNPHQYRVWATVNSAAFEYLMFLLILLNTVALAMQHYEQTAPFNYAMDILNMVFTGLFTIEMVLKIIAFKPKHYFTDAWNTFDALIVVGSIVDIAVTEVNNGGHLGESSEDSSRISITFFRLFRVMRLVKLLSKGEGIRTLLWTFIKSFQALPYVALLIAMIFFIYAVIGMQMFGKVALQDGTQINRNNNFQTFPQAVLLLFRCATGEAWQEIMLASLPGNRCDPESDFGPGEEFTCGSNFAIAYFISFFMLCAFLIINLFVAVIMDNFDYLTRDWSILGPHHLDEFKRIWSEYDPGAKGRIKHLDVVALLRRIQPPLGFGKLCPHRVACKRLVAMNMPLNSDGTVTFNATLFALVRTSLKIKTEGNLEQANQELRIVIKKIWKRMKQKLLDEVIPPPDEEEVTVGKFYATFLIQDYFRKFRRRKEKGLLGNDAAPSTSSALQAGLRSLQDLGPEMRQALTCDTEEEEEEGQEGVEEEDEKDLETNKATMVSQPSARRGSGISVSLPVGDRLPDSLSFGPSDDDRGTPTSSQPSVPQAGSNTHRRGSGALIFTIPEEGNSQPKGTKGQNKQDEDEEVPDRLSYLDEQAGTPPCSVLLPPHRAQRYMDGHLVPRRRLLPPTPAGRKPSFTIQCLQRQGSCEDLPIPGTYHRGRNSGPNRAQGSWATPPQRGRLLYAPLLLVEEGAAGEGYLGRSSGPLRTFTCLHVPGTHSDPSHGKRGSADSLVEAVLISEGLGLFARDPRFVALAKQEIADACRLTLDEMDNAASDLLAQGTSSLYSDEESILSRFDEEDLGDEMACVHAL

SEQ ID NO: 18947 - protein, 1912 aa, Homo sapiens
MSESEGGKGERILPSLQTLGASIVEWKPFDILILLTIFANCVALGVYIPFPEDDSNTANHNLEQVEYVFLVIFTVETVLKIVAYGLVLHPSAYIRNGWNLLDFIIVVVGLFSVLLEQGPGRPGDAPHTGGKPGGFDVKALRAFRVLRPLRLVSGVPSLHIVLNSIMKALVPLLHIALLVLFVIIIYAIIGLELFLGRMHKTCYFLGSDMEAEEDPSPCASSGSGRACTLNQTECRGRWPGPNGGITNFDNFFFAMLTVFQCVTMEGWTDVLYWMQDAMGYELPWVYFVSLVIFGSFFVLNLVLGVLSGEFSKEREKAKARGDFQKQREKQQMEEDLRGYLDWITQAEELDMEDPSADDNLGSMAEEGRAGHRPQLAELTNRRRGRLRWFSHSTRSTHSTSSHASLPASDTGSMTETQGDEDEEEGALASCTRCLNKIMKTRVCRRLRRANRVLRARCRRAVKSNACYWAVLLLVFLNTLTIASEHHGQPVWLTQIQEYANKVLLCLFTVEMLLKLYGLGPSAYVSSFFNRFDCFVVCGGILETTLVEVGAMQPLGISVLRCVRLLRIFKVTRHWASLSNLVASLLNSMKSIASLLLLLFLFIIIFSLLGMQLFGGKFNFDQTHTKRSTFDTFPQALLTVFQILTGEDWNVVMYDGIMAYGGPFFPGMLVCIYFIILFICGNYILLNVFLAIAVDNLASGDAGTAKDKGGEKSNEKDLPQENEGLVPGVEKEEEEGARREGADMEEEEEEEEEEEEEEEEEGAGGVELLQEVVPKEKVVPIPEGSAFFCLSQTNPLRKGCHTLIHHHVFTNLILVFIILSSVSLAAEDPIRAHSFRNHILGYFDYAFTSIFTVEILLKMTVFGAFLHRGSFCRSWFNMLDLLVVSVSLISFGIHSSAISVVKILRVLRVLRPLRAINRAKGLKHVVQCVFVAIRTIGNIMIVTTLLQFMFACIGVQLFKGKFYTCTDEAKHTPQECKGSFLVYPDGDVSRPLVRERLWVNSDFNFDNVLSAMMALFTVSTFEGWPALLYKAIDAYAEDHGPIYNYRVEISVFFIVYIIIIAFFMMNIFVGFVIITFRAQGEQEYQNCELDKNQRQCVEYALKAQPLRRYIPKNPHQYRVWATVNSAAFEYLMFLLILLNTVALAMQHYEQTAPFNYAMDILNMVFTGLFTIEMVLKIIAFKPKHYFTDAWNTFDALIVVGSIVDIAVTEVNNGGHLGESSEDSSRISITFFRLFRVMRLVKLLSKGEGIRTLLWTFIKSFQALPYVALLIAMIFFIYAVIGMQMFGKVALQDGTQINRNNNFQTFPQAVLLLFRCATGEAWQEIMLASLPGNRCDPESDFGPGEEFTCGSNFAIAYFISFFMLCAFLIINLFVAVIMDNFDYLTRDWSILGPHHLDEFKRIWSEYDPGAKGRIKHLDVVALLRRIQPPLGFGKLCPHRVACKRLVAMNMPLNSDGTVTFNATLFALVRTSLKIKTEGNLEQANQELRIVIKKIWKRMKQKLLDEVIPPPDEEEVTVGKFYATFLIQDYFRKFRRRKEKGLLGNDAAPSTSSALQAGLRSLQDLGPEMRQALTCDTEEEEEEGQEGVEEEDEKDLETNKATMVSQPSARRGSGISVSLPVGDRLPDSLSFGPSDDDRGTPTSSQPSVPQAGSNTHRRGSGALIFTIPEEGNSQPKGTKGQNKQDEDEEVPDRLSYLDEQAGTPPCSVLLPPHRAQRYMDGHLVPRRRLLPPTPAGRKPSFTIQCLQRQGSCEDLPIPGTYHRGRNSGPNRAQGSWATPPQRGRLLYAPLLLVEEGAAGEGYLGRSSGPLRTFTCLHVPGTHSDPSHGKRGSADSLVEAVLISEGLGLFARDPRFVALAKQEIADACRLTLDEMDNAASDLLAQGTSSLYSDEESILSRFDEEDLGDEMACVHAL

SEQ ID NO: 18948 - protein, 1891 aa, Homo sapiens
MSESEGGKDTTPEPSPANGAGPGPEWGLCPGPPAVEGESSGASGLGTPKRRNQHSKHKTVAVASAQRSPRALFCLTLANPLRRSCISIVEWKPFDILILLTIFANCVALGVYIPFPEDDSNTANHNLEQVEYVFLVIFTVETVLKIVAYGLVLHPSAYIRNGWNLLDFIIVVVGLFSVLLEQGPGRPGDAPHTGGKPGGFDVKALRAFRVLRPLRLVSGVPSLHIVLNSIMKALVPLLHIALLVLFVIIIYAIIGLELFLGRMHKTCYFLGSDMEAEEDPSPCASSGSGRACTLNQTECRGRWPGPNGGITNFDNFFFAMLTVFQCVTMEGWTDVLYWMQDAMGYELPWVYFVSLVIFGSFFVLNLVLGVLSGEFSKEREKAKARGDFQKQREKQQMEEDLRGYLDWITQAEELDMEDPSADDNLGSMAEEGRAGHRPQLAELTNRRRGRLRWFSHSTRSTHSTSSHASLPASDTGSMTETQGDEDEEEGALASCTRCLNKIMKTRVCRRLRRANRVLRARCRRAVKSNACYWAVLLLVFLNTLTIASEHHGQPVWLTQIQEYANKVLLCLFTVEMLLKLYGLGPSAYVSSFFNRFDCFVVCGGILETTLVEVGAMQPLGISVLRCVRLLRIFKVTRHWASLSNLVASLLNSMKSIASLLLLLFLFIIIFSLLGMQLFGGKFNFDQTHTKRSTFDTFPQALLTVFQILTGEDWNVVMYDGIMAYGGPFFPGMLVCIYFIILFICGNYILLNVFLAIAVDNLASGDAGTAKDKGGEKSNEKDLPQENEGLVPGVEKEEEEGARREGADMEEEEEEEEEEEEEEEEEGAGGVELLQEVVPKEKVVPIPEGSAFFCLSQTNPLRKGCHTLIHHHVFTNLILVFIILSSVSLAAEDPIRAHSFRNHILGYFDYAFTSIFTVEILLKMTVFGAFLHRGSFCRSWFNMLDLLVVSVSLISFGIHSSAISVVKILRVLRVLRPLRAINRAKGLKHVVQCVFVAIRTIGNIMIVTTLLQFMFACIGVQLFKGKFYTCTDEAKHTPQECKGSFLVYPDGDVSRPLVRERLWVNSDFNFDNVLSAMMALFTVSTFEGWPALLYKAIDAYAEDHGPIYNYRVEISVFFIVYIIIIAFFMMNIFVGFVIITFRAQGEQEYQNCELDKNQRQCVEYALKAQPLRRYIPKNPHQYRVWATVNSAAFEYLMFLLILLNTVALAMQHYEQTAPFNYAMDILNMVFTGLFTIEMVLKIIAFKPKHYFTDAWNTFDALIVVGSIVDIAVTEVNNGGHLGESSEDSSRISITFFRLFRVMRLVKLLSKGEGIRTLLWTFIKSFQALPYVALLIAMIFFIYAVIGMQMFGKVALQDGTQINRNNNFQTFPQAVLLLFRCATGEAWQEIMLASLPGNRCDPESDFGPGEEFTCGSNFAIAYFISFFMLCAFLIINLFVAVIMDNFDYLTRDWSILGPHHLDEFKRIWSEYDPGAKGRIKHLDVVALLRRIQPPLGFGKLCPHRVACKRLVAMNMPLNSDGTVTFNATLFALVRTSLKIKTEGNLEQANQELRIVIKKIWKRMKQKLLDEVIPPPDEEEVTVGKFYATFLIQDYFRKFRRRKEKGLLGNDAAPSTSSALQAGLRSLQDLGPEMRQALTCDTEEEEEEGQEGVEEEDEKDLETNKATMVSQPSARRGSGISVSLPVGDRLPDSLSFGPSDDDRGTPTSSQPSVPQAGSNTHRRGSGALIFTIPEEGNSQPKGTKGQNKQDEDEEVPDRRAQRYMDGHLVPRRRLLPPTPAGRKPSFTIQCLQRQGSCEDLPIPGTYHRGRNSGPNRAQVLISEGLGLFARDPRFVALAKQEIADACRLTLDEMDNAASDLLAQGTSSLYSDEESILSRFDEEDLGDEMACVHAL

SEQ ID NO: 18949 - protein, 1957 aa, Homo sapiens
MSESEGGKDTTPEPSPANGAGPGPEWGLCPGPPAVEGESSGASGLGTPKRRNQHSKHKTVAVASAQRSPRALFCLTLANPLRRSCISIVEWKPFDILILLTIFANCVALGVYIPFPEDDSNTANHNLEQVEYVFLVIFTVETVLKIVAYGLVLHPSAYIRNGWNLLDFIIVVVGLFSVLLEQGPGRPGDAPHTGGKPGGFDVKALRAFRVLRPLRLVSGVPSLHIVLNSIMKALVPLLHIALLVLFVIIIYAIIGLELFLGRMHKTCYFLGSDMEAEEDPSPCASSGSGRACTLNQTECRGRWPGPNGGITNFDNFFFAMLTVFQCVTMEGWTDVLYWMQDAMGYELPWVYFVSLVIFGSFFVLNLVLGVLSGEFSKEREKAKARGDFQKQREKQQMEEDLRGYLDWITQAEELDMEDPSADDNLGSMAEEGRAGHRPQLAELTNRRRGRLRWFSHSTRSTHSTSSHASLPASDTGSMTETQGDEDEEEGALASCTRCLNKIMKTRVCRRLRRANRVLRARCRRAVKSNACYWAVLLLVFLNTLTIASEHHGQPVWLTQIQEYANKVLLCLFTVEMLLKLYGLGPSAYVSSFFNRFDCFVVCGGILETTLVEVGAMQPLGISVLRCVRLLRIFKVTRHWASLSNLVASLLNSMKSIASLLLLLFLFIIIFSLLGMQLFGGKFNFDQTHTKRSTFDTFPQALLTVFQILTGEDWNVVMYDGIMAYGGPFFPGMLVCIYFIILFICGNYILLNVFLAIAVDNLASGDAGTAKDKGGEKSNEKDLPQENEGLVPGVEKEEEEGARREGADMEEEEEEEEEEEEEEEEEGAGGVELLQEVVPKEKVVPIPEGSAFFCLSQTNPLRKGCHTLIHHHVFTNLILVFIILSSVSLAAEDPIRAHSFRNHILGYFDYAFTSIFTVEILLKMTVFGAFLHRGSFCRSWFNMLDLLVVSVSLISFGIHSSAISVVKILRVLRVLRPLRAINRAKGLKHVVQCVFVAIRTIGNIMIVTTLLQFMFACIGVQLFKGKFYTCTDEAKHTPQECKGSFLVYPDGDVSRPLVRERLWVNSDFNFDNVLSAMMALFTVSTFEGWPALLYKAIDAYAEDHGPIYNYRVEISVFFIVYIIIIAFFMMNIFVGFVIITFRAQGEQEYQNCELDKNQRQCVEYALKAQPLRRYIPKNPHQYRVWATVNSAAFEYLMFLLILLNTVALAMQHYEQTAPFNYAMDILNMVFTGLFTIEMVLKIIAFKPKHYFTDAWNTFDALIVVGSIVDIAVTEVNNGGHLGESSEDSSRISITFFRLFRVMRLVKLLSKGEGIRTLLWTFIKSFQALPYVALLIAMIFFIYAVIGMQMFGKVALQDGTQINRNNNFQTFPQAVLLLFRCATGEAWQEIMLASLPGNRCDPESDFGPGEEFTCGSNFAIAYFISFFMLCAFLIINLFVAVIMDNFDYLTRDWSILGPHHLDEFKRIWSEYDPGAKGRIKHLDVVALLRRIQPPLGFGKLCPHRVACKRLVAMNMPLNSDGTVTFNATLFALVRTSLKIKTEGNLEQANQELRIVIKKIWKRMKQKLLDEVIPPPDEEEVTVGKFYATFLIQDYFRKFRRRKEKGLLGNDAAPSTSSALQAGLRSLQDLGPEMRQALTCDTEEEEEEGQEGVEEEDEKDLETNKATMVSQPSARRGSGISVSLPVGDRLPDSLSFGPSDDDRGTPTSSQPSVPQAGSNTHRRGSGALIFTIPEEGNSQPKGTKGQNKQDEDEEVPDRRAQRYMDGHLVPRRRLLPPTPAGRKPSFTIQCLQRQGSCEDLPIPGTYHRGRNSGPNRAQGSWATPPQRGRLLYAPLLLVEEGAAGEGYLGRSSGPLRTFTCLHVPGTHSDPSHGKRGSADSLVEAVLISEGLGLFARDPRFVALAKQEIADACRLTLDEMDNAASDLLAQGTSSLYSDEESILSRFDEEDLGDEMACVHAL

SEQ ID NO: 18950 - protein, 1911 aa, Homo sapiens
MSESEGGKDTTPEPSPANGAGPGPEWGLCPGPPAVEGESSGASGLGTPKRRNQHSKHKTVAVASAQRSPRALFCLTLANPLRRSCISIVEWKPFDILILLTIFANCVALGVYIPFPEDDSNTANHNLEQVEYVFLVIFTVETVLKIVAYGLVLHPSAYIRNGWNLLDFIIVVVGLFSVLLEQGPGRPGDAPHTGGKPGGFDVKALRAFRVLRPLRLVSGVPSLHIVLNSIMKALVPLLHIALLVLFVIIIYAIIGLELFLGRMHKTCYFLGSDMEAEEDPSPCASSGSGRACTLNQTECRGRWPGPNGGITNFDNFFFAMLTVFQCVTMEGWTDVLYWMQDAMGYELPWVYFVSLVIFGSFFVLNLVLGVLSGEFSKEREKAKARGDFQKQREKQQMEEDLRGYLDWITQAEELDMEDPSADDNLGSMAEEGRAGHRPQLAELTNRRRGRLRWFSHSTRSTHSTSSHASLPASDTGSMTETQGDEDEEEGALASCTRCLNKIMKTRVCRRLRRANRVLRARCRRAVKSNACYWAVLLLVFLNTLTIASEHHGQPVWLTQIQEYANKVLLCLFTVEMLLKLYGLGPSAYVSSFFNRFDCFVVCGGILETTLVEVGAMQPLGISVLRCVRLLRIFKVTRHWASLSNLVASLLNSMKSIASLLLLLFLFIIIFSLLGMQLFGGKFNFDQTHTKRSTFDTFPQALLTVFQILTGEDWNVVMYDGIMAYGGPFFPGMLVCIYFIILFICGNYILLNVFLAIAVDNLASGDAGTAKDKGGEKSNEKDLPQENEGLVPGVEKEEEEGARREGADMEEEEEEEEEEEEEEEEEGAGGVELLQEVVPKEKVVPIPEGSAFFCLSQTNPLRKGCHTLIHHHVFTNLILVFIILSSVSLAAEDPIRAHSFRNHILGYFDYAFTSIFTVEILLKMTVFGAFLHRGSFCRSWFNMLDLLVVSVSLISFGIHSSAISVVKILRVLRVLRPLRAINRAKGLKHVVQCVFVAIRTIGNIMIVTTLLQFMFACIGVQLFKGKFYTCTDEAKHTPQECKGSFLVYPDGDVSRPLVRERLWVNSDFNFDNVLSAMMALFTVSTFEGWPALLYKAIDAYAEDHGPIYNYRVEISVFFIVYIIIIAFFMMNIFVGFVIITFRAQGEQEYQNCELDKNQRQCVEYALKAQPLRRYIPKNPHQYRVWATVNSAAFEYLMFLLILLNTVALAMQHYEQTAPFNYAMDILNMVFTGLFTIEMVLKIIAFKPKHYFTDAWNTFDALIVVGSIVDIAVTEVNNGGHLGESSEDSSRISITFFRLFRVMRLVKLLSKGEGIRTLLWTFIKSFQALPYVALLIAMIFFIYAVIGMQMFGKVALQDGTQINRNNNFQTFPQAVLLLFRCATGEAWQEIMLASLPGNRCDPESDFGPGEEFTCGSNFAIAYFISFFMLCAFLIINLFVAVIMDNFDYLTRDWSILGPHHLDEFKRIWSEYDPGAKGRIKHLDVVALLRRIQPPLGFGKLCPHRVACKRLVAMNMPLNSDGTVTFNATLFALVRTSLKIKTEGNLEQANQELRIVIKKIWKRMKQKLLDEVIPPPDEEEVTVGKFYATFLIQDYFRKFRRRKEKGLLGNDAAPSTSSALQAGLRSLQDLGPEMRQALTCDTEEEEEEGQEGVEEEDEKDLETNKATMVSQPSARRGSGISVSLPVGDRLPDSLSFGPSDDDRGTPTSSQPSVPQAGSNTHRRGSGALIFTIPEEGNSQPKGTKGQNKQDEDEEVPDRLSYLDEQAGTPPCSVLLPPHRAQRYMDGHLVPRRRLLPPTPAGRKPSFTIQCLQRQGSCEDLPIPGTYHRGRNSGPNRAQVLISEGLGLFARDPRFVALAKQEIADACRLTLDEMDNAASDLLAQGTSSLYSDEESILSRFDEEDLGDEMACVHAL

SEQ ID NO: 18951 - protein, 323 aa, Homo sapiens
MAALIAENFRFLSLFFKSKDVMIFNGLVALGTVGSQELFSVVAFHCPCSPARNYLYGLAAIGVPALVLFIIGIILNNHTWNLVAECQHRRTKNCSAAPTFLLLSSILGRAAVAPVTWSVISLLRGEAYVCALSEFVDPSSLTAREEHFPSAHATEILARFPCKENPDNLSDFREEVSRRLRYESQLFGWLLIGVVAILVFLTKCLKHYCSPLSYRQEAYWAQYRANEDQLFQRTAEVHSRVLAANNVRRFFGFVALNKDDEELIANFPVEGTQPRPQWNAITGVYLYRENQGLPLYSRLHKWAQGLAGNGAAPDNVEMALLPS

SEQ ID NO: 18952 - protein, 218 aa, Homo sapiens
MAALIAENFRFLSLFFKSKDVMIFNGLVALGTVGSQELFSVVAFHCPCSPARNYLYGLAAIGVPALVLFIIGIILNNHTWNLVAECQHRRTKNCSAAPTFLLLSSILGRAAVAPVTWSVISLLRGEAYVCALSEFVDPSSLTAREEHFPSAHATEILARFPCKENPDNLSDFREEVSRRLRYESQVRSCAKGSSSSLVVAGERSGDGLVLKLGLVLRG

SEQ ID NO: 18953 - protein, 196 aa, Homo sapiens
MAALIAENFRFLSLFFKSKDVMIFNGLVALGTVGSQELFSVVAFHCPCSPARNYLYGLAAIGVPALVLFIIGIILNNHTWNLVAECQHRRTKNCSAAPTFLLLSSILGRAAVAPVTWSVISLLRGEAYVCALSEFVDPSSLTAREEHFPSAHATEILARFPCKENPDNLSDFREEVSRRLSSLDGCSSAWWPSWCS

SEQ ID NO: 18954 - protein, 280 aa, Homo sapiens
MNDRSSRRRTMKDDETFEISIPFDEAPHLDPQIFYSLSPSRRNFEEPPEAASSALALMNSVKTQLHMALERNSWLQKRIEDLEEERDFLRCQLDKFISSARMEAEDHCRMKPGPRRMEGDSRGGAGGEASDPESAASSLSGASEEGSASERRRQKQKGGASRRRFGKPKARERQRVKDADGVLCRYKKILGTFQKLKSMSRAFEHHRVDRNTVALTTPIAELLIVAPEKLAEVGEFDPSKERLLEYSRRCFLALDDETLKKVQALKKSKLLLPITYRFKR

SEQ ID NO: 18955 - protein, 613 aa, Homo sapiens
MARCRHHSGYLADDEASHSMCSARVQLPKKPLVPEMRPACKPGRVPHPPSTCGSSALQGQRRNKRHPQPFGHFLDFLTESQVLDSLETVVEKATERMAAMKTEAGVPLVEVQDPVEVPSGGRRAHARPSLSTVHRHRVRPTLCTGHPNNYPSSSSSMSNCHSSLMAGCLGSHSRDSDLGAQGSLPPVRDKLLLEKNLKRLLQLEREGKGLSQSCSQRDSLLWDSLGSQTSFQWTQEQPLSWFSGLLGSSSGVPEASEPRPGEQEPIFRKREFNKEIKSLLSQLESLDLPGYCPLREPHRTLNFLADHRLFPALQSVVSQAVDKLRGAHCRDGRPLFPTSLEPTSDLPPLGSEPAKPTNGGQPYASPRPTVSSPKMLQRKRKDRGGSPSMSSAQVATRFKLKSPCSSSRFTKKKPLPSISSKSSMSHFSNRLYEELADFLTQQAASLVIRKYEFEKDLSKQLGFFSFPITHVLRDLSLGLKKVKGSRIHLSSETHRSCLLRKLEESKRARQASRLSTSHCSTETPSVQQEPATHTAQDQATEPCRSLYTNLPASRQLSPLEPKLYMSACTGMGSSPPKSKDMDNEGRDKAEIEDEDEDEFKDEDQDEDKDEDGV

SEQ ID NO: 18956 - protein, 515 aa, Homo sapiens
MARCRHHSGYLADDEASHSMCSARVQLPKKPLVPEMRPACKPGRVPHPPSTCGSSALQGQRRNKRHPQPFGHFLDFLTESQVLDSLETVVEKATERMAAMKTEAGVPLVEVQDPVEVPSGGRRAHARPSLSTVHRHRVRPTLCTGHPNNYPSSSSSMSNCHSSLMAGCLGSHSRDSDLGAQGSLPPVRDKLLLEKNLKRLLQLEREGKGLSQSCSQRDSLLWDSLGSQTSFQWTQEQPLSWFSGLLGSSSGVPEASEPRPGEQEPIFRKREFNKEIKSLLSQLESLDLPGYCPLREPHRTLNFLADHRLFPALQSVVSQAVDKLRGAHCRDGRPLFPTSLEPTSDLPPLGSEPAKPTNGGQPYASPRPTVSSPKMLQRKRKDRGGSPSMSSAQVATRFKLKSPCSSSRFTKKKPLPSISSKSSMSHFSNRLYEELADFLTQQAASLVIRKYEFEKDLSKQLGFFSFPITHVLRDLSLGLKKVKGSRIHLSSETHRSCLLRKLEESKRAAAVSLEA

SEQ ID NO: 18957 - protein, 526 aa, Homo sapiens
MARCRHHSGYLADDEASHSMCSARVQLPKKPLVPEMRPACKPGRVPHPPSTCGSSALQGQRRNKRHPQPFGHFLDFLTESQVLDSLETVVEKATERMAAMKTEAGVPLVEVQDPVEVPSGGRRAHARPSLSTVHRHRVRPTLCTGHPNNYPSSSSSMSNCHSSLMAGCLGSHSRDSDLGAQGSLPPVRDKLLLEKNLKRLLQLEREGKGLSQSCSQRDSLLWDSLGSQTSFQWTQEQPLSWFSGLLGSSSGVPEASEPRPGEQEPIFRKREFNKEIKSLLSQLESLDLPGYCPLREPHRTLNFLADHRLFPALQSVVSQAVDKLRGAHCRDGRPLFPTSLEPTSDLPPLGSEPAKPTNGGQPYASPRPTVSSPKMLQRKRKDRGGSPSMSSAQVATRFKLKVTPTEKPNVPSPSLHSREEAPDSDPKLQNPPVSLSSSQRAQPWQGLHLTLPTPGIVVEVACSQGHLRGPVTPPLSSPYPRSSCYLLPELSPVASSSPASLCPEVTSSKVGPGMSLQEKGSLTHHS

SEQ ID NO: 18958 - protein, 140 aa, Homo sapiens
MFFTISRKNMSQKLSLLLLVFGLIWGLMLLHYTFQQPRHQSSVKLREQILDLSKRYVKALAEENKNTVDVENGASMAGYADLKRTIAVLLDDILQRLVKLENKVDYIVVNGSAANTTNGTSGNLVPVTTNKRTNVSGSIR

SEQ ID NO: 18959 - protein, 591 aa, Homo sapiens
MCAASASPDNLVFHMKNEMRNIKYKPVDYQQLRALTEAKKLASASAKLKIRKAMLTSKLSKEQTLIKQHKQVWWQEYQRLNEVRCKMESEIKSLLNEENIGNECLCDLTNFEQELSEQQCTYLKNVINPIQQLRADLKYRQHHTLQHSHPHIEFNSMKVLEEVDFVKKQLKTVFERLRLEQQRIENDLSDWSIKILDHSLEEKTNPLSELPIELESLECPYPDLKSSILSEFYKFTQKYQKKLQDFNLQLEDIYRNCQLSEEDHWIYQAILDQYPGDLFGRRTLYLDMLQRYFPHKSRHDLVEHEKYCDQYRFAIEQQNILISNWNKNKKDFIQKAVLTLTEACATHEMESMLAKDKKKQQELCADLKAKVRQWRAHQEEVARLEMEISARRREKEEEKEKLWKKKELLQRAEKKKKIKKYWAKKKQKWQEMEMRDLQRLEELKKLIAEQSLKDRERVKYRQELLERRLMEKKEVALQEAHEDKERARRLEALRKQVAVVAQFDPVRMMSDTMASKARMGIEIEEEFILQKPLFTLNTYNEQQIISDPRLRFELALREAGLHRTLYAKEILPKISPQKPPRKDMESTVFKI

SEQ ID NO: 18960 - protein, 274 aa, Homo sapiens
MNVFVTLQILVDFVKKQLKTVFERLRLEQQRIENDLSDWSIKILDHSLEEKTNPLSELPIELESLECPYPDLKSSILSEFYKFTQKYQKKLQDFNLQLEDIYRNCQLSEEDHWIYQAILDQYPGDLFGRRTLYLDMLQRYFPHKSRHDLVEHEKYCDQYRFAIEQQNILISNWNKNKKDFIQKAVLTLTEACATHEMESMLAKDKKKQQELCADLKAKVRQWRAHQEEVARLEMEISARRREKEEEKEKLWKKKELLQRAEKKKSFGIRMILAS

SEQ ID NO: 18961 - protein, 255 aa, Homo sapiens
MCAASASPDNLVFHMKNEMRNIKYKPVDYQQLRALTEAKKLASASAKLKIRKAMLTSKLSKEQTLIKQHKQVWWQEYQRLNEVRCKMESEIKSLLNEENIGNECLCDLTNFEQELSEQQCTYLKNVINPIQQLRADLKYRQHHTLQHSHPHIEFNSMKVLEEVDFVKKQLKTVFERLRLEQQRIENDLSDWSIKILDHSLEEKTNPLSELPIELESLECPYPDLKSSILSEFYKFTQKYQKKLQDFNLQLEDIYR

SEQ ID NO: 18962 - protein, 299 aa, Homo sapiens
MESEIKSLLNEENIGNECLCDLTNFEQELSEQQCTYLKNVINPIQQLRADLKYRQHHTLQHSHPHIEFNSMKVLEEVDFVKKQLKTVFERLRLEQQRIENDLSDWSIKILDHSLEEKTNPLSELPIELESLECPYPDLKSSILSEFYKFTQKYQKKLQDFNLQLEDIYRNCQLSEEDHWIYQAILDQYPGDLFGRRTLYLDMLQRYFPHKSRHDLVEHEKYCDQYRFAIEQQNILISNWNKNKKDFIQKAVLTLTEACATHEMESMLAKDKKKQQELCADLKAKSQVCLYQQHENGLIQ

SEQ ID NO: 18963 - protein, 118 aa, Homo sapiens
MVTPAGCLGGRNQGPREIPGTAFPCSSRAGQTGQAVSGAQVSSWRERQPFGGSRGPLHILGTDGNVDTTGKLGLVPTPPRIQKETKQGALCGMKPPFLPEALLTVWWLPFVAVSLCLF

SEQ ID NO: 18964 - protein, 474 aa, Homo sapiens
MANQLRERHQSLKKKYRELIDGDPSLPPEKRKQANLAQLLRDSQDRNKHLGEEIKELQQRLGEVQGDNKLLRMTIAKQRLGDEAIGVRHFAAHEREDLVQQLERAKEQIESLEHDLQASVDELQDVKEERSSYQDKVERLNQELNHILSGHENRIIDVDALCMENRYLQERLKQLHEEVNLLKSNIAKYKNALERRKNSKGQGKSSSSALTGVLSAKQVQDLLSEDHGCSLPATPQSISDLKSLATALLETIHEKNMVIQHQRQTNKILGNRVAELEKKLRTLEVSGLWSLPGGKDTILFSDPTLPSGQRSRSPLLKFVEQPTENKADPKDGEAQKQEEDESCAAAEALTAPEDAGRPAVNSPANQSRGNQCKLFHPSLPQLPSEEEVNSLGREIIKLTKEQAAAELEEVRRESPIEGQRSETGPAPPGLAIQGELPKSHLDSFEASRPAAKASTPEDGKGIPEGGGMRSTVKT

SEQ ID NO: 18965 - protein, 322 aa, Homo sapiens
MEEEAMNGDRTESDWQGLVSEYLVCKRKLESKKEALLILSKELDTCQQERDQYKLMANQLRERHQSLKKKYRELIDGDPSLPPEKRKQANLAQLLRDSQDRNKHLGEEIKELQQRLGEVQGDNKLLRMTIAKQRLGDEAIGVRHFAAHEREDLVQQLERAKEQIESLEHDLQASVDELQDVKEERSSYQDKVERLNQELNHILSGHENRIIDVDALCMENRYLQERLKQLHEEVNLLKSNIAKYKNALERRKNSKGQGKSSSSALTGVLSAKQVQDLLSEDHGCSLPATPQSISDLKSLATALLETIHEKNMVIQHQRQTNK

SEQ ID NO: 18966 - protein, 141 aa, Homo sapiens
MEEEAMNGDRTESDWQGLVSEYLVCKRKLESKKEALLILSKELDTCQQERDQYKLMANQLRERHQSLKKKYRELIDGDPSLPPEKRKQANLAQLLRDSQDRNKHLGEEIKELQQRLGEVQGDNKGRLRSKKKMKVVPLLRR

SEQ ID NO: 18967 - protein, 529 aa, Homo sapiens
MEEEAMNGDRTESDWQGLVSEYLVCKRKLESKKEALLILSKELDTCQQERDQYKLMANQLRERHQSLKKKYRELIDGDPSLPPEKRKQANLAQLLRDSQDRNKHLGEEIKELQQRLGEVQGDNKLLRMTIAKQRLGDEAIGVRHFAAHEREDLVQQLERAKEQIESLEHDLQASVDELQDVKEERSSYQDKVERLNQELNHILSGHENRIIDVDALCMENRYLQERLKQLHEEVNLLKSNIAKYKNALERRKNSKGQGKSSSSALTGVLSAKQVQDLLSEDHGCSLPATPQSISDLKSLATALLETIHEKNMVIQHQRQTNKILGNRVAELEKKLRTLEVSGLWSLPGGKDTILFSDPTLPSGQRSRSPLLKFVEQPTENKADPKDGEAQKQEEDESCAAAEALTAPEDAGRPAVNSPANQSRGNQCKLFHPSLPQLPSEEEVNSLGREIIKLTKEQAAAELEEVRRESPIEGQRSETGPAPPGLAIQGELPKSHLDSFEASRPAAKASTPEDGKGIPEGGGMRSTVKT

SEQ ID NO: 18968 - protein, 529 aa, Homo sapiens
MVVIVVVIIIIIARAATWDSEYLVCKRKLESKKEALLILSKELDTCQQERDQYKLMANQLRERHQSLKKKYRELIDGDPSLPPEKRKQANLAQLLRDSQDRNKHLGEEIKELQQRLGEVQGDNKLLRMTIAKQRLGDEAIGVRHFAAHEREDLVQQLERAKEQIESLEHDLQASVDELQDVKEERSSYQDKVERLNQELNHILSGHENRIIDVDALCMENRYLQERLKQLHEEVNLLKSNIAKYKNALERRKNSKGQGKSSSSALTGVLSAKQVQDLLSEDHGCSLPATPQSISDLKSLATALLETIHEKNMVIQHQRQTNKILGNRVAELEKKLRTLEVSGLWSLPGGKDTILFSDPTLPSGQRSRSPLLKFVEQPTENKADPKDGEAQKQEEDESCAAAEALTAPEDAGRPAVNSPANQSRGNQCKLFHPSLPQLPSEEEVNSLGREIIKLTKEQAAAELEEVRRESPIEGQRSETGPAPPGLAIQGELPKSHLDSFEASRPAAKASTPEDGKGIPEGGGMRSTVKT

SEQ ID NO: 18969 - protein, 402 aa, Homo sapiens
MTIAKQRLGDEAIGVRHFAAHEREDLVQQLERAKEQIESLEHDLQASVDELQDVKEERSSYQDKVERLNQELNHILSGHENRIIDVDALCMENRYLQERLKQLHEEVNLLKSNIAKYKNALERRKNSKGQGKSSSSALTGVLSAKQVQDLLSEDHGCSLPATPQSISDLKSLATALLETIHEKNMVIQHQRQTNKILGNRVAELEKKLRTLEVSGLWSLPGGKDTILFSDPTLPSGQRSRSPLLKFVEQPTENKADPKDGEAQKQEEDESCAAAEALTAPEDAGRPAVNSPANQSRGNQCKLFHPSLPQLPSEEEVNSLGREIIKLTKEQAAAELEEVRRESPIEGQRSETGPAPPGLAIQGELPKSHLDSFEASRPAAKASTPEDGKGIPEGGGMRSTVKT

SEQ ID NO: 18970 - protein, 1783 aa, Homo sapiens
MAKTGAEDHREALSQSSLSLLTEAMEVLQQSSPEGTLDGNTVNPIYKYILNDLPREFMSSQAKAVIKTTDDYLQSQFGPNRLVHSAAVSEGSGLQDCSTHQTASDHSHDEISDLDSYKSNSKNNSCSISASKRNRPVSAPVGQLRVAEFSSLKFQSARNWQKLSQRHKLQPRVIKVTAYKNGSRTVFARVTVPTITLLLEECTEKLNLNMAARRVFLADGKEALEPEDIPHEADVYVSTGEPFLNPFKKIKDHLLLIKKVTWTMNGLMLPTDIKRRKTKPVLSIRMKKLTERTSVRILFFKNGMGQDGHEITVGKETMKKVLDTCTIRMNLNLPARYFYDLYGRKIEDISKVPLLEKCLQNSITPLRGLLWVSKGEGFSPSGAKMYIQGVLLALYQRLKSAKKYYKQLNLVMNEQKEKITEKVILSMTAKEHHKEQEEVSRLIDELQTAIKSNIGHLCKLGPQLQAEQEQFSSYVYQHIKSLPANTLVPGGLQLKVFENGKNTGEISVGISKKDLGSDSPIQTDHMMERLLLKIHQRLQGSSINPPGLNYSSMRLFDENGQEIKNPLSLKNEQKIWVSYGRAYRSPLNLALGLTFDRVSAFARGDIMVAYKTFLDPNAVLLPGCGNWEVCEGFPINFNCTSQQIPDQFEKVDLENHFLQNKVDPNIVLHASVSIGKWSFSGSEASSRSQIAPSILWPVASVWLITKTGMILSRAITQGCLAIGHPIRVKAAEGTSLEGYKLILQKRHSGDDSQKWVFGTDGCIYSKAYPQFVLTYLEELNAQVDVTQTEYHIHHGAWTTAHQEHGRNLAEEVLQESASNLGLKQLPEPSDTHLMPEGSLEETGELTVALVRKLEEKHPKASAQRWAIKHEGTSKPGQWKHSRVENPLWNKLTYMWPVLPSGQLNEEFDWPIQGLLVPSSPPMKKPICKTTEPYAPVRLRVLQNGEKNKNRSVTILGPDISPGRKTQCTEILNLPSAARRLYNEKGKEIFALKDLQRDELVYVSCGELWINPDLSIAQQKKQIFLRNLESDIAKIQIFCSTHKIEALVLEVQSDIVSGSKLAVHKPVAIFGEEKQVTEPEEKQMQEDPLTTENASSEILDSHVRAHLRMKACHTLPRYAWQETSHDFDEDDSLPKKTEKGLFENVEPQKKHSCSPKHSKLHKHCHQQFEYRDGQIISHAAPQLVLGVQGPNLRSGMEVVLVEKKSDGSHQRWIHQEDSRTFHLVSNPDLVLAVSMTKTRNEVCGYPVIVQKYKPYNNGAANQKWHYMKNIKALVAFHSTALDKEITSANYAGVCTSSVIKEENIDQPGYCYLSPDGKRKTMLCLACGQSMRTEKGLKQLLPGVPFLCISGTKTQKPFLQGPFKVISVAEVDLSCDKAEKTLSYYQARLLSLRMKTCTQAASHSGMAATHQKAVKIIAYKNGDGYRNGKLIVAGTFPMLLTECTEQLGLARAASKVYTKDGTPIFTLRDLVLWALDESFLQRDSEKQKQDAAPVGKEQIIVEKNPRMKVKNRLFAKSVTSDSLDGIDKSLLTLILRNPIAIWVSCGEPFLPPNALQKAEKLEKQNWLKKDRILADLDTMRHKMRQLKGRRVAACQPATMVPTKSPVQPVVVEGGWTEQTQQEIKLMELIRHTEAHLSEIQEMESKINFPIATKRIAVKPSNLYKQPNTKRVWIYLNGGRPEDGTYAWGKTISELLQDCSSRLKMTHPARALYTPSGEPIQSWDDIERDMVICVSMGHGFKTPKELKQLMEIRANYARIRRQQGPQATDIVVSPSTKLLSLAHLHN

SEQ ID NO: 18971 - protein, 270 aa, Homo sapiens
MAKTGAEDHREALSQSSLSLLTEAMEVLQQSSPEGTLDGNTVNPIYKYILNDLPREFMSSQAKAVIKTTDDYLQSQFGPNRLVHSAAVSEGSGLQDCSTHQTASDHSHDEISDLDSYKSNSKNNSCSISASKRNRPVSAPVGQLRVAEFSSLKFQSARNWQKLSQRHKLQPRVIKVTAYKNGSRTVFARVTVPTITLLLEECTEKLNLNMAARRVFLADGKEALEPEDIPHEADVYVSTGEPFLNPFKKIKGFRYLYNKNESKFTSQIFL

SEQ ID NO: 18972 - protein, 354 aa, Homo sapiens
MAKTGAEDHREALSQSSLSLLTEAMEVLQQSSPEGTLDGNTVNPIYKYILNDLPREFMSSQAKAVIKTTDDYLQSQFGPNRLVHSAAVSEGSGLQDCSTHQTASDHSHDEISDLDSYKSNSKNNSCSISASKRNRPVSAPVGQLRVAEFSSLKFQSARNWQKLSQRHKLQPRVIKVTAYKNGSRTVFARVTVPTITLLLEECTEKLNLNMAARRVFLADGKEALEPEDIPHEADVYVSTGEPFLNPFKKIKDHLLLIKKVTWTMNGLMLPTDIKRRKTKPVLSIRMKKLTERTSVRILFFKNGMGQDGHEITVGKETMKKVLDTCTIRMNLNLPARYFYDLYGRKIEDISKGKH

SEQ ID NO: 18973 - protein, 242 aa, Homo sapiens
MKKQGVNPKPLQSSRPSPSKRPYGASPARELEVEKSALGGGKLPGGARRSSPGRIPNLKKRKGLELKVVAKTLLDPFQFVRNSLAQLREEVHELQARWFPSRTTLSIAIFVAILHWLHLVTLFENDRHFSHLSSLEWEMTFRTKMGLYYSYFKTIIEAPSFLEGLWMIMNDRLTEYPLVINTVKRFHLYPEVIIAAWYRTFIGIMNLFGLETKTCWNVTRIEPLNEFKAVKDWEILLAFMLV

SEQ ID NO: 18974 - protein, 376 aa, Homo sapiens
MADSRRVIIASWYRTFMGIVNLFGLETKTCWNVTRIEPLNEVQSCEGLRDPACFYVGVIFILNGLMMGLFFIYGTYLSGTELGGLITVLCFFFNHGEATCVMWTPPLRESFSYPFLVLQMYVLTLILRTSSNDRRPFIALCLSNVAFMLPWQFAQFILFTQIASLFPMYVVGYIEPSKFQKIIYMNMISVTLSFILMFGNSMYLSSYYSSSLLMTWAIILKRNEIQKLGVSKLNCWLIQGSAWWCGTIILKFLTSKILGVSDHICLSDLIAAGILRYTDFDTLKYTCSPEFDFMEKATLLIYTKTLLLPVVMVITCFIFKKTVGDISRVLATNVYLRCCLCRCHAYNGKCQAVYTSSHCESSTLRRCRLEAWLQHA

SEQ ID NO: 18975 - protein, 318 aa, Homo sapiens
MMGLFFIYGTYLSGTELGGLITVLCFFFNHGEATCVMWTPPLRESFSYPFLVLQMYVLTLILRTSSNDRRPFIALCLSNVAFMLPWQFAQFILFTQIASLFPMYVVGYIEPSKFQKIIYMNMISVTLSFILMFGNSMYLSSYYSSSLLMTWAIILKRNEIQKLGVSKLNCWLIQGSAWWCGTIILKFLTSKILGVSDHICLSDLIAAGILRYTDFDTLKYTCSPEFDFMEKATLLIYTKTLLLPVVMVITCFIFKKTVGDISRVLATNVYLRKQLLEHSELAFHTLQLLAFTALAILILRLKLFLTQHMCVMASLICS

SEQ ID NO: 18976 - protein, 236 aa, Homo sapiens
MLPWQFAQFILFTQIASLFPMYVVGYIEPSKFQKIIYMNMISVTLSFILMFGNSMYLSSYYSSSLLMTWAIILKRNEIQKLGVSKLNCWLIQGSAWWCGTIILKFLTSKILGVSDHICLSDLIAAGILRYTDFDTLKYTCSPEFDFMEKATLLIYTKTLLLPVVMVITCFIFKKTVGDISRVLATNVYLRKQLLEHSELAFHTLQLLAFTALAILILRLKLFLTQHMCVMASLICS

SEQ ID NO: 18977 - protein, 476 aa, Homo sapiens
MSGSSARSSHLSQPVVKSVLVYRNGDPFYAGRRVVIHEKKVSSFEVFLKEVTGGVQAPFGAVRNIYTPRTGHRIRKLDQIQSGGNYVAGGQEAFKKLNYLDIGEIKKRPMEVVNTEVKPVIHSRINVSARFRKPLQEPCTIFLIANGDLINPASRLLIPRKTLNQWDHVLQMVTEKITLRSGAVHRLYTLEGKLVESGAELENGQFYVAVGRDKFKKLPYSELLFDKSTMRRPFGQKASSLPPIVGSRKSKGSGNDRHSKSTVGSSDNSSPQPLKRKGKKEDVNSEKLTKLKQNVKLKNSQETIPNSDEGIFKAGAERSETRGAAEVQEDEDTQVEVPVDQRPAEIVDEEEDGEKANKDAEQKEDFSGMNGDLEEEGGREATDAPEQVEEILDHSEQQARPARVNGGTDEENGEELQQVNNELQLVLDKERKSQGAGSGQDEADVDPQRPPRPEVKITSPEENENNQQNKDYAAVA

SEQ ID NO: 18978 - protein, 229 aa, Homo sapiens
MKMWNNWGWCGGRRRGCTKILSTKKGIQMSIKNKHLIVIPAFSHTMSQLDFDFHCVFVSIDEGIFKAGAERSETRGAAEVQEDEDTQVEVPVDQRPAEIVDEEEDGEKANKDAEQKEDFSGMNGDLEEEGGREATDAPEQVEEILDHSEQQARPARVNGGTDEENGEELQQVNNELQLVLDKERKSQGAGSGQDEADVDPQRPPRPEVKITSPEENENNQQNKDYAAVA

SEQ ID NO: 18979 - protein, 427 aa, Homo sapiens
MAPKKRPETQKTSEIVLRPRNKRSRSPLELEPEAKKLCAKGSGPSRRCDSDCLWVGLAGPQILPPCRSIVRTLHQHKLGRASWPSVQQGLQQSFLHTLDSYRILQKAAPFDRRATSLAWHPTHPSTVAVGSKGGDIMLWNFGIKDKPTFIKGIGAGGSITGLKFNPLNTNQFYASSMEGTTRLQDFKGNILRVFASSDTINIWFCSLDVSASSRMVVTGDNVGNVILLNMDGKELWNLRMHKKKVTHVALNPCCDWFLATASVDQTVKIWDLRQVRGKASFLYSLPHRHPVNAACFSPDGARLLTTDQKSEIRVYSASQWDCPLGLIPHPHRHFQHLTPIKAAWHPRYNLIVVGRYPDPNFKSCTPYELRTIDVFDGNSGKMMCQLYDPESSGISSLNEFNPMGDTLASAMGYHILIWSQEEARTRK

SEQ ID NO: 18980 - protein, 238 aa, Homo sapiens
MAPKKRPETQKTSEIVLRPRNKRSRSPLELEPEAKKLCAKGSGPSRRCDSDCLWVGLAGPQILPPCRSIVRTLHQHKLGRASWPSVQQGLQQSFLHTLDSYRILQKAAPFDRRATSLAWHPTHPSTVAVGSKGGDIMLWNFGIKDKPTFIKGAAWHPRYNLIVVGRYPDPNFKSCTPYELRTIDVFDGNSGKMMCQLYDPESSGISSLNEFNPMGDTLASAMGYHILIWSQEEARTRK

SEQ ID NO: 18981 - protein, 156 aa, Homo sapiens
MAPKKRPETQKTSEIVLRPRNKRSRSPLELEPEAKKLCAKGSGPSRRCDSDCLWVGLAGPQILPPCRSIVRTLHQHKLGRASWPSVQQGLQQSFLHTLDSYRILQKAAPFDRRATSLAWHPTHPSTVAVGSKGGDIMLWNFGIKDKPTFIKGHLVL

SEQ ID NO: 18982 - protein, 363 aa, Homo sapiens
MAPKKRPETQKTSEIVLRPRNKRSRSPLELEPEAKKLCAKGSGPSRRCDSDCLWVGLAGPQILPPCRSIVRTLHQHKLGRASWPSVQQIGAGGSITGLKFNPLNTNQFYASSMEGTTRLQDFKGNILRVFASSDTINIWFCSLDVSASSRMVVTGDNVGNVILLNMDGKELWNLRMHKKKVTHVALNPCCDWFLATASVDQTVKIWDLRQVRGKASFLYSLPHRHPVNAACFSPDGARLLTTDQKSEIRVYSASQWDCPLGLIPHPHRHFQHLTPIKAAWHPRYNLIVVGRYPDPNFKSCTPYELRTIDVFDGNSGKMMCQLYDPESSGISSLNEFNPMGDTLASAMGYHILIWSQEEARTRK

SEQ ID NO: 18983 - protein, 244 aa, Homo sapiens
MAPKKRPETQKTSEIVLRPRNKRSRSPLELEPEAKKLCAKGSGPSRRCDSDCLWVGLAGPQILPPCRSIVRTLHQHKLGRASWPSVQQGLQQSFLHTLDSYRILQKAAPFDRRATSLAWHPTHPSTVAVGSKGGDIMLWNFGIKDKPTFIKGIGAGGSITGLKFNPLNTNQFYASSMEGTTRLQDFKGNILRVFASSDTINIWFCSLDVSASSRMVVTGDNVGNVILLNMDGKELVSVPMEPGS

SEQ ID NO: 18984 - protein, 258 aa, Homo sapiens
MLLVLVVLIPVLVSSGGPEGHYEMLGTCRMVCDPYPARGPGAGARTDGGDALSEQSGAPPPSTLVQGPQGKPGRTGKPGPPGPPGDPGPPGPVGPPGEKGEPGKPGPPGLPGAGGSGAISTATYTTVPRVAFYAGLKNPHEGYEVLKFDDVVTNLGNNYDAASGKFTCNIPGTYFFTYHVLMRGGDGTSMWADLCKNGQVRASAIAQDADQNYDYASNSVILHLDAGDEVFIKLDGGKAHGGNSNKYSTFSGFIIYSD

SEQ ID NO: 18985 - protein, 439 aa, Homo sapiens
MAPKKKRGPSAGSQPGGAAAAGAEQPLSERAQYLQREHALLSEQLDTCEESVDQVLRENAFLDREALRLREENRLYASYVSARAQRCAKAIVRLDEQNRVDLAQIHWQRAELASLYHGREDGVRAQLLEMEARAAQMAQQVQELQPYKVLQLEQLARIRALERELLHMRVEHTQLLHRVKRRFLEDKAAFEREARQRVQSLARRAEREAVRALVAHTQAIKADNGRLRQELLLLLRRTQLLHHTRRQLLEQREQLHREHEDTRDLARVHGWLRRGPGGPPLWERPAFSQPTSRPGSLAAPISPSRAASQTPSVVPSRAAPRASSVVPSREASRVPSLVLSSMDSRVPSLATSKVGSRMPSLTASRAGSRALSLVQSLEGSGISSGSSPRVSSQDTLRSTKSGPKLLSGLSRDRDPALLPPQSEDSVNAEAAAEASPGRA

SEQ ID NO: 18986 - protein, 374 aa, Homo sapiens
MRAPMLQKQQAPRMDTPPPEERLEKQNEKLNNQEEETEFKELDGLREALANLRGLSEEERSEKAMLRSRIEEQSQLICILKRRSDEALERCQILELLNAELEEKMMQEAEKLKAQGEYSRKLEERFMTLAANHELMLRFKDEYKSENIKLREENEKLRLENSSLFSQALKDEEAKVLQLTVRCEALTGELETLKERCAQDACQAQAREKELLELQSQQACTHTKETEQLRSQLQTLKQQHQQAVEQIAKAEETHSSLSQELQARLQTVTREKEELLQLSIERGKVLQNKQAEICQLEEKLEIANEDRKHALERFEQEAVAVDSNLRVRELQRKVDGIQKAYDELRLQSEAFKKHSLDLLSKERELNGKLRHLSP

SEQ ID NO: 18987 - protein, 285 aa, Homo sapiens
MIPWVLLACALPCAADPLLGAFARRDFRKGSPQLVCSLPGPQGPPGPPGAPGPSGMMGRMGFPGKDGQDGHDGDRGDSGEEGPPGRTGNRGKPGPKGKAGAIGRAGPRGPKGVNGTPGKHGTPGKKGPKGKKGEPGLPGPCSCGSGHTKSAFSVAVTKSYPRERLPIKFDKILMNEGGHYNASSGKFVCGVPGIYYFTYDITLANKHLAIGLVHNGQYRIRTFDANTGNHDVASGSTILALKQGDEVWLQIFYSEQNGLFYDPYWTDSLFTGFLIYADQDDPNEV

SEQ ID NO: 18988 - protein, 214 aa, Homo sapiens
MKEERNYNFDGVSTNRLKQQLLEEVRKKDAVQLSIFELRHKITELEAKLNTDNEGSEWKTRYETQLELNDELEKQIVYLKEKVEKIHGNSSDRLSSIRVYERMPVESLNTLLKQLEEEKKTLESQVKYYALKLEQESKAYQKINNERRTYLAEMSQGSGLHQVSKRQQVDQLPRMQENLVKTGRYNPAKQKTVSAKRGPVKKITRPNHLPELHP

SEQ ID NO: 18989 - protein, 115 aa, Homo sapiens
MKEERNYNFDGVSTNRLKQQLLEEVRKKDAVQLSIFELRHKITELEAKLNTDNEGSEWKTRYETQLELNDELEKQIVYLKEKVEKIHGNSSDRLSSIRVYERMPVVSRNVIKHKE

SEQ ID NO: 18990 - protein, 139 aa, Homo sapiens
MPVESLNTLLKQLEEEKKTLESQVKYYALKLEQESKAYQKINNERRTYLAEMSQGSGLHQVSKRQQVDQLPRMQENLVKTLLLKEELDPLKVSCLETLGFSAAGVAGPENRTCLGQKALWPACLHGSSTLAVCQTHLKS

SEQ ID NO: 18991 - protein, 241 aa, Homo sapiens
MKEERNYNFDGVSTNRLKQQLLEEVRKKDAVQLSIFELRHKITELEAKLNTDNEGSEWKTRYETQLELNDELEKQIVYLKEKVEKIHGNSSDRLSSIRVYERMPVESLNTLLKQLEEEKKTLESQVKYYALKLEQESKAYQKINNERRTYLAEMSQGSGLHQVSKRQQVDQLPRMQENLVKTLLLKEELDPLKVSCLETLGFSAAGVAGPENRTCLGQKALWPACLHGSSTLAVCQTHLKS

SEQ ID NO: 18992 - protein, 112 aa, Homo sapiens
MPVESLNTLLKQLEEEKKTLESQVKYYALKLEQESKAYQKINNERRTYLAEMSQGSGLHQVSKRQQVDQLPRMQENLVKTGRYNPAKQKTVSAKRGPVKKITRPNHLPELHP

SEQ ID NO: 18993 - protein, 141 aa, Homo sapiens
METLQESLNTLLKQLEEEKKTLESQVKYYALKLEQESKAYQKINNERRTYLAEMSQGSGLHQVSKRQQVDQLPRMQENLVKTLLLKEELDPLKVSCLETLGFSAAGVAGPENRTCLGQKALWPACLHGSSTLAVCQTHLKS

SEQ ID NO: 18994 - protein, 441 aa, Homo sapiens
MDDDDFGGFEAAETFDGGSGETQTTSPAIPWAAFPAVSGVHLSPSSPEIVLDRDHSSSIGCLSSDAIISSPENTHAANSIVSQTIPKAQIQQSTHTHLDISLFPLGLTDEKSNGTIALVDDSEDPGANVSNIQLQQKISSLEIKLKVSEEEKQRIKQDVESLMEKHNVLEKGFLKEKEQEAISFQDRYKELQEKHKQELEDMRKAGHEALSIIVDEYKALLQSSVKQQVEAIEKQYISAIEKQAHKCEELLNAQHQRLLEMLDTEKELLKEKIKEALIQQSQEQKEILEKCLEEERQRNKEALVSAAKLEKEAVKDAVLKVVEEERKNLEKAHAEERELWKTEHAKDQEKVSQEIQKAIQEQRKISQETVKAAIIEEQKRSEKAVEEAVKRTRDELIEYIKEQKRLDQVIRQRSLSSLELFLSCAQKQLSALIATEPVDIE

SEQ ID NO: 18995 - protein, 411 aa, Homo sapiens
MPMWNKVSGVHLSPSSPEIVLDRDHSSSIGCLSSDAIISSPENTHAANSIVSQTIPKAQIQQSTHTHLDISLFPLGLTDEKSNGTIALVDDSEDPGANVSNIQLQQKISSLEIKLKVSEEEKQRIKQDVESLMEKHNVLEKGFLKEKEQEAISFQDRYKELQEKHKQELEDMRKAGHEALSIIVDEYKALLQSSVKQQVEAIEKQYISAIEKQAHKCEELLNAQHQRLLEMLDTEKELLKEKIKEALIQQSQEQKEILEKCLEEERQRNKEALVSAAKLEKEAVKDAVLKVVEEERKNLEKAHAEERELWKTEHAKDQEKVSQEIQKAIQEQRKISQETVKAAIIEEQKRSEKAVEEAVKRTRDELIEYIKEQKRLDQVIRQRSLSSLELFLSCAQKQLSALIATEPVDIE

SEQ ID NO: 18996 - protein, 405 aa, Homo sapiens
MDDDDFGGFEAAETFDGGSGETQTTSPAIPWAAFPAVSGVHLSPSSPEIVLDRDHSSSIGCLSSDAIISSPENTHAANSIVSQTIPKAQIQQSTHTHLDISLFPLGLTDEKSNGTIALVDDSEDPGANVSNIQLQQKISSLEIKLKVSEEEKQRIKQDVESLMEKHNVLEKGFLKEKEQEAISFQDRYKELQEKHKQELEDMRKAGHEALSIIVDEYKHQRLLEMLDTEKELLKEKIKEALIQQSQEQKEILEKCLEEERQRNKEALVSAAKLEKEAVKDAVLKVVEEERKNLEKAHAEERELWKTEHAKDQEKVSQEIQKAIQEQRKISQETVKAAIIEEQKRSEKAVEEAVKRTRDELIEYIKEQKRLDQVIRQRSLSSLELFLSCAQKQLSALIATEPVDIE

SEQ ID NO: 18997 - protein, 1326 aa, Homo sapiens
MNLNTSSNTGDTQRLKIASLDVKQILKNETELDITDNLRKKLHWAKKEKLEITTKHNAELASYESQIAKLRSEVEKGEALRQSLEYDLAVARKEAGLGRRAAEERLAEAHRIQEKLCAQNSELQAKTNETEKAFQTSQQKWKEECRRFEHDLEERDNMIQNCNREYDLLMKEKSRLEKTLQEALEKHQREKNEMESHIRETALEEFRLQEEQWEAERRELQFIVQEQDTAVQNMHKKVEKLETEHMDCSDLLRRQTSELEFSTQREERLRKEFEATTLRVRKLEENIEAERAAHLESKFNSEIIQLRIRDLEGALQVEKASQAEAVADLEIIKNEFKEVESAYEREKHNAQESFAKLNLLEKEYFSKNKKLNEDIEEQKKVIIDLSKRLQYNEKSCSELQEELVMAKKHQAFLVETCENNVKELESILDSFTVSGQWTSGIHKDKDKPPSFSVVLERLRRTLTDYQNKLEDASNEEKACNELDSTKQKIDSHTKNIKELQDKLADVNKELSHLHTKCADREALISTLKVELQNVLHCWEKEKAQAAQSESELQKLSQAFHKDAEEKLTFLHTLYQHLVAGCVLIKQPEGMLDKFSWSELCAVLQENVDALIADLNRANEKIRHLEYICKNKSDTMRELQQTQEDTFTKVAEQIKAQESCWHRQKKELELQYSELFLEVQKRAQKFQEIAEKNMEKLNHIEKSHEQLVLENSHFKKLLSQTQREQMSLLAACALMAGALYPLYSRSCALSTQRDFLQEQVNTFELFKLEIRTLAQALSTVEEKKQEEAKMKKKTFKGLIRIFRKGVIAVLAANRLKILGQSCASLFTWMESFKEGIGMLVCTGEPQDKHKFPKHQKEQLRCLQALSWLTSSDLLAAIISSMAELQDVIGKADPNSRICGHLLIGAAKNSFAKLMDKISLVMECIPLHSSRSITYVEKDSLVQRLAHGLHKVNTLALKYGLRGHVPITKSTASLQKQILGFTQRLHAAEVERRSLRLEVTEFKRSVNEMKKELDKAQGLQMQLNEFKQSKLITHEKFESACEELNNALLREEQAQMLLNEQAQQLQELNYKLELHSSEEADKNQTLGEAVKSLSEAKMELRRKDQSLRQLNRHLTQLEQDKRRLEENIHDAESALRMAAKDKECVANHMRAVENTLHKVRDQISLSWSAASRNDFTLQLPKLHLETFAMEGLKGGPEVVACQAMIKSFMDVYQLASTRIMTLEKEMTSHRSHIAALKSELHTACLRENASLQSIGSRDHSNLSIPSRAPLPADTTGIGDFLPLKAELDTTYTFLKETFINTVPHALTSSHSSPVTMSANANRPTQIGL

SEQ ID NO: 18998 - protein, 1229 aa, Homo sapiens
MNLNTSSNTGDTQRLKIASLDVKQILKNETELDITDNLRKKLHWAKKEKLEITTKHNAELASYESQIAKLRSEVEKGEALRQSLEYDLAVARKEAGLGRRAAEERLAEAHRIQEKLCAQNSELQAKTNETEKAFQTSQQKWKEECRRFEHDLEERDNMIQNCNREYDLLMKEKSRLEKTLQEALEKHQREKNEMESHIRETALEEFRLQEEQWEAERRELQFIVQEQDTAVQNMHKKVEKLETEHMDCSDLLRRQTSELEFSTQREERLRKEFEATTLRVRKLEENIEAERAAHLESKFNSEIIQLRIRDLEGALQVEKASQAEAVADLEIIKNEFKEVESAYEREKHNAQESFAKLNLLEKEYFSKNKKLNEDIEEQKKVIIDLSKRLQYNEKSCSELQEELVMAKKHQAFLVETCENNVKELESILDSFTVSGQWTSGIHKDKDKPPSFSVVLERLRRTLTDYQNKLEDASNEEKACNELDSTKQKIDSHTKNIKELQDKLADVNKELSHLHTKCADREALISTLKVELQNVLHCWEKEKAQAAQSESELQKLSQAFHKDAEEKLTFLHTLYQHLVAGCVLIKQPEGMLDKFSWSELCAVLQENVDALIADLNRANEKIRHLEYICKNKSDTMRELQQTQEDTFTKVAEQIKAQESCWHRQKKELELQYSELFLEVQKRAQKFQEIAEKNMEKLNHIEKSHEQLVLENSHFKKLLSQTQREQMSLLAACALMAGALYPLYSRSCALSTQRDFLQEQVNTFELFKLEIRTLAQALSTVEEKKQEEAKMKKKTFKGLIRIFRKGVIAVLAANRLKILGQSCASLFTWMESFKEGIGMLVCTGEPQDKHKFPKHQKEQLRCLQALSWLTSSDLLAAIISSMAELQDVIGKADPNSRICGHLLIGAAKNSFAKLMDKISLVMECIPLHSSRSITYVEKDSLVQRLAHGLHKVNTLALKYGLRGHVPITKSTASLQKQILGFTQRLHAAEVERRSLRLEVTEFKRSVNEMKKELDKAQGLQMQLNEFKQSKLITHEKFESACEELNNALLREEQAQMLLNEQAQQLQELNYKLELHSSEEADKNQTLGEAVKSLSEAKMELRRKDQSLRQLNRHLTQLEQDKRRLEENIHDAESALRMAAKDKECVANHMRAVENTLHKVRDQISLSWSAASRNDFTLQLPKLHLETFAMEGLKGGPEVVACQVRVQWCDHSSLQSQMPGLKQSSCLSLLST

SEQ ID NO: 18999 - protein, 1334 aa, Homo sapiens
MNLNTSSNTGDTQRLKIASLDVKQILKNETELDITDNLRKKLHWAKKEKLEITTKHNAELASYESQIAKLRSEVEKGEALRQSLEYDLAVARKEAGLGRRAAEERLAEAHRIQEKLCAQNSELQAKTNETEKAFQTSQQKWKEECRRFEHDLEERDNMIQNCNREYDLLMKEKSRLEKTLQEALEKHQREKNEMESHIRETALEEFRLQEEQWEAERRELQFIVQEQDTAVQNMHKKVEKLETEHMDCSDLLRRQTSELEFSTQREERLRKEFEATTLRVRKLEENIEAERAAHLESKFNSEIIQLRIRDLEGALQVEKASQAEAVADLEIIKNEFKEVESAYEREKHNAQESFAKLNLLEKEYFSKNKKLNEDIEEQKKVIIDLSKRLQYNEKSCSELQEELVMAKKHQAFLVETCENNVKELESILDSFTVSGQWTSGIHKDKDKPPSFSVVLERLRRTLTDYQNKLEDASNELNSMNDVKEKACNELDSTKQKIDSHTKNIKELQDKLADVNKELSHLHTKCADREALISTLKVELQNVLHCWEKEKAQAAQSESELQKLSQAFHKDAEEKLTFLHTLYQHLVAGCVLIKQPEGMLDKFSWSELCAVLQENVDALIADLNRANEKIRHLEYICKNKSDTMRELQQTQEDTFTKVAEQIKAQESCWHRQKKELELQYSELFLEVQKRAQKFQEIAEKNMEKLNHIEKSHEQLVLENSHFKKLLSQTQREQMSLLAACALMAGALYPLYSRSCALSTQRDFLQEQVNTFELFKLEIRTLAQALSTVEEKKQEEAKMKKKTFKGLIRIFRKGVIAVLAANRLKILGQSCASLFTWMESFKEGIGMLVCTGEPQDKHKFPKHQKEQLRCLQALSWLTSSDLLAAIISSMAELQDVIGKADPNSRICGHLLIGAAKNSFAKLMDKISLVMECIPLHSSRSITYVEKDSLVQRLAHGLHKVNTLALKYGLRGHVPITKSTASLQKQILGFTQRLHAAEVERRSLRLEVTEFKRSVNEMKKELDKAQGLQMQLNEFKQSKLITHEKFESACEELNNALLREEQAQMLLNEQAQQLQELNYKLELHSSEEADKNQTLGEAVKSLSEAKMELRRKDQSLRQLNRHLTQLEQDKRRLEENIHDAESALRMAAKDKECVANHMRAVENTLHKVRDQISLSWSAASRNDFTLQLPKLHLETFAMEGLKGGPEVVACQAMIKSFMDVYQLASTRIMTLEKEMTSHRSHIAALKSELHTACLRENASLQSIGSRDHSNLSIPSRAPLPADTTGIGDFLPLKAELDTTYTFLKETFINTVPHALTSSHSSPVTMSANANRPTQIGL

SEQ ID NO: 19000 - protein, 329 aa, Homo sapiens
MLPLLLGLLGPAACWALGPTPGPGSSELRSAFSAARTTPLEGTSEMAVTFDKVYVNIGGDFDVATGQFRCRVPGAYFFSFTAGKAPHKSLSVMLVRNRDEVQALAFDEQRRPGARRAASQSAMLQLDYGDTVWLRLHGAPQYALGAPGATFSGYLVYADADADAPARGPPAPPEPRSAFSAARTRSLVGSDAGPGPRHQPLAFDTEFVNIGGDFDAAAGVFRCRLPGAYFFSFTLGKLPRKTLSVKLMKNRDEVQAMIYDDGASRRREMQSQSVMLALRRGDAVWLLSHDHDGYGAYSNHGKYITFSGFLVYPDLAPAAPPGLGASELL

SEQ ID NO: 19001 - protein, 521 aa, Homo sapiens
MLPRRPLAWPAWLLRGAPGAAGSWGRPVGPLARRGCCSAPGTPEVPLTRERYPVRRLPFSTVSKQDLAAFERIVPGGVVTDPEALQAPNVDWLRTLRGCSKVLLRPRTSEEVSHILRHCHERNLAVNPQGGNTGMVGGSVPVFDEIILSTARMNRVLSFHSVSGILVCQAGCVLEELSRYVEERDFIMPLDLGAKGSCHIGGNVATNAGGLRFLRYGSLHGTVLGLEVVLADGTVLDCLTSLRKDNTGYDLKQLFIGSEGTLGIITTVSILCPPKPRAVNVAFLGCPGFAEVLQTFSTCKGMLGEILSAFEFMDAVCMQLVGRHLHLASPVQESPFYVLIETSGSNAGHDAEKLGHFLEHALGSGLVTDGTMATDQRKVKMLWALRERITEALSRDGYVYKYDLSLPVERLYDIVTDLRARLGPHAKHVVGYGHLGDGNLHLNVTAEAFSPSLLAALEPHVYEWTAGQQGSVSAEHGVGFRKRDVLGYSKPPGALQLMQQLKALLDPKGILNPYKTLPSQA

SEQ ID NO: 19002 - protein, 307 aa, Homo sapiens
MLPRRPLAWPAWLLRGAPGAAGSWGRPVGPLARRGCCSAPGTPEVPLTRERYPVRRLPFSTVSKQDLAAFERIVPGGVVTDPEALQAPNVDWLRTLRGCSKVLLRPRTSEEVSHILRHCHERNLAVNPQGGNTGMVGGSVPVFDEIILSTARMNRVLSFHSVSGGLVLEELSRYVEERDFIMPLDLGAKGSCHIGGNVATNAGGLRFLRYGSLHGTVLGLEVVLADGTVLDCLTSLRKDNTGYDLKQLFIGSEGTLGIITTVSILCPPKPRAVNVAFLVTCVLPACGPGSPRPARLPHPALRTPGLR

SEQ ID NO: 19003 - protein, 319 aa, Homo sapiens
MLPRRPLAWPAWLLRGAPGAAGSWGRPVGPLARRGCCSAPGTPEVPLTRERYPVRRLPFSTVSKQDLAAFERIVPGGVVTDPEALQAPNVDWLRTLRGCSKVLLRPRTSEEVSHILRHCHERNLAVNPQGGNTGMVGGSVPVFDEIILSTARMNRVLSFHSVSGILVCQAGCVLEELSRYVEERDFIMPLDLGAKGSCHIGGNVATNAGGLRFLRYGSLHGTVLGLEVVLADGTVLDCLTSLRKDNTGYDLKQLFIGSEGTLGIITTVSILCPPKPRAVNVAFLVTCVPPACGPGSPRPARLPHPALRTPGVCPQPLRL

SEQ ID NO: 19004 - protein, 222 aa, Homo sapiens
MALSAETESHIYRALRTASGAAAHLVALGFTIFVAVLARPGSSLFSWHPVLMSLAFSFLMTEALLVFSPESSLLHSLSRKGRARCHWVLQLLALLCALLGLGLVILHKEQLGKAHLVTRHGQAGLLAVLWAGLQCSGGVGLLYPKLLPRWPLAKLKLYHATSGLVGYLLGSASLLLGMCSLWFTASVTGAAWYLAVLCPVLTSLVIMNQVSNAYLYRKRIQP

SEQ ID NO: 19005 - protein, 713 aa, Homo sapiens
MQPRTPLVLCVLLSQVLLLTSAEDLDCTPGFQQKVFHINQPAEFIEDQSILNLTFSDCKGNDKLRYEVSSPYFKVNSDGGLVALRNITAVGKTLFVHARTPHAEDMAELVIVGGKDIQGSLQDIFKFARTSPVPRQKRSIVVSPILIPENQRQPFPRDVGKVVDSDRPERSKFRLTGKGVDQEPKGIFRINENTGSVSVTRTLDREVIAVYQLFVETTDVNGKTLEGPVPLEVIVIDQNDNRPIFREGPYIGHVMEGSPTGTTVMRMTAFDADDPATDNALLRYNIRQQTPDKPSPNMFYIDPEKGDIVTVVSPALLDRETLENPKYELIIEAQDMAGLDVGLTGTATATIMIDDKNDHSPKFTKKEFQATVEEGAVGVIVNLTVEDKDDPTTGAWRAAYTIINGNPGQSFEIHTNPQTNEGMLSVVKPLDYEISAFHTLLIKVENEDPLVPDVSYGPSSTATVHITVLDVNEGPVFYPDPMMVTRQEDLSVGSVLLTVNATDPDSLQHQTIRYSVYKDPAGWLNINPINGTVDTTAVLDRESPFVDNSVYTALFLAIDSGNPPATGTGTLLITLEDVNDNAPFIYPTVAEVCDDAKNLSVVILGASDKDLHPNTDPFKFEIHKQAVPDKVWKISKINNTHALVSLLQNLNKANYNLPIMVTDSGKPPMTNITDLRVQVCSCRNSKVDCNAAGALRFSLPSVLLLSLFSLACL

SEQ ID NO: 19006 - protein, 190 aa, Homo sapiens
MQPRTPLVLCVLLSQVLLLTSAEDLDCTPGFQQKVFHINQPAEFIEDQSILNLTFSDCKGNDKLRYEVSSPYFKVNSDGGLVALRNITAVGKTLFVHARTPHAEDMAELVIVGGKDIQGSLQDIFKFARTSPVPRQKRSIVVSPILIPENQRQPFPRDVGKRTHNPINSELLLNEGITADLNPCITILAI

SEQ ID NO: 19007 - protein, 175 aa, Homo sapiens
MQPRTPLVLCVLLSQVLLLTSAEDLDCTPGFQQKVFHINQPAEFIEDQSILNLTFSDCKGNDKLRYEVSSPYFKVNSDGGLVALRNITAVGKTLFVHARTPHAEDMAELVIVGGKDIQGSLQDIFKFARTSPVPRQKRSIVVSPILIPENQRQPFPRDVGKMKIWQVLCLARWLT

SEQ ID NO: 19008 - protein, 760 aa, Homo sapiens
MKTPPGASSRTKCSRELRSFCAFSCPRAKQPTCTAWFPQQEHPSENGPQMPGRDPPAASTMQVLLLTSAEDLDCTPGFQQKVFHINQPAEFIEDQSILNLTFSDCKGNDKLRYEVSSPYFKVNSDGGLVALRNITAVGKTLFVHARTPHAEDMAELVIVGGKDIQGSLQDIFKFARTSPVPRQKRSIVVSPILIPENQRQPFPRDVGKVVDSDRPERSKFRLTGKGVDQEPKGIFRINENTGSVSVTRTLDREVIAVYQLFVETTDVNGKTLEGPVPLEVIVIDQNDNRPIFREGPYIGHVMEGSPTGTTVMRMTAFDADDPATDNALLRYNIRQQTPDKPSPNMFYIDPEKGDIVTVVSPALLDRETLENPKYELIIEAQDMAGLDVGLTGTATATIMIDDKNDHSPKFTKKEFQATVEEGAVGVIVNLTVEDKDDPTTGAWRAAYTIINGNPGQSFEIHTNPQTNEGMLSVVKPLDYEISAFHTLLIKVENEDPLVPDVSYGPSSTATVHITVLDVNEGPVFYPDPMMVTRQEDLSVGSVLLTVNATDPDSLQHQTIRYSVYKDPAGWLNINPINGTVDTTAVLDRESPFVDNSVYTALFLAIDSGNPPATGTGTLLITLEDVNDNAPFIYPTVAEVCDDAKNLSVVILGASDKDLHPNTDPFKFEIHKQAVPDKVWKISKINNTHALVSLLQNLNKANYNLPIMVTDSGKPPMTNITDLRVQVCSCRNSKVDCNAAGALRFSLPSVLLLSLFSLACL

SEQ ID NO: 19009 - protein, 674 aa, Homo sapiens
MQPRTPLVLCVLLSQVLLLTSAEDLDCTPGFQQKVFHINQPAEFIEDQSILNLTFSDCKGNDKLRYEVSSPYFKVNSDGGLVALRNITAVGKTLFVHARTPHAEDMAELVIVGGKDIQGSLQVVDSDRPERSKFRLTGKGVDQEPKGIFRINENTGSVSVTRTLDREVIAVYQLFVETTDVNGKTLEGPVPLEVIVIDQNDNRPIFREGPYIGHVMEGSPTGTTVMRMTAFDADDPATDNALLRYNIRQQTPDKPSPNMFYIDPEKGDIVTVVSPALLDRETLENPKYELIIEAQDMAGLDVGLTGTATATIMIDDKNDHSPKFTKKEFQATVEEGAVGVIVNLTVEDKDDPTTGAWRAAYTIINGNPGQSFEIHTNPQTNEGMLSVVKPLDYEISAFHTLLIKVENEDPLVPDVSYGPSSTATVHITVLDVNEGPVFYPDPMMVTRQEDLSVGSVLLTVNATDPDSLQHQTIRYSVYKDPAGWLNINPINGTVDTTAVLDRESPFVDNSVYTALFLAIDSGNPPATGTGTLLITLEDVNDNAPFIYPTVAEVCDDAKNLSVVILGASDKDLHPNTDPFKFEIHKQAVPDKVWKISKINNTHALVSLLQNLNKANYNLPIMVTDSGKPPMTNITDLRVQVCSCRNSKVDCNAAGALRFSLPSVLLLSLFSLACL

SEQ ID NO: 19010 - protein, 419 aa, Homo sapiens
MNKHQKPVLTGQRFKTRKRDEKEKFEPTVFRDTLVQGLNEAGDDLEAVAKFLDSTGSRLDYRRYADTLFDILVAGSMLAPGGTRIDDGDKTKMTNHCVFSANEDHETIRNYAQVFNKLIRRYKYLEKAFEDEMKKLLLFLKAFSETEQTKLAMLSGILLGNGTLPATILTSLFTDSLVKEGIAASFAVKLFKAWMAEKDANSVTSSLRKANLDKRLLELFPVNRQSVDHFAKYFTDAGLKELSDFLRVQQSLGTRKELQKELQERLSQECPIKEVVLYVKEEMKRNDLPETAVIGLLWTCIMNAVEWNKKEELVAEQALKHLKQYAPLLAVFSSQGQSELILLQKVQEYCYDNIHFMKAFQKIVVLFYKADVLSEEAILKWYKEAHVAKGKSVFLDQMKKFVEWLQNAEEESESEGEEN

SEQ ID NO: 19011 - protein, 201 aa, Homo sapiens
MNKHQKPVLTGQRFKTRKRDEKEKFEPTVFRDTLVQGLNEAGDDLEAVAKFLDSTGSRLDYRRYADTLFDILVAGSMLAPGGTRIDDGDKTKMTNHCVFSANEDHETIRNYAQVFNKLIRRYKYLEKAFEDEMKKLLLFLKAFSETEQTKLAMLSGILLGNGTLPATILTSLFTDSLVKEGNEAPVFSPVRQQKKNKVTDS

SEQ ID NO: 19012 - protein, 513 aa, Homo sapiens
MNLDSIHRLIEETQIFQMQQSSIKSRGDMVAPASPPRDTCNTCFPLHGLQSHAAHNFCAHSYNTNKWDICEELRLRELEEVKARAAQMEKTMRWWSDCTANWREKWSKVRAERNSAREEGRQLRIKLEMAMKELSTLKKKQSLPPQKEALEAKVTQDLKLPGFVEESCEHTDQFQLSSQMHESIREYLVKRQFSTKEDTNNKEQGVVIDSLKLSEEMKPNLDGVDLFNNGGSGNGETKTGLRLKAINLPLENEVTEISALQVHLDEFQKILWKEREMRTALEKEIERLESALSLWKWKYEELKESKPKNVKEFDILLGQHNDEMQELSGNIKEESKSQNSKDRVICELRAELERLQAENTSEWDKREILEREKQGLERENRRLKIQVKEMEELLDKKNRLSANSQSPDFKMSQIDLQEKNQELLNLQHAYYKLNRQYQANIAELTHANNRVDQNEAEVKKLRLRVEELKQGLNQKEDELDDSLNQIRKLQRSLDEEKERNENLETELRHLQNW

SEQ ID NO: 19013 - protein, 483 aa, Homo sapiens
MNLDSIHRLIEETQIFQMQQSSIKSRGDMVAPASPPRDTCNTCFPLHGLQSHAAHNFCAHSYNTNKWDICEELRLRELEEVKARAAQMEKTMRWWSDCTANWREKWSKVRAERNSAREEGRQLRIKLEMAMKELSTLKKKQSLPPQKEALEAKVTQDLKLPGFVEESCEHTDQFQLSSQMHESIREYLVKRQFSTKEDTNNKEQGVVIDSLKLSEEMKPNLDGVDLFNNGGSGNGETKTGLRLKAINLPLENEVTEISALQVHLDEFQKILWKEREMRTALEKEIERLESALSLWKWKYEELKESKPKNVKEFDILLGQHNDEMQELSGNIKEESKSQNSKDRVICELRAELERLQAENTSEWDKREILEREKQGLERENRRLKIQVKEMEELLDKKNRLSANSQSPDFKMSQIDLQEKNQELLNLQHAYYKLNRQYQANIAELTHANNRVDQNEAEVKKLRLRVEELKQGLNQKEDEVLLYE

SEQ ID NO: 19014 - protein, 419 aa, Homo sapiens
MNNQKQQKPTLSGQRFKTRKRDEKERFDPTQFQDCIIQGLTETGTDLEAVAKFLDASGAKLDYRRYAETLFDILVAGGMLAPGGTLADDMMRTDVCVFAAQEDLETMQAFAQVFNKLIRRYKYLEKGFEDEVKKLLLFLKGFSESERNKLAMLTGVLLANGTLNASILNSLYNENLVKEGVSAAFAVKLFKSWINEKDINAVAASLRKVSMDNRLMELFPANKQSVEHFTKYFTEAGLKELSEYVRNQQTIGARKELQKELQEQMSRGDPFKDIILYVKEEMKKNNIPEPVVIGIVWSSVMSTVEWNKKEELVAEQAIKHLKQYSPLLAAFTTQGQSELTLLLKIQEYCYDNIHFMKAFQKIVVLFYKAEVLSEEPILKWYKDAHVAKGKSVFLEQMKKFVEWLKNAEEESESEAEEGD

SEQ ID NO: 19015 - protein, 353 aa, Homo sapiens
MNNQKQQKPTLSGQRFKTRKRDEKERFDPTQFQDCIIQGLTETGTDLEAVAKFLDASGAKLDYRRYAETLFDILVAGGMLAPGGTLADDMMRTDVCVFAAQEDLETMQAFAQVFNKLIRRYKYLEKGFEDEVKKLLLFLKGFSESERNKLAMLTGVLLANGTLNASILNSLYNENLVKEGVSAAFAVKLFKSWINEKDINAVAASLRKVSMDNRLMELFPANKQSVEHFTKYFTEAGLKELSEYVRNQQTIGARKELQKELQEQMSRGDPFKDIILYVKEEMKKNNIHFMKAFQKIVVLFYKAEVLSEEPILKWYKDAHVAKGKSVFLEQMKKFVEWLKNAEEESESEAEEGD

SEQ ID NO: 19016 - protein, 451 aa, Homo sapiens
MYGAPGAPAQSASVTVVRSLRRPPPQATGVSFMNNQKQQKPTLSGQRFKTRKRDEKERFDPTQFQDCIIQGLTETGTDLEAVAKFLDASGAKLDYRRYAETLFDILVAGGMLAPGGTLADDMMRTDVCVFAAQEDLETMQAFAQVFNKLIRRYKYLEKGFEDEVKKLLLFLKGFSESERNKLAMLTGVLLANGTLNASILNSLYNENLVKEGVSAAFAVKLFKSWINEKDINAVAASLRKVSMDNRLMELFPANKQSVEHFTKYFTEAGLKELSEYVRNQQTIGARKELQKELQEQMSRGDPFKDIILYVKEEMKKNNIPEPVVIGIVWSSVMSTVEWNKKEELVAEQAIKHLKQYSPLLAAFTTQGQSELTLLLKIQEYCYDNIHFMKAFQKIVVLFYKAEVLSEEPILKWYKDAHVAKGKSVFLEQMKKFVEWLKNAEEESESEAEEGD

SEQ ID NO: 19017 - protein, 423 aa, Homo sapiens
MVSFMNNQKQQKPTLSGQRFKTRKRDEKERFDPTQFQDCIIQGLTETGTDLEAVAKFLDASGAKLDYRRYAETLFDILVAGGMLAPGGTLADDMMRTDVCVFAAQEDLETMQAFAQVFNKLIRRYKYLEKGFEDEVKKLLLFLKGFSESERNKLAMLTGVLLANGTLNASILNSLYNENLVKEGVSAAFAVKLFKSWINEKDINAVAASLRKVSMDNRLMELFPANKQSVEHFTKYFTEAGLKELSEYVRNQQTIGARKELQKELQEQMSRGDPFKDIILYVKEEMKKNNIPEPVVIGIVWSSVMSTVEWNKKEELVAEQAIKHLKQYSPLLAAFTTQGQSELTLLLKIQEYCYDNIHFMKAFQKIVVLFYKAEVLSEEPILKWYKDAHVAKGKSVFLEQMKKFVEWLKNAEEESESEAEEGD

SEQ ID NO: 19018 - protein, 819 aa, Homo sapiens
MWGLVRLLLAWLGGWGCMGRLAAPARAWAGSREHPGPALLRTRRSWVWNQFFVIEEYAGPEPVLIGKLHSDVDRGEGRTKYLLTGEGAGTVFVIDEATGNIHVTKSLDREEKAQYVLLAQAVDRASNRPLEPPSEFIIKVQDINDNPPIFPLGPYHATVPEMSNVGTSVIQVTAHDADDPSYGNSAKLVYTVLDGLPFFSVDPQTGVVRTAIPNMDRETQEEFLVVIQAKDMGGHMGGLSGSTTVTVTLSDVNDNPPKFPQSLYQFSVVETAGPGTLVGRLRAQDPDLGDNALMAYSILDGEGSEAFSISTDLQGRDGLLTVRKPLDFESQRSYSFRVEATNTLIDPAYLRRGPFKDVASVRVAVQDAPEPPAFTQAAYHLTVPENKAPGTLVGQISAADLDSPASPIRYSILPHSDPERCFSIQPEEGTIHTAAPLDREARAWHNLTVLATELGWSWGPERGWVPLLVAEWSAPAAPPQRSPVGSAVGIPQDSSAQASRVQVAIQTLDENDNAPQLAEPYDTFVCDSAAPGQLIQVIRALDRDEVGNSSHVSFQGPLGPDANFTVQDNRDGSASLLLPSRPAPPRHAPYLVPIELWDWGQPALSSTATVTVSVCRCQPDGSVASCWPEAHLSAAGLSTGALLAIITCVGALLALVVLFVALRRQKQEALMVLEEEDVRENIITYDDEGGGEEDTEAFDITALQNPDGAAPPAPGPPARRDVLPRARVSRQPRPPGPADVAQLLALRLREADEDPGVPPYDSVQVYGYEGRGSSCGSLSSLGSGSEAGGAPGPAEPLDDWGPLFRTLAELYGAKEPPAP

SEQ ID NO: 19019 - protein, 781 aa, Homo sapiens
MWGLVRLLLAWLGGWGCMGRLAAPARAWAGSREHPGPALLRTRRSWVWNQFFVIEEYAGPEPVLIGKLHSDVDRGEGRTKYLLTGEGAGTVFVIDEATGNIHVTKSLDREEKAQYVLLAQAVDRASNRPLEPPSEFIIKVQDINDNPPIFPLGPYHATVPEMSNVGTSVIQVTAHDADDPSYGNSAKLVYTVLDGLPFFSVDPQTGVVRTAIPNMDRETQEEFLVVIQAKDMGGHMGGLSGSTTVTVTLSDVNDNPPKFPQSLYQFSVVETAGPGTLVGRLRAQDPDLGDNALMAYSILDGEGSEAFSISTDLQGRDGLLTVRKPLDFESQRSYSFRVEATNTLIDPAYLRRGPFKDVASVRVAVQDAPEPPAFTQAAYHLTVPENKAPGTLVGQISAADLDSPASPIRYSILPHSDPERCFSIQPEEGTIHTAAPLDREARAWHNLTVLATELDSSAQASRVQVAIQTLDENDNAPQLAEPYDTFVCDSAAPGQLIQVIRALDRDEVGNSSHVSFQGPLGPDANFTVQDNRDGSASLLLPSRPAPPRHAPYLVPIELWDWGQPALSSTATVTVSVCRCQPDGSVASCWPEAHLSAAGLSTGALLAIITCVGALLALVVLFVALRRQKQEALMVLEEEDVRENIITYDDEGGGEEDTEAFDITALQNPDGAAPPAPGPPARRDVLPRARVSRQPRPPGPADVAQLLALRLREADEDPGVPPYDSVQVYGYEGRGSSCGSLSSLGSGSEAGGAPGPAEPLDDWGPLFRTLAELYGAKEPPAP

SEQ ID NO: 19020 - protein, 392 aa, Homo sapiens
MNIVCTWYCSIHSATLFSTCTLHAYFMCFLCMLYASCGIHAHAPHMLRVNCVVCVWRVCFGVLPSDSSAQASRVQVAIQTLDENDNAPQLAEPYDTFVCDSAAPGQLIQVIRALDRDEVGNSSHVSFQGPLGPDANFTVQDNRDGSASLLLPSRPAPPRHAPYLVPIELWDWGQPALSSTATVTVSVCRCQPDGSVASCWPEAHLSAAGLSTGALLAIITCVGALLALVVLFVALRRQKQEALMVLEEEDVRENIITYDDEGGGEEDTEAFDITALQNPDGAAPPAPGPPARRDVLPRARVSRQPRPPGPADVAQLLALRLREADEDPGVPPYDSVQVYGYEGRGSSCGSLSSLGSGSEAGGAPGPAEPLDDWGPLFRTLAELYGAKEPPAP

SEQ ID NO: 19021 - protein, 550 aa, Homo sapiens
MSHGPSPRLAESPQLSKGSLLTILGSPSPERMGPADSLPPTPPSGTPSPGPPPALPLPPAPALLADGDWESREELRLRELEEARARAAQMEKTMRRWSDCTANWREKWSKVRAERNRAREEVRQLRQRLDALTKELAGARRERQEAQGECEARGRELARLRGARGVADQTRDGPEPEAEREPVRDVGSERPPGSQELELVESLLKSMPEESEDCWEARSLGAGGPRGSSGRQERSRLPWEDTAATEEEASKLTALRLRLDESQKVLLKEREDKLALSRNIEKLEGELSQWKIKYEELSKTKQEMLKQLSILKEAHQDELGRMSEDLEDELGARSSMDRKMAELRGEMERLQAENAAEWGRRERLETEKLGLERENKKLRAQVGDLEEALARRRRQTASALDCDLRASQAALFEKNKELADLKHVHGKLKKQFQEKVAELAHANRRVEQHEAEVKKLRLRVEELKKELAQAEDELDEAHNQARKLQRSLDEQTEQSENLQVQLEHLQSRLRRQQQNAPLFGKIRSARFGTEEAEDGTSDLDEDEDLQIQVA

SEQ ID NO: 19022 - protein, 542 aa, Homo sapiens
MQTSAMALLARILRAGLRPAPERGGLLGGGAPRRPQPAGARLPAGARAEDKGAGRPGSPPGGGRAEGPRSLAAMPGPRTLANLAEFFCRDGFSRIHEIQQKHTREYGKIFKSHFGPQFVVSIADRDMVAQVLRAEGAAPQRANMESWREYRDLRGRATGLISAEGEQWLKMRSVLRQRILKPKDVAIYSGEVNQVIADLIKRIYLLRSQAEDGETVTNVNDLFFKYSMEGVATILYESRLGCLENSIPQLTVEYIEALELMFSMFKTSMYAGAIPRWLRPFIPKPWREFCRSWDGLFKFSQIHVDNKLRDIQYQMDRGRRVSGGLLTYLFLSQALTLQEIYANVTEMLLAGVDTTSFTLSWTVYLLARHPEVQQTVYREIVKNLGERHVPTAADVPKVPLVRALLKETLRLFPVLPGNGRVTQEDLVIGGYLIPKGTQLALCHYATSYQDENFPRAKEFRPERWLRKGDLDRVDNFGSIPFGHGVRSCIGRRIAELEIHLVVIQLLQHFEIKTSSQTNAVHAKTHGLLTPGGPIHVRFVNRK

SEQ ID NO: 19023 - protein, 372 aa, Homo sapiens
MRSVLRQRILKPKDVAIYSGEVNQVIADLIKRIYLLRSQAEDGETVTNVNDLFFKYSMEGVATILYESRLGCLENSIPQLTVEYIEALELMFSMFKTSMYAGAIPRWLRPFIPKPWREFCRSWDGLFKFSQIHVDNKLRDIQYQMDRGRRVSGGLLTYLFLSQALTLQEIYANVTEMLLAGVDTTSFTLSWTVYLLARHPEVQQTVYREIVKNLGERHVPTAADVPKVPLVRALLKETLRLFPVLPGNGRVTQEDLVIGGYLIPKGTQLALCHYATSYQDENFPRAKEFRPERWLRKGDLDRVDNFGSIPFGHGVRSCIGRRIAELEIHLVVIQLLQHFEIKTSSQTNAVHAKTHGLLTPGGPIHVRFVNRK

SEQ ID NO: 19024 - protein, 421 aa, Homo sapiens
MRKTNMWFLERLRGSGENGAARGVGSEAGDKASKGPLYSNVLTPDKIPDFFIPPKLPSGPAEGEGQAALGPSTSEQNLASAAPRQTPRSPRLPAKLAAESKSLLKAATRHVIQIESAEDWLSEEATDADPQAQGAMSLPSVPKAQTSYGFAMLAESPHTRRKESLFHSEHGALAQVGSPGAGRRRAAAKANGGDGGPREAGGALMSPGRYFSGGESDTGSSAESSPFGSPLLSRSVSLLKGFAQDSQAKVSQLRHSVGRHGSLSADDSTPDASPGSRRRLTRRAPPEPGPESGQARGEHTVHVGPRGSVRLLAEYEAGQARLRVHLLAAEGLYDRLCDARSINCCVGLCLVPGKLQKQRSTIVKNSRRPVFNEDFFFDGLGPASVRKLALRIKVVNKGSSLKRDTLLGEKELPLTSLLPFL

SEQ ID NO: 19025 - protein, 476 aa, Homo sapiens
MAVPFVEDWDLVQTLGEGAYGEVQLAVNRVTEEAVAVKIVDMKRAVDCPENIKKEICINKMLNHENVVKFYGHRREGNIQYLFLEYCSGGELFDRIEPDIGMPEPDAQRFFHQLMAGVVYLHGIGITHRDIKPENLLLDERDNLKISDFGLATVFRYNNRERLLNKMCGTLPYVAPELLKRREFHAEPVDVWSCGIVLTAMLAGELPWDQPSDSCQEYSDWKEKKTYLNPWKKIDSAPLALLHKILVENPSARITIPDIKKDRWYNKPLKKGAKRPRVTSGGVSESPSGFSKHIQSNLDFSPVNSASSEENVKYSSSQPEPRTGLSLWDTSPSYIDKLVQGISFSQPTCPDHMLLNSQLLGTPGSSQNPWQRLVKRMTRFFTKLDADKSYQCLKETCEKLGYQWKKSCMNQVTISTTDRRNNKLIFKVNLLEMDDKILVDFRLSKGDGLEFKRHFLKIKGKLIDIVSSQKIWLPAT

SEQ ID NO: 19026 - protein, 382 aa, Homo sapiens
MEKPDIGMPEPDAQRFFHQLMAGVVYLHGIGITHRDIKPENLLLDERDNLKISDFGLATVFRYNNRERLLNKMCGTLPYVAPELLKRREFHAEPVDVWSCGIVLTAMLAGELPWDQPSDSCQEYSDWKEKKTYLNPWKKIDSAPLALLHKILVENPSARITIPDIKKDRWYNKPLKKGAKRPRVTSGGVSESPSGFSKHIQSNLDFSPVNSASSEENVKYSSSQPEPRTGLSLWDTSPSYIDKLVQGISFSQPTCPDHMLLNSQLLGTPGSSQNPWQRLVKRMTRFFTKLDADKSYQCLKETCEKLGYQWKKSCMNQVTISTTDRRNNKLIFKVNLLEMDDKILVDFRLSKGDGLEFKRHFLKIKGKLIDIVSSQKIWLPAT

SEQ ID NO: 19027 - protein, 442 aa, Homo sapiens
MAVPFVEDWDLVQTLGEGAYGEVQLAVNRVTEEAVAVKIVDMKRAVDCPENIKKEICINKMLNHENVVKFYGHRREGNIQYLFLEYCSGGELFDRIEPDIGMPEPDAQRFFHQLMAGVVYLHGIGITHRDIKPENLLLDERDNLKISDFGLATVFRYNNRERLLNKMCGTLPYVAPELLKRREFHAEPVDVWSCGIVLTAMLAGELPWDQPSDSCQEYSDWKEKKTYLNPWKKIDSAPLALLHKILVENPSARITIPDIKKDRWYNKPLKKGAKRPRVTSGGVSESPSGFSKHIQSNLDFSPVNSASSEENVKYSSSQPEPRTGLSLWDTSPSYIDKLVQGISFSQPTCPDHMLLNSQLLGTPGSSQNPWQRLVKRMTRFFTKLDADKSYQCLKETCEKLGYQWKKSCMNQGDGLEFKRHFLKIKGKLIDIVSSQKIWLPAT

SEQ ID NO: 19028 - protein, 380 aa, Homo sapiens
MLQTLYDYFWWERLWLPVNLTWADLEDRDGRVYAKASDLYITLPLALLFLIVRYFFELYVATPLAALLNIKEKTRLRAPPNATLEHFYLTSGKQPKQVEVELLSRQSGLSGRQVERWFRRRRNQDRPSLLKKFREASWRFTFYLIAFIAGMAVIVDKPWFYDMKKVWEGYPIQSTIPSQYWYYMIELSFYWSLLFSIASDVKRKDFKEQIIHHVATIILISFSWFANYIRAGTLIMALHDSSDYLLESAKMFNYAGWKNTCNNIFIVFAIVFIITRLVILPFWILHCTLVYPLELYPAFFGYYFFNSMMGVLQLLHIFWAYLILRMAHKFITGKLVEDERSDREETESSEGEEAAAGGGAKSRPLANGHPILNNNHRKND

SEQ ID NO: 19029 - protein, 232 aa, Homo sapiens
MLRAALPALLLPLLGLAAAAVADCPSSTWIQFQDSCYIFLQEAIKVESIEDVRNQCTDHGADMISIHNEEENAFILDTLKKQWKGPDDILLGMFYDTDDASFKWFDNSNMTFDKWTDQDDDEDLVDTCAFLHIKTGEWKKGNCEVSSVEGTLCKTAIPYKRKYLSDNHILISALVIASTVILTVLGAIIWFLYKKHSDSRFTTVFSTAPQSPYNEDCVLVVGEENEYPVQFD

SEQ ID NO: 19030 - protein, 174 aa, Homo sapiens
MLRAALPALLLPLLGLAAAAVADCPSSTWIQFQDSCYIFLQEAIKVESIEDVRNQCTDHGADMISIHNEEENAFILDTLKKQWKGPDDILLGMFYDTDVPYKRKYLSDNHILISALVIASTVILTVLGAIIWFLYKKHSDSRFTTVFSTAPQSPYNEDCVLVVGEENEYPVQFD

SEQ ID NO: 19031 - protein, 258 aa, Homo sapiens
MAETEERSLDNFFAKRDKKKKKERSNRAASAAGAAGSAGGSSGAAGAAGGGAGAGTRPGDGGTASAGAAGPGAATKAVTKDEDEWKELEQKEVDYSGLRVQAMQISSEKEEDDNEKRQDPGDNWEEGGGGGGGMEKSSGPWNKTAPVQAPPAPVIVTETPEPAMTSGVYRPPGARLTTTRKTPQGPPEIYSDTQFPSLQSTAKHVESRKDKEMEKSFEVVRHKNRGRDEVSKNQALKLQLDNQYAVLENQKSSHSQYN

SEQ ID NO: 19032 - protein, 213 aa, Homo sapiens
MAETEERSLDNFFAKRDKKKKKERSNRAASAAGAAGSAGGSSGAAGAAGGGAGAGTRPGDGGTASAGAAGPGAATKAVTKDEDEWKELEQKEVDYSGLRVQAMQISSEKEEDDNEKRQDPGDNWEEGGGGGGGMEKSSGPWNKTAPVQAPPAPVIVTETPEPAMTSGVYRPPGARLTTTRKTPQGPPEIYSDTQFPSLQSTAKHVESRNRYLK

SEQ ID NO: 19033 - protein, 110 aa, Homo sapiens
MQISSEKEEDDNEKRQDPGDNWEEGGGGGGGMEKSSGPWNKTAPVQAPPAPVIVTETPEPAMTSGVYRPPGARLTTTRKTPQGPPEIYSDTQFPSLQSTAKHVESRKYLK

SEQ ID NO: 19034 - protein, 164 aa, Homo sapiens
MKWKALFTAAILQAQLPITEAQSFGLLDPKLCYLLDGILFIYGVILTALFLRVKFSRSADAPAYQQGQNQLYNELNLGRREEYDVLDKRRGRDPEMGGKPQRRKNPQEGLYNELQKDKMAEAYSEIGMKGERRRGKGHDGLYQGLSTATKDTYDALHMQALPPR

SEQ ID NO: 19035 - protein, 163 aa, Homo sapiens
MKWKALFTAAILQAQLPITEAQSFGLLDPKLCYLLDGILFIYGVILTALFLRVKFSRSADAPAYQQGQNQLYNELNLGRREEYDVLDKRRGRDPEMGGKPRRKNPQEGLYNELQKDKMAEAYSEIGMKGERRRGKGHDGLYQGLSTATKDTYDALHMQALPPR

SEQ ID NO: 19036 - protein, 532 aa, Homo sapiens
MMMVRRGLLAWISRVVVLLVLLCCAISVLYMLACTPKGDEEQLALPRANSPTGKEGYQAVLQEWEEQHRNYVSSLKRQIAQLKEELQERSEQLRNGQYQASDAAGLGLDRSPPEKTQADLLAFLHSQVDKAEVNAGVKLATEYAAVPFDSFTLQKVYQLETGLTRHPEEKPVRKDKRDELVEAIESALETLNSPAENSPNHRPYTASDFIEGIYRTERDKGTLYELTFKGDHKHEFKRLILFRPFGPIMKVKNEKLNMANTLINVIVPLAKRVDKFRQFMQNFREMCIEQDGRVHLTVVYFGKEEINEVKGILENTSKAANFRNFTFIQLNGEFSRGKGLDVGARFWKGSNVLLFFCDVDIYFTSEFLNTCRLNTQPGKKVFYPVLFSQYNPGIIYGHHDAVPPLEQQLVIKKETGFWRDFGFGMTCQYRSDFINIGGFDLDIKGWGGEDVHLYRKYLHSNLIVVRTPVRGLFHLWHEKRCMDELTPEQYKMCMQSKAMNEASHGQLGMLVFRHEIEAHLRKQKQKTSSKKT

SEQ ID NO: 19037 - protein, 275 aa, Homo sapiens
MESYSVTQAGVQWHELCSLQPSPPRFREMCIEQDGRVHLTVVYFGKEEINEVKGILENTSKAANFRNFTFIQLNGEFSRGKGLDVGARFWKGSNVLLFFCDVDIYFTSEFLNTCRLNTQPGKKVFYPVLFSQYNPGIIYGHHDAVPPLEQQLVIKKETGFWRDFGFGMTCQYRSDFINIGGFDLDIKGWGGEDVHLYRKYLHSNLIVVRTPVRGLFHLWHEKRCMDELTPEQYKMCMQSKAMNEASHGQLGMLVFRHEIEAHLRKQKQKTSSKKT

SEQ ID NO: 19038 - protein, 297 aa, Homo sapiens
MMMVRRGLLAWISRVVVLLVLLCCAISVLYMLACTPKGDEEQLALPRANSPTGKEGYQAVLQEWEEQHRNYVSSLKRQIAQLKEELQERSEQLRNGQYQASDAAGLGLDRSPPEKTQADLLAFLHSQVDKAEVNAGVKLATEYAAVPFDSFTLQKVYQLETGLTRHPEEKPVRKDKRDELVEAIESALETLNSPAENSPNHRPYTASDFIEGIYRTERDKGTLYELTFKGDHKHEFKRLILFRPFGPIMKVKNEKLNMANTLINVIVPLAKRVDKFRQFMQNFRPADEVFRCVPLSP

SEQ ID NO: 19039 - protein, 130 aa, Homo sapiens
MLAPLFLCCLRNLFRKLISFQPPQLGRTNMHYSKLPRTAIETEFKQNVGPPPKDLTAEVYFPSIKSRSHLPAVFYNQYFKHPKCVGEYGPKNGAERQIEERKVLPTTMMFSMLADCVLKSTPIPILGVAM

SEQ ID NO: 19040 - protein, 1403 aa, Homo sapiens
MANCSQEELDEEFEQFMKELSDDSFENSDKTARQSKKEMKKKDTVPWWITEDDFKDDGLLGTNVSYLKTKKTSQPVMEIEEESAEKIQFLKSSGTSLLSTDSLETNELVVSELNHSSLGVGLDTLEEQEEKEQFFARLEKGLTSSIDYSRLNKELDSNDSTHFKALHSNQANAELTDDEHENESKHEELAENYSDDFEDEYVGAPLTTKDEEMPSKENSKSEKISVPKQEEEKTGMLANVVLLDSLDSVAEVNLDEQDKITPKPRCLPEMTENEMTGTGVSYGQSSSDVEALHQAYCHIAHSLGDEDKQKIESNTVEDIKSSVKGHPQENEENSKNISTMESDLPTVEELMKPIRIDSFGISGFDLQPVSSEKVAERKETEFFSSLPLKMNPNILSQDSQHVNLFFDKNDENVILQKTTNESMENSCPQVTEVTATEEHVDKMYLNILRKKITVNSSSLSQDDKINKTYRSQLSSEEEGAVMGKQVPYKKARSAPPLLKRKPQSGLYASVRSSGYGKPSSPLKMFSTLEKKTSEDIIKSKNLRSISTSNQPRKKEILSGTKLIKPAALDKPAHKTESCLSTRKKSENPTETDSCIQFQTDSLGYCGENKEKKLLMFKRVQEAEDKWRGAQALIEQIKATFSEKEKELENKLEELKKQQEKELFKLNQDNYILQAKLSSFEETNKKQRWLHFGEAADPVTGEKLKQIQKEIQEQETLLQGYQQENERLYNQVKDLQEQNKKNEERMFKENQSLFSEVASLKEQMHKSRFLSQVVEDSEPTRNQNFTDLLAELRMAQKEKDSLLEDIKRLKQDKQALEVDFEKMKKERDQAKDQIAYVTGEKLYEIKILEETHKQEISRLQKRLQWYAENQELLDKDALRLREANEEIEKLKLEIEKLKAESGNPSIRQKIRLKDKAADAKKIQDLERQVKEMEGILKRRYPNSLPALILAASAAGDTVDKNTVEFMEKRIKKLEADLEGKDEDAKKSLRTMEQQFQKMKIQYEQRLEQQEQLLACKLNQHDSPRIKALEKELDDIKEAHQITVRNLEAEIDVLKHQNAELDVKKNDKDDEDFQSIEFQVEQAHAKAKLVRLNEELAAKKREIQDLSKTVERLQKDRRMMLSNQNSKGREEMSAKRAKKDVLHSSKGNANSFPGTLDSKLYQPHTFTDSHVSEVLQENYRLKNELEGLISEKNELKMKSEAVMNQFENSMRRVKEDTAAHIASLKASHQREIEKLLCQNAVENSSSKVAELNRKIATQEVLIRHFQSQVNELQSKQESLVVSEVREEILQKEITKLLEELREAKENHTPEMKHFVGLEKKIKQMEMRHAQREQELQQIIQQTHQVVETEQNKEVEKWKRLAQLKNRELEKFRTELDSILDVLRELHRQGVVVPVAFADEMNAPEY

SEQ ID NO: 19041 - protein, 1327 aa, Homo sapiens
MEIEEESAEKIQFLKSSGTSLLSTDSLETNELVVSELNHSSLGVGLDTLEEQEEKEQFFARLEKGLTSSIDYSRLNKELDSNDSTHFKALHSNQANAELTDDEHENESKHEELAENYSDDFEDEYVGAPLTTKDEEMPSKENSKSEKISVPKQEEEKTGMLANVVLLDSLDSVAEVNLDEQDKITPKPRCLPEMTENEMTGTGVSYGQSSSDVEALHQAYCHIAHSLGDEDKQKIESNTVEDIKSSVKGHPQENEENSKNISTMESDLPTVEELMKPIRIDSFGISGFDLQPVSSEKVAERKETEFFSSLPLKMNPNILSQDSQHVNLFFDKNDENVILQKTTNESMENSCPQVTEVTATEEHVDKMYLNILRKKITVNSSSLSQDDKINKTYRSQLSSEEEGAVMGKQVPYKKARSAPPLLKRKPQSGLYASVRSSGYGKPSSPLKMFSTLEKKTSEDIIKSKNLRSISTSNQPRKKEILSGTKLIKPAALDKPAHKTESCLSTRKKSENPTETDSCIQFQTDSLGYCGENKEKKLLMFKRVQEAEDKWRGAQALIEQIKATFSEKEKELENKLEELKKQQEKELFKLNQDNYILQAKLSSFEETNKKQRWLHFGEAADPVTGEKLKQIQKEIQEQETLLQGYQQENERLYNQVKDLQEQNKKNEERMFKENQSLFSEVASLKEQMHKSRFLSQVVEDSEPTRNQNFTDLLAELRMAQKEKDSLLEDIKRLKQDKQALEVDFEKMKKERDQAKDQIAYVTGEKLYEIKILEETHKQEISRLQKRLQWYAENQELLDKDALRLREANEEIEKLKLEIEKLKAESGNPSIRQKIRLKDKAADAKKIQDLERQVKEMEGILKRRYPNSLPALILAASAAGDTVDKNTVEFMEKRIKKLEADLEGKDEDAKKSLRTMEQQFQKMKIQYEQRLEQQEQLLACKLNQHDSPRIKALEKELDDIKEAHQITVRNLEAEIDVLKHQNAELDVKKNDKDDEDFQSIEFQVEQAHAKAKLVRLNEELAAKKREIQDLSKTVERLQKDRRMMLSNQNSKGREEMSAKRAKKDVLHSSKGNANSFPGTLDSKLYQPHTFTDSHVSEVLQENYRLKNELEGLISEKNELKMKSEAVMNQFENSMRRVKEDTAAHIASLKASHQREIEKLLCQNAVENSSSKVAELNRKIATQEVLIRHFQSQVNELQSKQESLVVSEVREEILQKEITKLLEELREAKENHTPEMKHFVGLEKKIKQMEMRHAQREQELQQIIQQTHQVVETEQNKEVEKWKRLAQLKNRELEKFRTELDSILDVLRELHRQGVVVPVAFADEMNAPEY

SEQ ID NO: 19042 - protein, 493 aa, Homo sapiens [sequence omitted]

SEQ ID NO: 19043 - protein, 433 aa, Homo sapiens
MLAATVLTLALLGNAHACSKGTSHEAGIVCRITKPALLVLNHETAKVIQTAFQRASYPDITGEKAMMLLGQVKYGLHNIQISHLSIASSQVELVEAKSIDVSIQNVSVVFKGTLKYGYTTAWWLGIDQSIDFEIDSAIDLQINTQLTCDSGRVRTDAPDCYLSFHKLLLHLQGEREPGWIKQLFTNFISFTLKLVLKGQICKEINVISNIMADFVQTRAASILSDGDIGVDISLTGDPVITASYLESHHKAVLETWGFNTNQEIFQEVVGGFPSQAQVTVHCLKMPKISCQNKGVVVNSSVMVKFLFPRPDQQHSVAYTFEEDIVTTVQASYSKKKLFLSLLDFQITPKTVSNLTESSSESVQSFLQSMITAVGIPEVMSRLEVVFTALMNSKGVSLFDIINPEIITRDGFLLLQMDFGFPEHLLVDFLQSLS

SEQ ID NO: 19044 - protein, 57 aa, Homo sapiens
MGTAVGPHHSPAPHDSALPARLLTSDFPYGRSCQIEQVKYSVPDTGLFQHWEGSIPT

SEQ ID NO: 19045 - protein, 242 aa, Homo sapiens
MMPLAEAGALAQGGGPSATEWACILRRKTPRHKQPTLLMVRASRRSGKTSAVLKAGRQSVSGRKNSTSKDLVTLGASSLREERGHPLHPRHRKAVHLRTRGRTRGWVQTLARMSRRTRGPVERAAAAAAAAAGGDAGHAPFPPPPAADGARAPRSPGQVTPRGLRLRLPRRESLLRGLCRPLRPLLGFRESDSAKPASLRLLQHTPSARRNYRIAGARLMRSNYPPPLSSAALRGAGPTRRN

SEQ ID NO: 19046 - protein, 105 aa, Homo sapiens
MMPLAEAGALAQGGGPSATEWACILRRLLRKEGVDGGLFSPEDPQAQAAHLTDGQSIQKKWQDFSCPQSRKTECFWQKEQHKQRSGNPRCLQFEGGERTPPPPQT

SEQ ID NO: 19047 - protein, 233 aa, Homo sapiens
MDQEEGLKALDNIVTQFNAYEDFLDSQITTVDLYYLEDETLARQLVELGYRGTGERVKREDFEARKAAIEIARLAERAQQKTLTSAGKDLQDNFLTALAMREEDNRSGKLSSVIFIRDRNSHGQEISGYIDYAHRLKTEDFEVYFTGKKRLLPRPTDISFYNWDADIAVSNSSPNYQVIADNPEGLLFRYKRDRKILNVDPKAQPGDNSTRITILTELYVQAVIFDHISRRKT

SEQ ID NO: 19048 - protein, 250 aa, Homo sapiens
MDQEEGLKALDNIVTQFNAYEDFLDSQITTVDLYYLEDETLARQLVELGYRGTGERVKREDFEARKAAIEIARLAERAQQKTLTSAGKDLQDNFLTALAMREEDNRSGKLSLNQQETDAAHILKKQLASVIFIRDRNSHGQEISGYIDYAHRLKTEDFEVYFTGKKRLLPRPTDISFYNWDADIAVSNSSPNYQVIADNPEGLLFRYKRDRKILNVDPKAQPGDNSTRITILTELYVQAVIFDHISRRKT

SEQ ID NO: 19049 - protein, 156 aa, Homo sapiens
MDQEEGLKALDNIVTQFNAYEDFLDSQITTVDLYYLEDETLARQLVELGYRGTGERVKREDFEARKAAIEIARLAERAQQKTLTSAGKDLQDNFLTALAMREEDNRSGKLSAGVQWHHLGSLQPLPPGFKEFSCFSLPSGWDYRHAPPHPVRDLYS

SEQ ID NO: 19050 - protein, 454 aa, Homo sapiens
MELATRYQIPKEVADIFNAPSDDEEFVGFRDDVPMETLSSEESCDSFDSLESGKQQDVRFHSKYFTEELRRIFIEDTDSETEDFAGFTQSDLNGKTNPEVMVVESDLSDDGKASLVSEEEEDEEEDKATPRRSRSRRSSIGLRVAFQFPTKKLANKPDKNSSSEQLFSSARLQNEKKTILERKKDCRQVIQREDSTSESEDDSRDESQESSDALLKRTMNIKENKAMLAQLLAELNSMPDFFPVRTPTSASRKKTVRRAFSEGQITRRMNPTRSARPPEKFALENFTVSAAKFAEEFYSFRRRKTIGGKCREYRRRHRISSFRPVEDITEEDLENVAITVRDKIYDKVLGNTCHQCRQKTIDTKTVCRNQGCCGVRGQFCGPCLRNRYGEDVRSALLDPDWVCPPCRGICNCSYCRKRDGRCATGILIHLAKFYGYDNVKEYLESLQKELVEDN

SEQ ID NO: 19051 - protein, 453 aa, Homo sapiens
MELATRYQIPKEVADIFNAPSDDEEFVGFRDDVPMETLSSEESCDSFDSLESGKQDVRFHSKYFTEELRRIFIEDTDSETEDFAGFTQSDLNGKTNPEVMVVESDLSDDGKASLVSEEEEDEEEDKATPRRSRSRRSSIGLRVAFQFPTKKLANKPDKNSSSEQLFSSARLQNEKKTILERKKDCRQVIQREDSTSESEDDSRDESQESSDALLKRTMNIKENKAMLAQLLAELNSMPDFFPVRTPTSASRKKTVRRAFSEGQITRRMNPTRSARPPEKFALENFTVSAAKFAEEFYSFRRRKTIGGKCREYRRRHRISSFRPVEDITEEDLENVAITVRDKIYDKVLGNTCHQCRQKTIDTKTVCRNQGCCGVRGQFCGPCLRNRYGEDVRSALLDPDWVCPPCRGICNCSYCRKRDGRCATGILIHLAKFYGYDNVKEYLESLQKELVEDN

SEQ ID NO: 19052 - protein, 420 aa, Homo sapiens
METLSSEESCDSFDSLESGKQQDVRFHSKYFTEELRRIFIEDTDSETEDFAGFTQSDLNGKTNPEVMVVESDLSDDGKASLVSEEEEDEEEDKATPRRSRSRRSSIGLRVAFQFPTKKLANKPDKNSSSEQLFSSARLQNEKKTILERKKDCRQVIQREDSTSESEDDSRDESQESSDALLKRTMNIKENKAMLAQLLAELNSMPDFFPVRTPTSASRKKTVRRAFSEGQITRRMNPTRSARPPEKFALENFTVSAAKFAEEFYSFRRRKTIGGKCREYRRRHRISSFRPVEDITEEDLENVAITVRDKIYDKVLGNTCHQCRQKTIDTKTVCRNQGCCGVRGQFCGPCLRNRYGEDVRSALLDPDWVCPPCRGICNCSYCRKRDGRCATGILIHLAKFYGYDNVKEYLESLQKELVEDN

SEQ ID NO: 19053 - protein, 408 aa, Homo sapiens
MELATRYQIPKEVADIFNAPSDDEEFVGFRDDVPMETLSSEESCDSFDSLESGKQVVESDLSDDGKASLVSEEEEDEEEDKATPRRSRSRRSSIGLRVAFQFPTKKLANKPDKNSSSEQLFSSARLQNEKKTILERKKDCRQVIQREDSTSESEDDSRDESQESSDALLKRTMNIKENKAMLAQLLAELNSMPDFFPVRTPTSASRKKTVRRAFSEGQITRRMNPTRSARPPEKFALENFTVSAAKFAEEFYSFRRRKTIGGKCREYRRRHRISSFRPVEDITEEDLENVAITVRDKIYDKVLGNTCHQCRQKTIDTKTVCRNQGCCGVRGQFCGPCLRNRYGEDVRSALLDPDWVCPPCRGICNCSYCRKRDGRCATGILIHLAKFYGYDNVKEYLESLQKELVEDN

SEQ ID NO: 19054 - protein, 99 aa, Homo sapiens
MKASAALLCLLLTAAAFSPQGLAQPVGINTSTTCCYRFINKKIPKQRLESYRRTTSSHCPREAVIFKTKLDKEICADPTQKWVQDFMKHLDKKTQTPKL

SEQ ID NO: 19055 - protein, 205 aa, Homo sapiens
MSRGLQLLLLSCAYSLAPATPEVKVACSEDVDLPCTAPWDPQVPYTVSWVKLLEGGEERMETPQEDHLRGQHYHQKGQNGSFDAPNERPYSLKIRNTTSCNSGTYRCTLQDPDGQRNLSGKVILRVTGCPAQRKEETFKKYRAEIVLLLALVIFYLTLIIFTCKFARLQSIFPDFSKAGMERAFLPVTSPNKHLGLVTPHKTELV

SEQ ID NO: 19056 - protein, 145 aa, Homo sapiens
MLTRLVLSAHLSSTTSPPWTHAAISWELDNVLMPSPRIWPQVTPTGRSASVRSEGNTSSLWNFSAGQDVHAIVTRTCESVLSSAVYTHGCGCVRSATNITCQSSGQQRQAARQEEENSICKAHDSREGRLGYPLSAHQPGSGGPN

SEQ ID NO: 19057 - protein, 155 aa, Homo sapiens
MESLQTPQHRENQDKREKEYGVKHMPMGNNAGNLEPEKRKAVRVALSSATAAQNIPSSVHCGCSKQWRLRLPSESLQSRGQVMKRPNNILKLRNLDLLIYPWPELRRRQVASDLMSLLLLPAFSGLTWAPFLFLFTYLPPFLNLLTVGFVSYFLV

SEQ ID NO: 19058 - protein, 360 aa, Homo sapiens
MEECWVTEIANGSKDGLDSNPMKDYMILSGPQKTAVAVLCTLLGLLSALENVAVLYLILSSHQLRRKPSYLFIGSLAGADFLASVVFACSFVNFHVFHGVDSKAVFLLKIGSVTMTFTASVGSLLLTAIDRYLCLRYPPSYKALLTRGRALVTLGIMWVLSALVSYLPLMGWTCCPRPCSELFPLIPNDYLLSWLLFIAFLFSGIIYTYGHVLWKAHQHVASLSGHQDRQVPGMARMRLDVRLAKTLGLVLAVLLICWFPVLALMAHSLATTLSDQVKKAFAFCSMLCLINSMVNPVIYALRSGEIRSSAHHCLAHWKKCVRGLGSEAKEEAPRSSVTETEADGKITPWPDSRDLDLSDC

SEQ ID NO: 19059 - protein, 279 aa, Homo sapiens
MADDLGDEWWENQPTGAGSSPEASDGEGEGDTEVMQQETVPVPVPSEKTKQPKECFLIQPKERKENTTKTRKRRKKKITDVLAKSEPKPGLPEDLQKLMKDYYSSRRLVIELEELNLPDSCFLKANDLTHSLSSYLKEICPKWVKLRKNHSEKKSVLMLIICSSAVRALELIRSMTAFRGDGKVIKLFAKHIKVQAQVKLLEKRVVHLGVGTPGRIKELVKQGGLNLSPLKFLVFDWNWRDQKLRRMMDIPEIRKEVFELLEMGVLSLCKSESLKLGLF

SEQ ID NO: 19060 - protein, 261 aa, Homo sapiens
MHGEASDGEGEGDTEVMQQETVPVPVPSEKTKQPKECFLIQPKERKENTTKTRKRRKKKITDVLAKSEPKPGLPEDLQKLMKDYYSSRRLVIELEELNLPDSCFLKANDLTHSLSSYLKEICPKWVKLRKNHSEKKSVLMLIICSSAVRALELIRSMTAFRGDGKVIKLFAKHIKVQAQVKLLEKRVVHLGVGTPGRIKELVKQGGLNLSPLKFLVFDWNWRDQKLRRMMDIPEIRKEVFELLEMGVLSLCKSESLKLGLF

SEQ ID NO: 19061 - protein, 236 aa, Homo sapiens
MPGSPVTSGYYGVRRSFLSDSDFHNSKQFSNDVYTSSVGKPFPCESSAGQSHAALLEPYFPQEPYGDYRPPALTPNAGSLFSASPLPPLLPPPFPGDPAHFLFRDSWEQTLPDGLSQPDPVSADALLTLPPSTSCLSQLESGSIAQHRGSSWGSSLAGAQSYSLHALEDLHHTPGYPTPPPYPFTPFMTVSNDLPPKVGPLSPDEEADTGSLHDPSPWVKEDGSIAWGSYECRRAY

SEQ ID NO: 19062 - protein, 1603 aa, Homo sapiens
MRTTKVYKLVIHKKGFGGSDDELVVNPKVFPHIKLGDIVEIAHPNDEYSPLLLQVKSLKEDLQKETISVDQTVTQVFRLRPYQDVYVNVVDPKDVTLDLVELTFKDQYIGRGDMWRLKKSLVSTCAYITQKVEFAGIRAQAGELWVKNEKVMCGYISEDTRVVFRSTSAMVYIFIQMSCEMWDFDIYGDLYFEKAVNGFLADLFTKWKEKNCSHEVTVVLFSRTFYDAKSVDEFPEINRASIRQDHKGRFYEDFYKVVVQNERREEWTSLLVTIKKLFIQYPVLVRLEQAEGFPQGDNSTSAQGNYLEAINLSFNVFDKHYINRNFDRTGQMSVVITPGVGVFEVDRLLMILTKQRMIDNGIGVDLVCMGEQPLHAVPLFKLHNRSAPRDSRLGDDYNIPHWINHSFYTSKSQLFCNSFTPRIKLAGKKPASEKAKNGRDTSLGSPKESENALPIQVDYDAYDAQVFRLPGPSRAQCLTTCRSVRERESHSRKSASSCDVSSSPSLPSRTLPTEEVRSQASDDSSLGKSANILMIPHPHLHQYEVSSSLGYTSTRDVLENMMEPPQRDSSAPGRFHVGSAESMLHVRPGGYTPQRALINPFAPSRMPMKLTSNRRRWMHTFPVGPSGEAIQIHHQTRQNMAELQGSGQRDPTHSSAELLELAYHEAAGRHSNSRQPGDGMSFLNFSGTEELSVGLLSNSGAGMNPRTQNKDSLEDSVSTSPDPILTLSAPPVVPGFCCTVGVDWKSLTTPACLPLTTDYFPDRQGLQNDYTEGCYDLLPEADIDRRDEDGVQMTAQQVFEEFICQRLMQGYQIIVQPKTQKPNPAVPPPLSSSPLYSRGLVSRNRPEEEDQYWLSMGRTFHKVTLKDKMITVTRYLPKYPYESAQIHYTYSLCPSHSDSEFVSCWVEFSHERLEEYKWNYLDQYICSAGSEDFSLIESLKFWRTRFLLLPACVTATKRITEGEAHCDIYGDRPRADEDEWQLLDGFVRFVEGLNRIRRRHRSDRMMRKGTAMKGLQMTGPISTHSLESTAPPVGKKGTSALSALLEMEASQKCLGEQQAAVHGGKSSAQSAESSSVAMTPTYMDSPRKDGAFFMEFVRSPRTASSAFYPQVSVDQTATPMLDGTSLGICTGQSMDRGNSQTFGNSQNIGEQGYSSTNSSDSSSQQLVASSLTSSSTLTEILEAMKHPSTGVQLLSEQKGLSPYCFISAEVVHWLVNHVEGIQTQAMAIDIMQKMLEEQLITHASGEAWRTFIYGFYFYKIVTDKEPDRVAMQQPATTWHTAGVDDFASFQRKWFEVAFVAEELVHSEIPAFLLPWLPSRPASYASRHSSFSRSFGGRSQAAALLAATVPEQRTVTLDVDVNNRTDRLEWCSCYYHGNFSLNAAFEIKLHWMAVTAAVLFEMVQGWHRKATSCGFLLVPVLEGPFALPSYLYGDPLRAQLFIPLNISCLLKEGSEHLFDSFEPETYWDRMHLFQEAIAHRFGFVQDKYSASAFNFPAENKPQYIHVTGTVFLQLPYSKRKFSGQQRRRRNSTSSTNQNMFCEERVGYNWAYNTMLTKTWRSSATGDEKFADRLLKDFTDFCINRDNRLVTFWTSCLEKMHASAP

SEQ ID NO: 19063 - protein, 559 aa, Homo sapiens
MRTTKVYKLVIHKKGFGGSDDELVVNPKVFPHIKLGDIVEIAHPNDEYSPLLLQVKSLKEDLQKETISVDQTVTQVFRLRPYQDVYVNVVDPKDVTLDLVELTFKDQYIGRGDMWRLKKSLVSTCAYITQKVEFAGIRAQAGELWVKNEKVMCGYISEDTRVVFRSTSAMVYIFIQMSCEMWDFDIYGDLYFEKAVNGFLADLFTKWKEKNCSHEVTVVLFSRTFYDAKSVDEFPEINRASIRQDHKGRFYEDFYKVVVQNERREEWTSLLVTIKKLFIQYPVLVRLEQAEGFPQGDNSTSAQGNYLEAINLSFNVFDKHYINRNFDRTGQMSVVITPGVGVFEVDRLLMILTKQRMIDNGIGVDLVCMGEQPLHAVPLFKLHNRSAPRDSRLGDDYNIPHWINHSFYTSKSQLFCNSFTPRIKLAGKKPASEKAKNGRDTSLGSPKESENALPIQVDYDAYDAQVFRLPGPSRAQCLTTCRSVRERESHSRKSASSCDVSSSPSLPSRTLPTEEVRSQASDDSSLGKSANILMIPHPHLHQYEVSSSLGYTSTREHLG

SEQ ID NO: 19064 - protein, 1581 aa, Homo sapiens
MRTTKVYKLVIHKKGFGGSDDELVVNPKVFPHIKLGDIVEIAHPNDEYSPLLLQVKSLKEDLQKETISVDQTVTQVFRLRPYQDVYVNVVDPKDVTLDLVELTFKDQYIGRGDMWRLKKSLVSTCAYITQKVEFAGIRAQAGELWVKNEKVMCGYISEDTRVVFRSTSAMVYIFIQMSCEMWDFDIYGDLYFEKAVNGFLADLFTKWKEKNCSHEVTVVLFSRTFYDAKSVDEFPEINRASIRQDHKGRFYEDFYKVVVQNERREEWTSLLVTIKKLFIQYPVLVRLEQAEGFPQGDNSTSAQGNYLEAINLSFNVFDKHYINRNFDRTGQMSVVITPGVGVFEVDRLLMILTKQRMIDNGIGVDLVCMGEQPLHAVPLFKLHNRSAPRDSRLGDDYNIPHWINHSFYTSKSQLFCNSFTPRIKLAGKKPASEKAKNGRDTSLGSPKESENALPIQVDYDAYDAQVFRLPGPSRAQCLTTCRSVRERESHSRKSASSCDVSSSPSLPSRTLPTEEVRSQASDDSSLGKSANILMIPHPHLHQYEVSSSLGYTSTRDVLENMMEPPQRDSSAPGRFHVGSAESMLHVRPGGYTPQRALINPFAPSRMPMKLTSNRRRWMHTFPVGPSGEAIQIHHQTRQNMAELQGSGQRDPTHSSAELLELAYHEAAGRHSNSRQPGDGMSFLNFSGTEELSVGLLSNSGAGMNPRTQNKDSLEDSVSTSPDPILTLSAPPVVPGFCCTVGVDWKSLTTPACLPLTTDYFPDRQGLQNDYTEGCYDLLPEADIDRRDEDGVQMTAQQVFEEFICQRLMQGYQIIVQPKTQKPNPAVPPPLSSSPLYSRGLVSRNRPEEEDQYWLSMGRTFHKVTLKDKMITVTRYLPKYPYESAQIHYTYSLCPSHSDSEFVSCWVEFSHERLEEYKWNYLDQYICSAGSEDFSLIESLKFWRTRFLLLPACVTATKRITEGEAHCDIYGDRPRADEDEWQLLDGFVRFVEGLNRIRRRHRSDRMMRKGTAMKGLQMTGPISTHSLESTAPPVGKKGTSALSALLEMEASQKCLGEQQAAVHGGKSSAQSAESSSVAMTPTYMDSPRKVSVDQTATPMLDGTSLGICTGQSMDRGNSQTFGNSQNIGEQGYSSTNSSDSSSQQLVASSLTSSSTLTEILEAMKHPSTGVQLLSEQKGLSPYCFISAEVVHWLVNHVEGIQTQAMAIDIMQKMLEEQLITHASGEAWRTFIYGFYFYKIVTDKEPDRVAMQQPATTWHTAGVDDFASFQRKWFEVAFVAEELVHSEIPAFLLPWLPSRPASYASRHSSFSRSFGGRSQAAALLAATVPEQRTVTLDVDVNNRTDRLEWCSCYYHGNFSLNAAFEIKLHWMAVTAAVLFEMVQGWHRKATSCGFLLVPVLEGPFALPSYLYGDPLRAQLFIPLNISCLLKEGSEHLFDSFEPETYWDRMHLFQEAIAHRFGFVQDKYSASAFNFPAENKPQYIHVTGTVFLQLPYSKRKFSGQQRRRRNSTSSTNQNMFCEERVGYNWAYNTMLTKTWRSSATGDEKFADRLLKDFTDFCINRDNRLVTFWTSCLEKMHASAP

SEQ ID NO: 19065 - protein, 1552 aa, Homo sapiens
MRTTKVYKLVIHKKGFGGSDDELVVNPKVFPHIKLGDIVEIAHPNDEYSPLLLQVKSLKEDLQKETISVDQTVTQVFRLRPYQDVYVNVVDPKDVTLDLVELTFKDQYIGRGDMWRLKKSLVSTCAYITQKVEFAGIRAQAGELWVKNEKVMCGYISEDTRVVFRSTSAMVYIFIQMSCEMWDFDIYGDLYFEKAVNGFLADLFTKWKEKNCSHEVTVVLFSRTFYDAKSVDEFPEINRASIRQDHKGRFYEDFYKVVVQNERREEWTSLLVTIKKLFIQYPVLVRLEQAEGFPQGDNSTSAQGNYLEAINLSFNVFDKHYINRNFDRTGQMSVVITPGVGVFEVDRLLMILTKQRMIDNGIGVDLVCMGEQPLHAVPLFKLHNRSAPRDSRLGDDYNIPHWINHSFYTSKSQLFCNSFTPRIKLAGKKPASEKAKNGRDTSLGSPKESENALPIQVDYDAYDAQVFRLPGPSRAQCLTTCRSVRERESHSRKSASSCDVSSSPSLPSRTLPTEEVRSQASDDSSLGKSANILMIPHPHLHQYEVSSSLGYTSTRDVLENMMEPPQRDSSAPGRFHVGSAESMLHVRPGGYTPQRALINPFAPSRMPMKLTSNRRRWMHTFPVGPSGEAIQIHHQTRQNMAELQGSGQRDPTHSSAELLELAYHEAAGRHSNSRQPGDGMSFLNFSGTEELSVGLLSNSGAGMNPRTQNKDSLEDSVSTSPDPILTLSAPPVVPGFCCTVGVDWKSLTTPACLPLTTDYFPDRQGLQNDYTEGCYDLLPEADIDRRDEDGVQMTAQQVFEEFICQRLMQGYQIIVQPKTQKPNPAVPPPLSSSPLYSRGLVSRNRPEEEDQYWLSMGRTFHKVTLKDKMITVTRYLPKYPYESAQIHYTYSLCPSHSDSEFVSCWVEFSHERLEEYKWNYLDQYICSAGSEDFSLIESLKFWRTRFLLLPACVTATKRITEGEAHCDIYGDRPRADEDEWQLLDGFVRFVEGLNRIRRRHRSDRMMRKGTAMKGLQMTGPISTHSLESTAPPVGKKGTSALSALLEMEASQKCLGEQQAAVHGGKSSAQSAESSSVAMTPTYMDSPRKDGAFFMEFVRSPRTASSAFYPQVSVDQTATPMLDGTSLGICTGQSMDRGNSQTFGNSQNIGEQGYSSTNSSDSSSQQLVASSLTSSSTLTEILEAMKHPSTGVQLLSEQKGLSPYCFISAEVVHWLVNHVEGIQTQAMAIDIMQKMLEEQLITHASGEAWRTFIYGFYFYKIVTDKEPDRVAMQQPATTWHTAGVDDFASFQRKWFEVAFVAEELVHSEIPAFLLPWLPSRPASYASRHSSFSRSFGGRSQAAALLAATVPEQRTVTLDVDVNNRTDRLEWCSCYYHGNFSLNAAFEIKLHWMAVTAAVLFEMVQGWHRKATSCGFLLVPVLEGPFALPSYLYGDPLRAQLFIPLNISCLLKEGSEHLFDSLGLYKINILPLLLTSLLRTSLSISTLQEQCFCSCPTPSASSQGSSGGGGTPPAPPTRTCSARSGSATTGPTTPCSPKHGAPAPQGMKSLLIGC

SEQ ID NO: 19066 - protein, 1229 aa, Homo sapiens
MRTTKVYKLVIHKKGFGGSDDELVVNPKVFPHIKLGDIVEIAHPNDEYSPLLLQVKSLKEDLQKETISVDQTVTQVFRLRPYQDVYVNVVDPKDVTLDLVELTFKDQYIGRGDMWRLKKSLVSTCAYITQKVEFAGIRAQAGELWVKNEKVMCGYISEDTRVVFRSTSAMVYIFIQMSCEMWDFDIYGDLYFEKAVNGFLADLFTKWKEKNCSHEVTVVLFSRTFYDAKSVDEFPEINRASIRQDHKGRFYEDFYKVVVQNERREEWTSLLVTIKKLFIQYPVLVRLEQAEGFPQGDNSTSAQGNYLEAINLSFNVFDKHYINRNFDRTGQMSVVITPGVGVFEVDRLLMILTKQRMIDNGIGVDLVCMGEQPLHAVPLFKLHNRSAPRDSRLGDDYNIPHWINHSFYTSKSQLFCNSFTPRIKLAGKKPASEKAKNGRDTSLGSPKESENALPIQVDYDAYDAQVFRLPGPSRAQCLTTCRSVRERESHSRKSASSCDVSSSPSLPSRTLPTEEVRSQASDDSSLGKSANILMIPHPHLHQYEVSSSLGYTSTRDVLENMMEPPQRDSSAPGRFHVGSAESMLHVRPGGYTPQRALINPFAPSRMPMKLTSNRRRWMHTFPVGMNPRTQNKDSLEDSVSTSPDPILTLSAPPVVPGFCCTVGVDWKSLTTPACLPLTTDYFPDRQGLQNDYTEGCYDLLPEADIDRRDEDGVQMTAQQVFEEFICQRLMQGYQIIVQPKTQKPNPAVPPPLSSSPLYSRGLVSRNRPEEEDQYWLSMGRTFHKVTLKDKMITVTRYLPKYPYESAQIHYTYSLCPSHSDSEFVSCWVEFSHERLEEYKWNYLDQYICSAGSEDFSLIESLKFWRTRFLLLPACVTATKRITEGEAHCDIYGDRPRADEDEWQLLDGFVRFVEGLNRIRRRHRSDRMMRKGTAMKGLQMTGPISTHSLESTAPPVGKKGTSALSALLEMEASQKCLGEQQAAVHGGKSSAQSAESSSVAMTPTYMDSPRKDGAFFMEFVRSPRTASSAFYPQVSVDQTATPMLDGTSLGICTGQSMDRGNSQTFGNSQNIGEQGYSSTNSSDSSSQQLVASSLTSSSTLTEILEAMKHPSTGVQLLSEQKGLSPYCFISAEVVHWLVNHVEGIQTQAMAIDVMQWPCSSPPPPGTQQEWTTSPASSASGLRWPLWQKSSCTLRFLPFSCPGCLTGQPPMQVGTAPLAEVLEDGARRQHF

SEQ ID NO: 19067 - protein, 1503 aa, Homo sapiens
MRTTKVYKLVIHKKGFGGSDDELVVNPKVFPHIKLGDIVEIAHPNDEYSPLLLQVKSLKEDLQKETISVDQTVTQVFRLRPYQDVYVNVVDPKDVTLDLVELTFKDQYIGRGDMWRLKKSLVSTCAYITQKVEFAGIRAQAGELWVKNEKVMCGYISEDTRVVFRSTSAMVYIFIQMSCEMWDFDIYGDLYFEKAVNGFLADLFTKWKEKNCSHEVTVVLFSRTFYDAKSVDEFPEINRASIRQDHKGRFYEDFYKVVVQNERREEWTSLLVTIKKLFIQYPVLVRLEQAEGFPQGDNSTSAQGNYLEAINLSFNVFDKHYINRNFDRTGQMSVVITPGVGVFEVDRLLMILTKQRMIDNGIGVDLVCMGEQPLHAVPLFKLHNRSAPRDSRLGDDYNIPHWINHSFYTSKSQLFCNSFTPRIKLAGKKPASEKAKNGRDTSLGSPKESENALPIQVDYDAYDAQVFRLPGPSRAQCLTTCRSVRERESHSRKSASSCDVSSSPSLPSRTLPTEEVRSQASDDSSLGKSANILMIPHPHLHQYEVSSSLGYTSTRDVLENMMEPPQRDSSAPGRFHVGSAESMLHVRPGGYTPQRALINPFAPSRMPMKLTSNRRRWMHTFPVGMNPRTQNKDSLEDSVSTSPDPILTLSAPPVVPGFCCTVGVDWKSLTTPACLPLTTDYFPDRQGLQNDYTEGCYDLLPEADIDRRDEDGVQMTAQQVFEEFICQRLMQGYQIIVQPKTQKPNPAVPPPLSSSPLYSRGLVSRNRPEEEDQYWLSMGRTFHKVTLKDKMITVTRYLPKYPYESAQIHYTYSLCPSHSDSEFVSCWVEFSHERLEEYKWNYLDQYICSAGSEDFSLIESLKFWRTRFLLLPACVTATKRITEGEAHCDIYGDRPRADEDEWQLLDGFVRFVEGLNRIRRRHRSDRMMRKGTAMKGLQMTGPISTHSLESTAPPVGKKGTSALSALLEMEASQKCLGEQQAAVHGGKSSAQSAESSSVAMTPTYMDSPRKVSVDQTATPMLDGTSLGICTGQSMDRGNSQTFGNSQNIGEQGYSSTNSSDSSSQQLVASSLTSSSTLTEILEAMKHPSTGVQLLSEQKGLSPYCFISAEVVHWLVNHVEGIQTQAMAIDIMQKMLEEQLITHASGEAWRTFIYGFYFYKIVTDKEPDRVAMQQPATTWHTAGVDDFASFQRKWFEVAFVAEELVHSEIPAFLLPWLPSRPASYASRHSSFSRSFGGRSQAAALLAATVPEQRTVTLDVDVNNRTDRLEWCSCYYHGNFSLNAAFEIKLHWMAVTAAVLFEMVQGWHRKATSCGFLLVPVLEGPFALPSYLYGDPLRAQLFIPLNISCLLKEGSEHLFDSFEPETYWDRMHLFQEAIAHRFGFVQDKYSASAFNFPAENKPQYIHVTGTVFLQLPYSKRKFSGQQRRRRNSTSSTNQNMFCEERVGYNWAYNTMLTKTWRSSATGDEKFADRLLKDFTDFCINRDNRLVTFWTSCLEKMHASAP

SEQ ID NO: 19068 - protein, 1594 aa, Homo sapiens
MRTTKVYKLVIHKKGFGGSDDELVVNPKVFPHIKLGDIVEIAHPNDEYSPLLLQVKSLKEDLQKETISVDQTVTQVFRLRPYQDVYVNVVDPKDVTLDLVELTFKDQYIGRGDMWRLKKSLVSTCAYITQKVEFAGIRAQAGELWVKNEKVMCGYISEDTRVVFRSTSAMVYIFIQMSCEMWDFDIYGDLYFEKAVNGFLADLFTKWKEKNCSHEVTVVLFSRTFYDAKSVDEFPEINRASIRQDHKGRFYEDFYKVVVQNERREEWTSLLVTIKKLFIQYPVLVRLEQAEGFPQGDNSTSAQGNYLEAINLSFNVFDKHYINRNFDRTGQMSVVITPGVGVFEVDRLLMILTKQRMIDNGIGVDLVCMGEQPLHAVPLFKLHNRSAPRDSRLGDDYNIPHWINHSFYTSKSQLFCNSFTPRIKLAGKKPASEKAKNGRDTSLGSPKESENALPIQVDYDAYDAQVFRLPGPSRAQCLTTCRSVRERESHSRKSASSCDVSSSPSLPSRTLPTEEVRSQASDDSSLGKSANILMIPHPHLHQYEVSSSLGYTSTRDVLENMMEPPQRDSSAPGRFHVGSAESMLHVRPGGYTPQRALINPFAPSRMPMKLTSNRRRWMHTFPVGPSGEAIQIHHQTRQNMAELQGSGQRDPTHSSAELLELAYHEAAGRHSNSRQPGDGMSFLNFSGTEELSVGLLSNSGAGMNPRTQNKDSLEDSVSTSPDPMPGFCCTVGVDWKSLTTPACLPLTTDYFPDRQGLQNDYTEGCYDLLPEADIDRRDEDGVQMTAQQVFEEFICQRLMQGYQIIVQPKTQKPNPAVPPPLSSSPLYSRGLVSRNRPEEEDQYWLSMGRTFHKVTLKDKMITVTRYLPKYPYESAQIHYTYSLCPSHSDSEFVSCWVEFSHERLEEYKWNYLDQYICSAGSEDFSLIESLKFWRTRFLLLPACVTATKRITEGEAHCDIYGDRPRADEDEWQLLDGFVRFVEGLNRIRRRHRSDRMMRKGTAMKGLQMTGPISTHSLESTAPPVGKKGTSALSALLEMEASQKCLGEQQAAVHGGKSSAQSAESSSVAMTPTYMDSPRKDGAFFMEFVRSPRTASSAFYPQVSVDQTATPMLDGTSLGICTGQSMDRGNSQTFGNSQNIGEQGYSSTNSSDSSSQQLVASSLTSSSTLTEILEAMKHPSTGVQLLSEQKGLSPYCFISAEVVHWLVNHVEGIQTQAMAIDIMQKMLEEQLITHASGEAWRTFIYGFYFYKIVTDKEPDRVAMQQPATTWHTAGVDDFASFQRKWFEVAFVAEELVHSEIPAFLLPWLPSRPASYASRHSSFSRSFGGRSQAAALLAATVPEQRTVTLDVDVNNRTDRLEWCSCYYHGNFSLNAAFEIKLHWMAVTAAVLFEMVQGWHRKATSCGFLLVPVLEGPFALPSYLYGDPLRAQLFIPLNISCLLKEGSEHLFDSFEPETYWDRMHLFQEAIAHRFGFVQDKYSASAFNFPAENKPQYIHVTGTVFLQLPYSKRKFSGQQRRRRNSTSSTNQNMFCEERVGYNWAYNTMLTKTWRSSATGDEKFADRLLKDFTDFCINRDNRLVTFWTSCLEKMHASAP

SEQ ID NO: 19069 - protein, 1572 aa, Homo sapiens
MRTTKVYKLVIHKKGFGGSDDELVVNPKVFPHIKLGDIVEIAHPNDEYSPLLLQVKSLKEDLQKETISVDQTVTQVFRLRPYQDVYVNVVDPKDVTLDLVELTFKDQYIGRGDMWRLKKSLVSTCAYITQKVEFAGIRAQAGELWVKNEKVMCGYISEDTRVVFRSTSAMVYIFIQMSCEMWDFDIYGDLYFEKAVNGFLADLFTKWKEKNCSHEVTVVLFSRTFYDAKSVDEFPEINRASIRQDHKGRFYEDFYKVVVQNERREEWTSLLVTIKKLFIQYPVLVRLEQAEGFPQGDNSTSAQGNYLEAINLSFNVFDKHYINRNFDRTGQMSVVITPGVGVFEVDRLLMILTKQRMIDNGIGVDLVCMGEQPLHAVPLFKLHNRSAPRDSRLGDDYNIPHWINHSFYTSKSQLFCNSFTPRIKLAGKKPASEKAKNGRDTSLGSPKESENALPIQVDYDAYDAQVFRLPGPSRAQCLTTCRSVRERESHSRKSASSCDVSSSPSLPSRTLPTEEVRSQASDDSSLGKSANILMIPHPHLHQYEVSSSLGYTSTRDVLENMMEPPQRDSSAPGRFHVGSAESMLHVRPGGYTPQRALINPFAPSRMPMKLTSNRRRWMHTFPVGPSGEAIQIHHQTRQNMAELQGSGQRDPTHSSAELLELAYHEAAGRHSNSRQPGDGMSFLNFSGTEELSVGLLSNSGAGMNPRTQNKDSLEDSVSTSPDPMPGFCCTVGVDWKSLTTPACLPLTTDYFPDRQGLQNDYTEGCYDLLPEADIDRRDEDGVQMTAQQVFEEFICQRLMQGYQIIVQPKTQKPNPAVPPPLSSSPLYSRGLVSRNRPEEEDQYWLSMGRTFHKVTLKDKMITVTRYLPKYPYESAQIHYTYSLCPSHSDSEFVSCWVEFSHERLEEYKWNYLDQYICSAGSEDFSLIESLKFWRTRFLLLPACVTATKRITEGEAHCDIYGDRPRADEDEWQLLDGFVRFVEGLNRIRRRHRSDRMMRKGTAMKGLQMTGPISTHSLESTAPPVGKKGTSALSALLEMEASQKCLGEQQAAVHGGKSSAQSAESSSVAMTPTYMDSPRKVSVDQTATPMLDGTSLGICTGQSMDRGNSQTFGNSQNIGEQGYSSTNSSDSSSQQLVASSLTSSSTLTEILEAMKHPSTGVQLLSEQKGLSPYCFISAEVVHWLVNHVEGIQTQAMAIDIMQKMLEEQLITHASGEAWRTFIYGFYFYKIVTDKEPDRVAMQQPATTWHTAGVDDFASFQRKWFEVAFVAEELVHSEIPAFLLPWLPSRPASYASRHSSFSRSFGGRSQAAALLAATVPEQRTVTLDVDVNNRTDRLEWCSCYYHGNFSLNAAFEIKLHWMAVTAAVLFEMVQGWHRKATSCGFLLVPVLEGPFALPSYLYGDPLRAQLFIPLNISCLLKEGSEHLFDSFEPETYWDRMHLFQEAIAHRFGFVQDKYSASAFNFPAENKPQYIHVTGTVFLQLPYSKRKFSGQQRRRRNSTSSTNQNMFCEERVGYNWAYNTMLTKTWRSSATGDEKFADRLLKDFTDFCINRDNRLVTFWTSCLEKMHASAP

SEQ ID NO: 19070 - protein, 340 aa, Homo sapiens
MEPSWLQELMAHPFLLLILLCMSLLLFQVIRLYQRRRWTIRAMHLFPAPPAHWFYGHKESYPVKEFEVYPELMEKYPCAVPLWVGPFTMFFNIHDPDYVKILLKRQDPKSAVSHKILESWVGRGLVTLDGSKWKKHRQIVKPGFNISILKIFITMMSKSVRMMLNKWEEHIAQNSRLELFQHVSLMTLDSIMKCAFSHQGSIQLDSTLDSYLKAVFNLSKISNQRMNNFLHHNDLVFKFSSQGQIFSKFNQELHQFTEKVIQDRKESLKDKLKQDTTQKRRQDFLDILLSAKSENTKDFSEADLQAEVKTFMFAGHDTTTTAISWIFYCLAKYPEHQQRC

SEQ ID NO: 19071 - protein, 292 aa, Homo sapiens
MEPSWLQELMAHPFLLLILLCMSLLLFQVIRLYQRRRWTIRAMHLFPAPPAHWFYGHKESYPVKEFEVYPELMEKYPCAVPLWVGPFTMFFNIHDPDYVKILLKRQDPKSAVSHKILESWVGRGLVTLDGSKWKKHRQIVKPGFNISILKIFITMMSKSVRMMLNKWEEHIAQNSRLELFQHVSLMTLDSIMKCAFSHQGSIQLDSTLDSYLKAVFNLSKISNQRMNNFLHHNDLVFKFSSQGQIFSKFNQELHQFTEKVIQDRKESLKDKLKQDTTQKRRQDFLDILLSAK

SEQ ID NO: 19072 - protein, 1278 aa, Homo sapiens
MTTHVTLEDALSNVDLLEELPLPDQQPCIEPPPSSIMYQANFDTNFEDRNAFVTGIARYIEQATVHSSMNEMLEEGHEYAVMLYTWRSCSRAIPQVKCNEQPNRVEIYEKTVEVLEPEVTKLMKFMYFQRKAIERFCSEVKRLCHAERRKDFVSEAYLLTLGKFINMFAVLDELKNMKCSVKNDHSAYKRAAQFLRKMADPQSIQESQNLSMFLANHNRITQCLHQQLEVIPGYEELLADIVNICVDYYENKMYLTPSEKHMLLKVMGFGLYLMDGNVSNIYKLDAKKRINLSKIDKFFKQLQVVPLFGDMQIELARYIKTSAHYEENKSKWTCTQSSISPQYNICEQMVQIRDDHIRFISELARYSNSEVVTGSGLDSQKSDEEYRELFDLALRGLQLLSKWSAHVMEVYSWKLVHPTDKFCNKDCPGTAEEYERATRYNYTSEEKFAFVEVIAMIKGLQVLMGRMESVFNQAIRNTIYAALQDFAQVTLREPLRQAVRKKKNVLISVLQAIRKTICDWEGGREPPNDPCLRGEKDPKGGFDIKVPRRAVGPSSTQACQWSPRALFHPTGGTQGRRGCRSLLYMVRTMLESLIADKSGSKKTLRSSLDGPIVLAIEDFHKQSFFFTHLLNISEALQQCCDLSQLWFREFFLELTMGRRIQFPIEMSMPWILTDHILETKEPSMMEYVLYPLDLYNDSAYYALTKFKKQFLYDEIEAEVNLCFDQFVYKLADQIFAYYKAMAGSVLLDKRFRAECKNYGVIIPYPPSNRYETLLKQRHVQLLGRSIDLNRLITQRISAAMYKSLDQAISRFESEDLTSIVELEWLLEINRLTHRLLCKHMTLDSFDAMFREANHNVSAPYGRITLHVFWELNFDFLPNYCYNGSTNRFVRTAIPFTQEPQRDKPANVQPYYLYGSKPLNIAYSHIYSSYRNFVGPPHFKTICRLLGYQGIAVVMEELLKIVKSLLQGTILQYVKTLIEVMPKICRLPRHEYGSPGILEFFHHQLKDIIEYAELKTDVFQSLREVGNAILFCLLIEQALSQEEVCDLLHAAPFQNILPRVYIKEGERLEVRMKRLEAKYAPLHLVPLIERLGTPQQIAIAREGDLLTKERLCCGLSMFEVILTRIRSYLQDPIWRGPPPTNGVMHVDECVEFHRLWSAMQFVYCIPVGTNEFTAEQCFGDGLNWAGCSIIVLLGQQRRFDLFDFCYHLLKVQRQDGKDEIIKNVPLKKMADRIRKYQILNNEVFAILNKYMKSVETDSSTVEHVRCFQPPIHQSLATTC

SEQ ID NO: 19073 - protein, 1253 aa, Homo sapiens
MTTHVTLEDALSNVDLLEELPLPDQQPCIEPPPSSIMYQANFDTNFEDRNAFVTGIARYIEQATVHSSMNEMLEEGHEYAVMLYTWRSCSRAIPQVKCNEQPNRVEIYEKTVEVLEPEVTKLMKFMYFQRKAIERFCSEVKRLCHAERRKDFVSEAYLLTLGKFINMFAVLDELKNMKCSVKNDHSAYKRAAQFLRKMADPQSIQESQNLSMFLANHNRITQCLHQQLEVIPGYEELLADIVNICVDYYENKMYLTPSEKHMLLKVMGFGLYLMDGNVSNIYKLDAKKRINLSKIDKFFKQLQVVPLFGDMQIELARYIKTSAHYEENKSKWTCTQSSISPQYNICEQMVQIRDDHIRFISELARYSNSEVVTGSGLDSQKSDEEYRELFDLALRGLQLLSKWSAHVMEVYSWKLVHPTDKFCNKDCPGTAEEYERATRYNYTSEEKFAFVEVIAMIKGLQVLMGRMESVFNQAIRNTIYAALQDFAQVTLREPLRQAVRKKKNVLISVLQAIRKTICDWEGGREPPNDPCLRGEKDPKGGFDIKVPRRAVGPSSTQLYMVRTMLESLIADKSGSKKTLRSSLDGPIVLAIEDFHKQSFFFTHLLNISEALQQCCDLSQLWFREFFLELTMGRRIQFPIEMSMPWILTDHILETKEPSMMEYVLYPLDLYNDSAYYALTKFKKQFLYDEIEAEVNLCFDQFVYKLADQIFAYYKAMAGSVLLDKRFRAECKNYGVIIPYPPSNRYETLLKQRHVQLLGRSIDLNRLITQRISAAMYKSLDQAISRFESEDLTSIVELEWLLEINRLTHRLLCKHMTLDSFDAMFREANHNVSAPYGRITLHVFWELNFDFLPNYCYNGSTNRFVRTAIPFTQEPQRDKPANVQPYYLYGSKPLNIAYSHIYSSYRNFVGPPHFKTICRLLGYQGIAVVMEELLKIVKSLLQGTILQYVKTLIEVMPKICRLPRHEYGSPGILEFFHHQLKDIIEYAELKTDVFQSLREVGNAILFCLLIEQALSQEEVCDLLHAAPFQNILPRVYIKEGERLEVRMKRLEAKYAPLHLVPLIERLGTPQQIAIAREGDLLTKERLCCGLSMFEVILTRIRSYLQDPIWRGPPPTNGVMHVDECVEFHRLWSAMQFVYCIPVGTNEFTAEQCFGDGLNWAGCSIIVLLGQQRRFDLFDFCYHLLKVQRQDGKDEIIKNVPLKKMADRIRKYQILNNEVFAILNKYMKSVETDSSTVEHVRCFQPPIHQSLATTC

SEQ ID NO: 19074 - protein, 619 aa, Homo sapiens
MPWQAFRRFGQKLVRRRTLESGMAETRLARCLSTLDLVALGVGSTLGAGVYVLAGEVAKDKAGPSIVICFLVAALSSVLAGLCYAEFGARVPRSGSAYLYSYVTVGELWAFTTGWNLILSYVIGTASVARAWSSAFDNLIGNHISKTLQGSIALHVPHVLAEYPDFFALGLVLLLTGLLALGASESALVTKVFTGVNLLVLGFVMISGFVKGDVHNWKLTEEDYELAMAELNDTYSLGPLGSGGFVPFGFEGILRGAATCFYAFVGFDCIATTGEEAQNPQRSIPMGIVISLSVCFLAYFAVSSALTLMMPYYQLQPESPLPEAFLYIGWAPARYVVAVGSLCALSTSLLGSMFPMPRVIYAMAEDGLLFRVLARIHTGTRTPIIATVVSGIIAAFMAFLFKLTDLVDLMSIGTLLAYSLVSICVLILRYQPDQETKTGEEVELQEEAITTESEKLTLWGLFFPLNSIPTPLSGQIVYVCSSLLAVLLTALCLVLAQWSVPLLSGDLLWTAVVVLLLLLIIGIIVVIWRQPQSSTPLHFKVPALPLLPLMSIFVNIYLMMQMTAGTWARFGVWMLIGFAIYFGYGIQHSLEEIKSNQPSRKSRAKTVDLDPGTLYVHSV

SEQ ID NO: 19075 - protein, 174 aa, Homo sapiens
MAAANKGNKPRVRSIRFAAGHDAEGSHSHVHFDEKLHDSVVMVTQESDSSFLVKVGFLKILHRYEITFTLPPVHRLSKDVREAPVPSLHLKLLSVVPVPEGYSVKCEYSAHKEGVLKEEILLACEGGTGTCVRVTVQARVMDRHHGTPMLLDGVKCVGAELEYDSEHSDWHGFD

SEQ ID NO: 19076 - protein, 199 aa, Homo sapiens
MAAANKGKCLPGVVGLAQALPVGPGRRAIAAGNKPRVRSIRFAAGHDAEGSHSHVHFDEKLHDSVVMVTQESDSSFLVKVGFLKILHRYEITFTLPPVHRLSKDVREAPVPSLHLKLLSVVPVPEGYSVKCEYSAHKEGVLKEEILLACEGGTGTCVRVTVQARVMDRHHGTPMLLDGVKCVGAELEYDSEHSDWHGFD

SEQ ID NO: 19077 - protein, 102 aa, Homo sapiens
MSSSGYPPNQGAFSTEQSHYPPHSVKYTFPSTHHQQDPAFGGKHEAPSSPILGQPCGDDQNASPSKLSKEELIECMDRVDREIAKVEQQILKLKKKQVKVFV

SEQ ID NO: 19078 - protein, 280 aa, Homo sapiens
MGRAELLEGKMSTQDPSDLWSRSDGEAELLQDLGWYHGNLTRHAAEALLLSNGCDGSYLLRDSNETTGLYSLSVRAKDSVKHFHVEYTGYSFKFGFNEFSSLKDFVKHFANQPLIGSETGTLMVLKHPYPRKVEEPSIYESVRVHTAMQTGRTEDDLVPTAPSLGTKEGYLTKQGGLVKTWKTRWFTLHRNELKYFKDQMSPEPIRILDLTECSAVQFDYSQERVNCFCLVFPFRTFYLCAKTGVEADEWIKILRWKLSQIRKQLNQGEGTIRSRSFIFK

SEQ ID NO: 19079 - protein, 280 aa, Homo sapiens
MGRAELLEGKMSTQDPSDLWSRSDGEAELLQDLGWYHGNLTRHAAEALLLSNGCDGSYLLRDSNETTGLYSLSVRAKDSVKHFHVEYTGYSFKFGFNEFSSLKDFVKHFANQPLIGSETGTLMVLKHPYPRKVEEPSIYESVRVHTAMQTGRTEDDLVPTAPSLGTKEGYLTKQGGLVKTWKTRWFTLHRNELKYFKDQMSPEPIRILDLTECSAVQFDYSQERVNCFCLVFPFRTFYLCAKTGVEADEWIKILRWKLVKDKSCILSALCISPEEKTDHK

SEQ ID NO: 19080 - protein, 370 aa, Homo sapiens
MFQASMRSPNMEPFKQQKVEDFYDIGEELGSGQFAIVKKCREKSTGLEYAAKFIKKRQSRASRRGVSREEIEREVSILRQVLHHNVITLHDVYENRTDVVLILELVSGGELFDFLAQKESLSEEEATSFIKQILDGVNYLHTKKIAHFDLKPENIMLLDKNIPIPHIKLIDFGLAHEIEDGVEFKNIFGTPEFVAPEIVNYEPLGLEADMWSIGVITYILLSGASPFLGDTKQETLANITAVSYDFDEEFFSQTSELAKDFIRKLLVKETRKRLTIQEALRHPWITPVDNQQAMVRRESVVNLENFRKQYVRRRWKLSFSIVSLCNHLTRSLMKKVHLRPDEDLRNCESDTEEDIARRKALHPRRRSSTS

SEQ ID NO: 19081 - protein, 488 aa, Homo sapiens
MFQASMRSPNMEPFKQQKVEDFYDIGEELGSGQFAIVKKCREKSTGLEYAAKFIKKRQSRASRRGVSREEIEREVSILRQVLHHNVITLHDVYENRTDVVLILELVSGGELFDFLAQKESLSEEEATSFIKQILDGVNYLHTKKIAHFDLKPENIMLLDKNIPIPHIKLIDFGLAHEIEDGVEFKNIFGTPEFVAPEIVNYEPLGLEADMWSIGVITYILLSGASPFLGDTKQETLANITAVSYDFDEEFFSQTSELAKDFIRKLLVKETRKRLTIQEALRHPWITSKGEGRAPEQRKTEPTQLKTKHLREYTLKCHSSMPPNNSYVNFERFACVVEDVARVDLGCRALVEAHDTIQDDVEALVSIFNEKEAWYREENESARHDLSQLRYEFRKVESLKKLLREDIQATGCSLGSMARKLDHLQAQFEILRQELSADLQWIQELVGSFQLESGSSEGLGSTFYQDTSESLSELLSRSCTEEFLAGWKL

SEQ ID NO: 19082 - protein, 323 aa, Homo sapiens
MGNSASRSDFEWVYTDQPHTQRRKEILAKYPAIKALMRPDPRLKWAVLVLVLVQMLACWLVRGLAWRWLLFWAYAFGGCVNHSLTLAIHDISHNAAFGTGRAARNRWLAVFANLPVGVPYAASFKKYHVDHHRYLGGDGLDVDVPTRLEGWFFCTPARKLLWLVLQPFFYSLRPLCVHPKAVTRMEVLNTLVQLAADLAIFALWGLKPVVYLLASSFLGLGLHPISGHFVAEHYMFLKGHETYSYYGPLNWITFNVGYHVEHHDFPSIPGYNLPLVRKIAPEYYDHLPQHHSWVKVLWDFVFEDSLGPYARVKRVYRLAKDGL

SEQ ID NO: 19083 - protein, 405 aa, Homo sapiens
MERLQKQPLTSPGSVSPSRDSSVPGSPSSIVAKMDNQVLGYKDLAAIPKDKAILDIERPDLMIYEPHFTYSLLEHVELPRSRERSLSPKSTSPPPSPEVWADSRSPGIISQASAPRTTGTPRTSLPHFHHPETSRPDSNIYKKPPIYKQRESVGGSPQTKHLIEDLIIESSKFPAAQPPDPNQPAKIETDYWPCPPSLAVVETEWRKRKASRRGAEEEEEEEDDDSGEEMKALRERQREELSKVTSNLGKMILKEEMEKSLPIRRKTRSLPDRTPFHTSLHQGTSKSSSLPAYGRTTLSRLQSTEFSPSGSETGSPGLQNGEGQRGRMDRGNSLPCVLEQKIYPYEMLVVTNKGRTKLPPGVDRMRLERHLSAEDFSRVFAMSPEEFGKLALWKRNELKKKASLF

SEQ ID NO: 19084 - protein, 383 aa, Homo sapiens
MERLQKQPLTSPGSVSPSRDSSVPGSPSSIVAKMDNQVLGYKDLAAIPKDKAILDIERPDLMIYEPHFTYSLLEHVELPRSRERSLSPKSTSPPPSPEVWADSRSPGIISQASAPRTTGTPRTSLPHFHHPETSRPDSNIYKKPPIYKQRESVGGSPQTKHLIEDLIIESSKFPAAQPPDPNQPAKIETDYWPCPPSLAVVETEWRKRKASRRGAEEEEEEEDDDSGEEMKALRERQREELSKVTSNLGKMILKEEMEKSLPIRRKTRSLPDRTPFHTSLHQGTSKSSSLPAYGRTTLSRLQSTEFSPSGSETGSPGLQIYPYEMLVVTNKGRTKLPPGVDRMRLERHLSAEDFSRVFAMSPEEFGKLALWKRNELKKKASLF

SEQ ID NO: 19085 - protein, 358 aa, Homo sapiens
MERLQKAKMDNQVLGYKDLAAIPKDKAILDIERPDLMIYEPHFTYSLLEHVELPRSRERSLSPKSTSPPPSPEVWADSRSPGIISQASAPRTTGTPRTSLPHFHHPETSRPDSNIYKKPPIYKQRESVGGSPQTKHLIEDLIIESSKFPAAQPPDPNQPAKIETDYWPCPPSLAVVETEWRKRKASRRGAEEEEEEEDDDSGEEMKALRERQREELSKVTSNLGKMILKEEMEKSLPIRRKTRSLPDRTPFHTSLHQGTSKSSSLPAYGRTTLSRLQSTEFSPSGSETGSPGLQIYPYEMLVVTNKGRTKLPPGVDRMRLERHLSAEDFSRVFAMSPEEFGKLALWKRNELKKKASLF

SEQ ID NO: 19086 - protein, 365 aa, Homo sapiens
MERLQKAKMDNQVLGYKDLAAIPKDKAILDIERPDLMIYEPHFTYSLLEHVELPRSREVWADSRSPGIISQASAPRTTGTPRTSLPHFHHPETSRPDSNIYKKPPIYKQRESVGGSPQTKHLIEDLIIESSKFPAAQPPDPNQPAKIETDYWPCPPSLAVVETEWRKRKASRRGAEEEEEEEDDDSGEEMKALRERQREELSKVTSNLGKMILKEEMEKSLPIRRKTRSLPDRTPFHTSLHQGTSKSSSLPAYGRTTLSRLQSTEFSPSGSETGSPGLQNGEGQRGRMDRGNSLPCVLEQKIYPYEMLVVTNKGRTKLPPGVDRMRLERHLSAEDFSRVFAMSPEEFGKLALWKRNELKKKASLF

SEQ ID NO: 19087 - protein, 163 aa, Homo sapiens
MAGPVPPHPGLAVRAAALHPAPLRIFPGLAELPDLSRGSAARPALAQSLPGIGCGPRDPPASLPAPRRLSGLCARRRSQASLSAGVARADAPLCSGFRAGHACGTGTQPQPTLSSRSSSLTSAEVQLPQFLAQVDNYRHKPLKLECPVAGISIDLSQLSLQLQ

SEQ ID NO: 19088 - protein, 111 aa, Homo sapiens
MKSLLFTLAVFMLLAQLVSGNWYVKKCLNDVGICKKKCKPEEMHVKNGWAMCGKQRDCCVPADRRANYPVFCVQTKTTRISTVTATTATTTLMMTTASMSSMAPTPVSPTG

SEQ ID NO: 19089 - protein, 189 aa, Homo sapiens
MLLGQLSTLLCLLSGALPTGSGRPEPQSPRPQSWAAANQTWALGPGALPPLVPASALGSWKAFLGLQKARQLGMGRLQRGQDEVAAVTLPLNPQEVIQGMCKAVPFVQVFSRPGCSAIRLRNHLCFGHCSSLYIPGSDPTPLVLCNSCMPARKRWAPVVLWCLTGSSASRRRVKISTMLIEGCHCSPKA

SEQ ID NO: 19090 - protein, 61 aa, Homo sapiens
MKIHVFLFVLFFFLVPIATRVKCAVKDTYSCFIMRGKCRHECHDFEKPIGFCTKLNANCYM

SEQ ID NO: 19091 - protein, 66 aa, Homo sapiens
MKPLLVVFVFLFLWDPVLAGINSLSSEMHKKCYKNGICRLECYESEMLVAYCMFQLECCVKGNPAP

SEQ ID NO: 19092 - protein, 292 aa, Homo sapiens
MHSDAAAVNFQLNSHLSTLANIHKIYHTLNKLNLTEDIGQDDHQTGSLRSCSSSDCFNKVMPPRKKRRPASGDDLSAKKSRHDSMYRKYDSTRIKTEEEAFSSKRCLEWFYEYAGTDDVVGPEGMEKFCEDIGVEPENVVMLVLAWKLDAQNMGYFTLQEWLKGMTSLQCDTTEKLRNTLDYLRSFLNDSTNFKLIYRYAFDFAREKDQRSLDINTAKCMLGLLLGKIWPLFPVFHQFLEQSKYKVINKDQWCNVLEFSRTINLDLSNYDEDGAWPVLLDEFVEWYKDKQMS

SEQ ID NO: 19093 - protein, 257 aa, Homo sapiens
MHSDAAAVNFQLNSHLSTLANIHKIYHTLNKLNLTEDIGQDDHQTGSLRSCSSSDCFNKVMPPRKKRRPASGDDLSAKKSRHDSMYRKYDSTRIKTEEEAFSSKRCLEWFYEYAGTDDVVGPEGMEKFCEDIGVEPENVVMLVLAWKLDAQNMGYFTLQEWLKGMTSLQCDTTEKLRNTLDYLRSFLNDSTNFKLIYRYAFDFARQSKYKVINKDQWCNVLEFSRTINLDLSNYDEDGAWPVLLDEFVEWYKDKQMS

SEQ ID NO: 19094 - protein, 336 aa, Homo sapiens
MEVEAALGCSGQGRGCGGVAPAGRGRERASERGTRVRISKGLSGAGGSVRKADFQLNSHLSTLANIHKIYHTLNKLNLTEDIGQDDHQTGSLRSCSSSDCFNKVMPPRKKRRPASGDDLSAKKSRHDSMYRKYDSTRIKTEEEAFSSKRCLEWFYEYAGTDDVVGPEGMEKFCEDIGVEPENVVMLVLAWKLDAQNMGYFTLQEWLKGMTSLQCDTTEKLRNTLDYLRSFLNDSTNFKLIYRYAFDFAREKDQRSLDINTAKCMLGLLLGKIWPLFPVFHQFLEQSKYKVINKDQWCNVLEFSRTINLDLSNYDEDGAWPVLLDEFVEWYKDKQMS

SEQ ID NO: 19095 - protein, 674 aa, Homo sapiens
MNSGAMRIHSKGHFQGGIQVKNEKNRPSLKSLKTDNRPEKSKCKPLWGKVFYLDLPSVTISEKLQKDIKDLGGRVEEFLSKDISYLISNKKEAKFAQTLGRISPVPSPESAYTAETTSPHPSHDGSSFKSPDTVCLSRGKLLVEKAIKDHDFIPSNSILSNALSWGVKILHIDDIRYYIEQKKKELYLLKKSSTSVRDGGKRVGSGAQKTRTGRLKKPFVKVEDMSQLYRPFYLQLTNMPFINYSIQKPCSPFDVDKPSSMQKQTQVKLRIQTDGDKYGGTSIQLQLKEKKKKGYCECCLQKYEDLETHLLSEQHRNFAQSNQYQVVDDIVSKLVFDFVEYEKDTPKKKRIKYSVGSLSPVSASVLKKTEQKEKVELQHISQKDCQEDDTTVKEQNFLYKETQETEKKLLFISEPIPHPSNELRGLNEKMSNKCSMLSTAEDDIRQNFTQLPLHKNKQECILDISEHTLSENDLEELRVDHYKCNIQASVHVSDFSTDNSGSQPKQKSDTVLFPAKDLKEKDLHSIFTHDSGLITINSSQEHLTVQAKAPFHTPPEEPNECDFKNMDSLPSGKIHRKVKIILGRNRKENLEPNAEFDKRTEFITQEENRICSSPVQSLLDLFQTSEEKSEFLGFTSYTEKSGICNVLDIWEEENSDNLLTAFFSSPSTSTFTGF

SEQ ID NO: 19096 - protein, 234 aa, Homo sapiens
MNSGAMRIHSKGHFQGGIQVKNEKNRPSLKSLKTDNRPEKSKCKPLWGKVFYLDLPSVTISEKLQKDIKDLGGRVEEFLSKDISYLISNKKEAKFAQTLGRISPVPSPESAYTAETTSPHPSHDGSSFKSPDTVCLSRGKLLVEKAIKDHDFIPSNSILSNALSWGVKILHIDDIRYYIEQKKKELYLLKKSSTSVRDGGKRVGSGAQKTRTGRLKKPFVKVEDMSQSPAVHLM

SEQ ID NO: 19097 - protein, 461 aa, Homo sapiens
MNNFGNEEFDCHFLDEGFTAKDILDQKINEVSSSDDKDAFYVADLGDILKKHLRWLKALPRVTPFYAVKCNDSKAIVKTLAATGTGFDCASKTEIQLVQSLGVPPERIIYANPCKQVSQIKYAANNGVQMMTFDSEVELMKVARAHPKAKLVLRIATDDSKAVCRLSVKFGATLRTSRLLLERAKELNIDVVGVSFHVGSGCTDPETFVQAISDARCVFDMGAEVGFSMYLLDIGGGFPGSEDVKLKFEEITGVINPALDKYFPSDSGVRIIAEPGRYYVASAFTLAVNIIAKKIVLKEQTGSDDEDESSEQTFMYYVNDGVYGSFNCILYDHAHVKPLLQKRPKPDEKYYSSSIWGPTCDGLDRIVERCDLPEMHVGDWMLFENMGAYTVAAASTFNGFQRPTIYYVMSGPAWQLMQQFQNPDFPPEVEEQDASTLPVSCAWESGMKRHRAACASASINV

SEQ ID NO: 19098 - protein, 353 aa, Homo sapiens
MAADGDWQDFYEFQEPARSLLDQENCNASPEPGAEAGAEAGGGADGFPAPACSLEEKLSLCFRPSDPGAEPPRTAVRPITERSLLQGDEIWNALTDNYGNVMPVDWKSSHTRTLHLLTLNLSEKGVSDSLLFDTSDDEELREQLDMHSIIVSCVNDEPLFTADQVIEEIEEMMQESPDPEDDETPTQSDRLSMLSQEIQTLKRSSTGSYEERVKRLSVSELNEILEEIETAIKEYSEELVQQLALRDELEFEKEVKNSFISVLIEVQNKQKEHKETAKKKKKLKNGSSQNGKNERSHMPGTYLTTVIPYEKKNGPPSVEDLQILTKILRAMKEDSEKVPSLLTDYILKVLCPT

SEQ ID NO: 19099 - protein, 380 aa, Homo sapiens
MAADGDWQDFYEFQEPARSLLDQENCNASPEPGAEAGAEAGGGADGFPAPACSLEEKLSLCFRPSDPGAEPPRTAVRPITERSLLQGDEIWNALTDNYGNVMPVDWKSSHTRTLHLLTLNLSEKGVSDSLLFDTSDDEELREQLDMHSIIVSCVNDEPLFTADQVIEEIEEMMQESPDPEDDETPTQSDRLSMLSQEIQTLKRSSTGSYEERVKRLSVSELNEILEEIETAIKEYSEELVQQLALRDELEFEKEVKNSFISVLIEVQNKQKEHKETAKKKKKLKNGSSQNGKNERSHMPGTRFSMEGISNVIQNGLRHTFGNSGGEKQYLTTVIPYEKKNGPPSVEDLQILTKILRAMKEDSEKVPSLLTDYILKVLCPT

SEQ ID NO: 19100 - protein, 475 aa, Homo sapiens
MDSSCHNATTKMLATAPARGNMMSTSKPLAFSIERIMARTPEPKALPVPHFLQGALPKGEPKHSLHLNSSIPCMIPFVPVAYDTSPKAGVTGSEPRKASLEAPAAPAAVPSAPAFSCSDLLNCALSLKGDLARDALPLQQYKLVRPRVVNHSSFHAMGALCYLNRGDGPCHPAAGVNIHPVASYFLSSPLHPQPKTYLAERNKLVVPAVEKYPSGVAFKDLSQAQLQHYMKESAQLLSEKIAFKTSDFSRGSPNAKPKVFTCEVCGKVFNAHYNLTRHMPVHTGARPFVCKVCGKGFRQASTLCRHKIIHTQEKPHKCNQCGKAFNRSSTLNTHTRIHAGYKPFVCEFCGKGFHQKGNYKNHKLTHSGEKQFKCNICNKAFHQVYNLTFHMHTHNDKKPFTCPTCGKGFCRNFDLKKHVRKLHDSSLGLARTPAGEPGTEPPPPLPQQPPMTLPPLQPPLPTPGPLQPGLHQGHQ

SEQ ID NO: 19101 - protein, 425 aa, Homo sapiens
MDSSCHNATTKMLATAPARGNMMSTSKPLAFSIERIMARTPEPKALPVPHFLQGALPKGEPKHSLHLNSSIPCMIPFVPVAYDTSPKAGVTGSEPRKASLEAPAAPAAVPSAPAFSCSDLLNCALSLKGDLARDALPLQQYKLPKTYLAERNKLVVPAVEKYPSGVAFKDLSQAQLQHYMKESAQLLSEKIAFKTSDFSRGSPNAKPKVFTCEVCGKVFNAHYNLTRHMPVHTGARPFVCKVCGKGFRQASTLCRHKIIHTQEKPHKCNQCGKAFNRSSTLNTHTRIHAGYKPFVCEFCGKGFHQKGNYKNHKLTHSGEKQFKCNICNKAFHQVYNLTFHMHTHNDKKPFTCPTCGKGFCRNFDLKKHVRKLHDSSLGLARTPAGEPGTEPPPPLPQQPPMTLPPLQPPLPTPGPLQPGLHQGHQ

SEQ ID NO: 19102 - protein, 471 aa, Homo sapiens
MDSSCHNATTKMLATAPARGNMMSTSKPLAFSIERIMARTPEPKALPVPHFLQGALPKGEPKHSLHLNSSIPCMIPFVPVAYDTSPKAGVTGSEPRKASLEAPAAPAAVPSAPAFSCSDLLNCALSLKGDLARDALPLQQYKLVRPRVVNHSSFHAMGALCYLNRGDGPCHPAAGVNIHPVASYFLSSPLHPQPKTYLAERNKLVVPAVEKYPSGVAFKDLSQAQLQHYMKESAQLLSEKIAFKTSDFSRGSPNAKPKVFTCEVFNAHYNLTRHMPVHTGARPFVCKVCGKGFRQASTLCRHKIIHTQEKPHKCNQCGKAFNRSSTLNTHTRIHAGYKPFVCEFCGKGFHQKGNYKNHKLTHSGEKQFKCNICNKAFHQVYNLTFHMHTHNDKKPFTCPTCGKGFCRNFDLKKHVRKLHDSSLGLARTPAGEPGTEPPPPLPQQPPMTLPPLQPPLPTPGPLQPGLHQGHQ

SEQ ID NO: 19103 - protein, 740 aa, Homo sapiens
MAAFSEMGVMPEIAQAVEEMDWLLPTDIQAESIPLILGGGDVLMAAETGSGKTGAFSIPVIQIVYETLKDQQEGKKGKTTIKTGASVLNKWQMNPYDRGSAFAIGSDGLCCQSREVKEWHGCRATKGLMKGKHYYEVSCHDQGLCRVGWSTMQASLDLGTDKFGFGFGGTGKKSHNKQFDNYGEEFTMHDTIGCYLDIDKGHVKFSKNGKDLGLAFEIPPHMKNQALFPACVLKNAELKFNFGEEEFKFPPKDGFVALSKAPDGYIVKSQHSGNAQVTQTKFLPNAPKALIVEPSRELAEQTLNNIKQFKKYIDNPKLRELLIIGGVAARDQLSVLENGVDIVVGTPGRLDDLVSTGKLNLSQVRFLVLDEADGLLSQGYSDFINRMHNQIPQVTSDGKRLQVIVCSATLHSFDVKKLSEKIMHFPTWVDLKGEDSVPDTVHHVVVPVNPKTDRLWERLGKSHIRTDDVHAKDNTRPGANSPEMWSEAIKILKGEYAVRAIKEHKMDQAIIFCRTKIDCDNLEQYFIQQGGGPDKKGHQFSCVCLHGDRKPHERKQNLERFKKGDVRFLICTDVAARGIDIHGVPYVINVTLPDEKQNYVHRIGRVGRAERMGLAISLVATEKEKVWYHVCSSRGKGCYNTRLKEDGGCTIWYNEMQLLSEIEEHLNCTISQVEPDIKVPVDEFDGKVTYGQKRAAGGGSYKGHVDILAPTVQELAALEKEAQTSFLHLGYLPNQLFRTF

SEQ ID NO: 19104 - protein, 622 aa, Homo sapiens
MAAFSEMGVMPEIAQAVEEMDWLLPTDIQAESIPLILGGGDVLMAAETGSGKTGAFSIPVIQIVYETLKDQQEGKKGKTTIKTGASVLNKWQMNPYDREVKEWHGCRATKGLMKGKHYYEVSCHDQGLCRVGWSTMQASLDLGTDKFGFGFGGTGKKSHNKQFDNYGEEFTMHDTIGCYLDIDKGHVKFSKNGKDLGLAFEIPPHMKNQALFPACVLKNAELKFNFGEEEFKFPPKDGFVALSKAPDGYIVKSQHSGNAQVTQTKFLPNAPKALIVEPSRELAEQTLNNIKQFKKYIDNPKLRELLIIGGVAARDQLSVLENGVDIVVGTPGRLDDLVSTGKLNLSQVRFLVLDEADGLLSQGYSDFINRMHNQIPQVTSDGKRLQVIVCSATLHSFDVKKLSEKIMHFPTWVDLKGEDSVPDTVHHVVVPVNPKTDRLWERLGKSHIRTDDVHAKDNTRPGANSPEMWSEAIKILKGEYAVRAIKEHKMDQAIIFCRTKIDCDNLEQYFIQQGGGPDKKGHQFSCVCLHGDRKPHERKQNLERFKKGDVRFLICTDVAARGIDIHGVPYVINVTLPDEKQNYVHRIGRVGRAERMGLAISLVATEKEKVWYHMVQRDAVTI

SEQ ID NO: 19105 - protein, 612 aa, Homo sapiens
MKGKHYYEVSCHDQGLCRVGWSTMQASLDLGTDKFGFGFGGTGKKSHNKQFDNYGEEFTMHDTIGCYLDIDKGHVKFSKNGKDLGLAFEIPPHMKNQALFPACVLKNAELKFNFGEEEFKFPPKDGFVALSKAPDGYIVKSQHSGNAQVTQTKFLPNAPKALIVEPSRELAEQTLNNIKQFKKYIDNPKLRELLIIGGVAARDQLSVLENGVDIVVGTPGRLDDLVSTGKLNLSQVRFLVLDEADGLLSQGYSDFINRMHNQIPQVTSDGKRLQVIVCSATLHSFDVKKLSEKIMHFPTWVDLKGEDSVPDTVHHVVVPVNPKTDRLWERLGKSHIRTDDVHAKDNTRPGANSPEMWSEAIKILKGEYAVRAIKEHKMDQAIIFCRTKIDCDNLEQYFIQQGGGPDKKGHQFSCVCLHGDRKPHERKQNLERFKKGDVRFLICTDVAARGIDIHGVPYVINVTLPDEKQNYVHRIGRVGRAERMGLAISLVATEKEKVWYHVCSSRGKGCYNTRLKEDGGCTIWYNEMQLLSEIEEHLNCTISQVEPDIKVPVDEFDGKVTYGQKRAAGGGSYKGHVDILAPTVQELAALEKEAQTSFLHLGYLPNQLFRTF

SEQ ID NO: 19106 - protein, 78 aa, Homo sapiens
MALIRKTFYFLFAMFFILVQLPSGCQAGLDFSQPFPSGEFAVCESCKLGRGKCRKECLENEKPDGNCRLNFLCCRQRI

SEQ ID NO: 19107 - protein, 65 aa, Homo sapiens
MRTFLFLFAVLFFLTPAKNAFFDEKCNKLKGTCKNNCGKNEELIALCQKSLKCCRTIQPCGSIID

SEQ ID NO: 19108 - protein, 478 aa, Homo sapiens
MATDSWALAVDEQEAAVKSMTNLQIKEEKVKADTNGIIKTSTTAEKTDEEEKEDRAAQSLLNKLIRSNLVDNTNQVEVLQRDPNSPLYSVKSFEELRLKPQLLQGVYAMGFNRPSKIQENALPMMLAEPPQNLIAQSQSGTGKTAAFVLAMLSRVEPSDRYPQCLCLSPTYELALQTGKVIEQMGKFYPELKLAYAVRGNKLERGQKISEQIVIGTPGTVLDWCSKLKFIDPKKIKVFVLDEADVMIATQGHQDQSIRIQRMLPRNCQMLLFSATFEDSVWKFAQKVVPDPNVIKLKREEETLDTIKQYYVLCSSRDEKFQALCNLYGAITIAQAMIFCHTRKTASWLAAELSKEGHQVALLSGEMMVEQRAAVIERFREGKEKVLVTTNVCARGIDVEQVSVVINFDLPVDKDGNPDNETYLHRIGRTGRFGKRGLAVNMVDSKHSMNILNRIQEHFNKKIERLDTDDLDEIEKIAN

SEQ ID NO: 19109 - protein, 388 aa, Homo sapiens
MSGTFLIRKPQLLQGVYAMGFNRPSKIQENALPMMLAEPPQNLIAQSQSGTGKTAAFVLAMLSRVEPSDRYPQCLCLSPTYELALQTGKVIEQMGKFYPELKLAYAVRGNKLERGQKISEQIVIGTPGTVLDWCSKLKFIDPKKIKVFVLDEADVMIATQGHQDQSIRIQRMLPRNCQMLLFSATFEDSVWKFAQKVVPDPNVIKLKREEETLDTIKQYYVLCSSRDEKFQALCNLYGAITIAQAMIFCHTRKTASWLAAELSKEGHQVALLSGEMMVEQRAAVIERFREGKEKVLVTTNVCARGIDVEQVSVVINFDLPVDKDGNPDNETYLHRIGRTGRFGKRGLAVNMVDSKHSMNILNRIQEHFNKKIERLDTDDLDEIEKIAN

SEQ ID NO: 19110 - protein, 900 aa, Homo sapiens
MNYPGRGSPRSPEHNGRGGGGGAWELGSDARPAFGGGVCCFEHLPGGDPDDGDVPLALLRGEPGLHLAPGTDDHNHHLALDPCLSDENYDFSSAESGSSLRYYSEGESGGGGSSLSLHPPQQPPLVPTNSGGGGATGGSPGERKRTRLGGPAARHRYEVVTELGPEEVRWFYKEDKKTWKPFIGYDSLRIELAFRTLLQTTGARPQGGDRDGDHVCSPTGPASSSGEDDDEDRACGFCQSTTGHEPEMVELVNIEPVCVRGGLYEVDVTQGECYPVYWNQADKIPVMRGQWFIDGTWQPLEEEESNLIEQEHLNCFRGQQMQENFDIEVSKSIDGKDAVHSFKLSRNHVDWHSVDEVYLYSDATTSKIARTVTQKLGFSKASSSGTRLHRGYVEEATLEDKPSQTTHIVFVVHGIGQKMDQGRIIKNTAMMREAARKIEERHFSNHATHVEFLPVEWRSKLTLDGDTVDSITPDKVRGLRDMLNSSAMDIMYYTSPLYRDELVKGLQQELNRLYSLFCSRNPDFEEKGGKVSIVSHSLGCVITYDIMTGWNPVRLYEQLLQKEEELPDERWMSYEERHLLDELYITKRRLKEIEERLHGLKASSMTQTPALKFKVENFFCMGSPLAVFLALRGIRPGNTGSQDHILPREICNRLLNIFHPTDPVAYRLEPLILKHYSNISPVQIHWYNTSNPLPYEHMKPSFLNPAKEPTSVSENEGISTIPSPVTSPVLSRRHYGESITNIGKASILGAASIGKGLGGMLFSRFGRSSTTQSSETSKDSMEDEKKPVASPSATTVGTQTLPHSSSGFLDSAYFRLQESFFNLPQLLFPENVMQNKDNALVELDHRIDFELREGLVESRYWSAVTSHTAYWSSLDVALFLLTFMYKHEHDDDAKPNLDPI

SEQ ID NO: 19111 - protein, 872 aa, Homo sapiens
MNYPGRGSPRSPEHNGRGGGGGAWELGSDARPAFGGGVCCFEHLPGGDPDDGDVPLALLRGEPGLHLAPGTDDHNHHLALDPCLSDENYDFSSAESGSSLRYYSEGESGGGGSSLSLHPPQQPPLVPTNSGGGGATGGSPGERKRTRLGGPAARHRYEVVTELGPEEVRWFYKEDKKTWKPFIGYDSLRIELAFRTLLQTTGARPQGGDRDGDHVCSPTGPASSSGEDDDEDRACGFCQSTTGHEPEMVELVNIEPVCVRGGLYEVDVTQGECYPVYWNQADKIPVMRGQWFIDGTWQPLEEEESNLIEQEHLNCFRGQQMQENFDIEVSKSIDGKDAVHSFKLSRNHVDWHSVDEVYLYSDATTSKIARTVTQKLGFSKASSSGTRLHRGYVEEATLEDKPSQTTHIVFVVHGIGQKMDQGRIIKNTAMMREAARKIEERHFSNHATHVEFLPVEWRSKLTLDGDTVDSITPDKVRGLRDMLNSSAMDIMYYTSPLYRDELVKGLQQELNRLYSLFCSRNPDFEEKGGKVSIVSHSLGCVITYDIMTGWNPVRLYEQLLQKEEELPDERWMSYEERHLLDELYITKRRLKEIEERLHGLKASSMTQTPALKFKVENFFCMGSPLAVFLALRGIRPGNTGSQDHILPREICNRLLNIFHPTDPVAYRLEPLILKHYSNISPVQIHWYNTSNPLPYEHMKPSFLNPAKEPTSVSENEGISTIPSPVTSPVLSRRHYGESITNIGKASILGAASIGKGLGGMLFSRFGRSSTTQSSETSKDSMEDEKKPVASPSATTVGTQTLPHSSSGFLDSALELDHRIDFELREGLVESRYWSAVTSHTAYWSSLDVALFLLTFMYKHEHDDDAKPNLDPI

SEQ ID NO: 19112 - protein, 454 aa, Homo sapiens
MDQGRIIKNTAMMREAARKIEERHFSNHATHVEFLPVEWRSKLTLDGDTVDSITPDKVRGLRDMLNSSAMDIMYYTSPLYRDELVKGLQQELNRLYSLFCSRNPDFEEKGGKVSIVSHSLGCVITYDIMTGWNPVRLYEQLLQKEEELPDERWMSYEERHLLDELYITKRRLKEIEERLHGLKASSMTQTPALKFKVENFFCMGSPLAVFLALRGIRPGNTGSQDHILPREICNRLLNIFHPTDPVAYRLEPLILKHYSNISPVQIHWYNTSNPLPYEHMKPSFLNPAKEPTSVSENEGISTIPSPVTSPVLSRRHYGESITNIGKASILGAASIGKGLGGMLFSRFGRSSTTQSSETSKDSMEDEKKPVASPSATTVGTQTLPHSSSGFLDSALELDHRIDFELREGLVESRYWSAVTSHTAYWSSLDVALFLLTFMYKHEHDDDAKPNLDPI

SEQ ID NO: 19113 - protein, 879 aa, Homo sapiens
MNYPGRGSPRSPEHNGRGGGGGAWELGSDARPAFGGGVCCFEHLPGGDPDDGDVPLALLRGEPGLHLAPGTDDHNHHLALDPCLSDENYDFSSAESGSSLRYYSEGESGGGGSSLSLHPPQQPPLVPTNSGGGGATGGSPGERKRTRLGGPAARHRYEVVTELGPEEVRWFYKEDKKTWKPFIGYDSLRIELAFRTLLQTTGARPQGGDRDGDHVCSPTGPASSSGEDDDEDRACGFCQSTTGHEPEMVELVNIEPVCVRGGLYEVDVTQGECYPVYWNQADKIPVMRGQWFIDGTWQPLEEEESNLIEQEHLNCFRGQQMQENFDIEVSKSIDGKDGSGINYSAVHSFKLSRNHVDWHSVDEVYLYSDATTSKIARTVTQKLGFSKASSSGTRLHRGYVEEATLEDKPSQTTHIVFVVHGIGQKMDQGRIIKNTAMMREAARKIEERHFSNHATHVEFLPVEWRSKLTLDGDTVDSITPDKVRGLRDMLNSSAMDIMYYTSPLYRDELVKGLQQELNRLYSLFCSRNPDFEEKGGKVSIVSHSLGCVITYDIMTGWNPVRLYEQLLQKEEELPDERWMSYEERHLLDELYITKRRLKEIEERLHGLKASSMTQTPALKFKVENFFCMGSPLAVFLALRGIRPGNTGSQDHILPREICNRLLNIFHPTDPVAYRLEPLILKHYSNISPVQIHWYNTSNPLPYEHMKPSFLNPAKEPTSVSENEGISTIPSPVTSPVLSRRHYGESITNIGKASILGAASIGKGLGGMLFSRFGRSSTTQSSETSKDSMEDEKKPVASPSATTVGTQTLPHSSSGFLDSALELDHRIDFELREGLVESRYWSAVTSHTAYWSSLDVALFLLTFMYKHEHDDDAKPNLDPI

SEQ ID NO: 19114 - protein, 711 aa, Homo sapiens
MSSVQSQQEQLSQSDPSPSPNSCSSFELIDMDAGSLYEPVSPHWFYCKIIDSKETWIPFNSEDSQQLEEAYSSGKGCNGRVVPTDGGRYDVHLGERMRYAVYWDELASEVRRCTWFYKGDKDNKYVPYSESFSQVLEETYMLAVTLDEWKKKLESPNREIIILHNPKLMVHYQPVAGSDDWGSTPTEQGRPRTVKRGVENISVDIHCGEPLQIDHLVFVVHGIGPACDLRFRSIVQCVNDFRSVSLNLLQTHFKKAQENQQIGRVEFLPVNWHSPLHSTGVDVDLQRITLPSINRLRHFTNDTILDVFFYNSPTYCQTIVDTVASEMNRIYTLFLQRNPDFKGGVSIAGHSLGSLILFDILTNQKDSLGDIDSEKDSLNIVMDQGDTPTLEEDLKKLQLSEFFDIFEKEKVDKEALALCTDRDLQEIGIPLGPRKKILNYFSTRKNSMGIKRPAPQPASGANIPKESEFCSSSNTRNGDYLDVGIGQVSVKYPRLIYKPEIFFAFGSPIGMFLTVRGLKRIDPNYRFPTCKGFFNIYHPFDPVAYRIEPMVVPGVEFEPMLIPHHKGRKRMHLELREGLTRMSMDLKNNLLGSLRMAWKSFTRAPYPALQASETPEETEAEPESTSEKPSDVNTEETSVAVKEEVLPINVGMLNGGQRIDYVLQEKPIESFNEYLFALQSHLCYWESEDTVLLVLKEIYQTQGIFLDQPLQ

SEQ ID NO: 19115 - protein, 330 aa, Homo sapiens
MDQGDTPTLEEDLKKLQLSEFFDIFEKEKVDKEALALCTDRDLQEIGIPLGPRKKILNYFSTRKNSMGIKRPAPQPASGANIPKESEFCSSSNTRNGDYLDVGIGQVSVKYPRLIYKPEIFFAFGSPIGMFLTVRGLKRIDPNYRFPTCKGFFNIYHPFDPVAYRIEPMVVPGVEFEPMLIPHHKGRKRMHLELREGLTRMSMDLKNNLLGSLRMAWKSFTRAPYPALQASETPEETEAEPESTSEKPSDVNTEETSVAVKEEVLPINVGMLNGGQRIDYVLQEKPIESFNEYLFALQSHLCYWESEDTVLLVLKEIYQTQGIFLDQPLQ

SEQ ID NO: 19116 - protein, 396 aa, Homo sapiens
MLITVYCVRRDLSEVTFSLQVSPDFELRNFKVLCEAESRVPVEEIQIIHMERLLIEDHCSLGSYGLKDGDIVVLLQKDNVGPRAPGRAPNQPRVDFSGIAVPGTSSSRPQHPGQQQQRTPAAQRSQGLASGEKVAGLQGLGSPALIRSMLLSNPHDLSLLKERNPPLAEALLSGSLETFSQVLMEQQREKALREQERLRLYTADPLDREAQAKIEEEIRQQNIEENMNIAIEEAPESFGQVTMLYINCKVNGHPLKAFVDSGAQMTIMSQACAERCNIMRLVDRRWAGVAKGVGTQRIIGRVHLAQIQIEGDFLQCSFSILEDQPMDMLLGLDMLRRHQCSIDLKKNVLVIGTTGTQTYFLPEGELPLCSRMVSGQDESSDKEITHSVMDSGRKEH

SEQ ID NO: 19117 - protein, 1117 aa, Homo sapiens
MKKASRSVGSVPKVSAISKTQTAEKIKPENSSSASTGGKLVKPGTAASLSKTKSSDDLLAGMAGGVTVTNGVKGKKSTCPSAAPSASAPAMTTVENKSKISTGTASSTKRSTSTGNKESSSTRERLRERTRLNQSKKLPSAGQGANDMALAKRSRSRTATECDVRMSKSKSDNQISDRAALEAKVKDLLTLAKTKDVEILHLRNELRDMRAQLGINEDHSEGDEKSEKETIMAHQPTDVESTLLQLQEQNTAIREELNQLKNENRMLKDRLNALGFSLEQRLDNSEKLFGYQSLSPEITPDNQSDGGGTLTSSVEGSAPGSVEDLLSQDENTLMDHQHSNSMDNLDSECSEVYQPLTSSDDALDAPSSSESEGIPSIERSRKGSSGNASEVSVACLTERIHQMEENQHSTSEELQATLQELADLQQITQELNSENERLGEEKVILMESLCQQSDKLEHFSRQIEYFRSLLDEHHISYVIDEDVKSGRYMELEQRYMDLAENARFEREQLLGVQQHLSNTLKMAEQDNKEAQEMIGALKERSHHMERIIESEQKGKAALAATLEEYKATVASDQIEMNRLKAQLENEKQKVAELYSIHNSGDKSDIQDLLESVRLDKEKAETLASSLQEDLAHTRNDANRLQDAIAKVEDEYRAFQEEAKKQIEDLNMTLEKLRSDLDEKETERSDMKETIFELEDEVEQHRAVKLHDNLIISDLENTVKKLQDQKHDMEREIKTLHRRLREESAEWRQFQADLQTAVVIANDIKSEAQEEIGDLKRRLHEAQEKNEKLTKELEEIKSRKQEEERGRVYNYMNAVERDLAALRQGMGLSRRSSTSSEPTPTVKTLIKSFDSASQVPNPAAAAIPRTPLSPSPMKTPPAAAVSPMQRHSISGPISTSKPLTALSDKRPNYGEIPVQEHLLRTSSASRPASLPRVPAMESAKTLSVSRRSSEEVKRDISAQEGASPASLMAMGTTSPQLSLSSSPTASVTPTTRSRIREERKDPLSALAREYGGSKRNALLKWCQKKTEGYQNIDITNFSSSWNDGLAFCALLHTYLPAHIPYQELNSQDKRRNFMLAFQAAESVGIKSTLDINEMVRTERPDWQNVMLYVTAIYKYFET

SEQ ID NO: 19118 - protein, 1078 aa, Homo sapiens
MKKASRSVGSVPKVSAISKTQTAEKIKPENSSSASTGGKLVKPGTAASLSKTKSSDDLLAGMAGGVTVTNGVKGKKSTCPSAAPSASAPAMTTVENKSKISTGTASSTKRSTSTGNKESSSTRERLRERTRLNQSKKLPSAGQGANDMALAKRSRSRTATECDVRMSKSKSDNQISDRAALEAKVKDLLTLAKTKDVEILHLRNELRDMRAQLGINEDHSEGDEKSEKETIMAHQPTDVESTLLQLQEQNTAIREELNQLKNENRMLKDRLNALGFSLEQRLDNSEKLFGYQSLSPEITPDNQSDGGGTLTSSVEGSAPGSVEDLLSQDENTLMDHQHSNSMDNLDSECSEVYQPLTSSDDALDAPSSSESEGIPSIERSRKGSSGNASEVSVACLTERIHQMEENQHSTSEELQATLQELADLQQITQELNSENERLGEEKVILMESLCQQSDKLEHFSRQIEYFRSLLDEHHISYVIDEDVKSGRYMELEQRYMDLAENARFEREQLLGVQQHLSNTLKMAEQDNKEAQEMIGALKERSHHMERIIESEQKGKAALAATLEEYKATVASDQIEMNRLKAQLENEKQKVAELYSIHNSGDKSDIQDLLESVRLDKEKAETLASSLQEDLAHTRNDANRLQDAIAKVEDEYRAFQEEAKKQIEDLNMTLEKLRSDLDEKETERSDMKETIFELEDEVEQHRAVKLHDNLIISDLENTVKKLQDQKHDMEREIKTLHRRLREESAEWRQFQADLQTAVVIANDIKSEAQEEIGDLKRRLHEAQEKNEKLTKELEEIKSRKQEEERGRVYNYMNAVERDLAALRQGMGLSRRSSTSSEPTPTVKTLIKSFDSASQVPNPAAAAIPRTPLSPSPMKTPPAAAVSPMQRHSISGPISTSKPLTALSDKRPNYGEIPVQEHLLRTSSASRPASLPRVPAMESAKTLSVSRRSSEEVKRDISAQEGASPASLMAMGTTSPQLSLSSSPTASVTPTTRSRIREERKDPLSALAREYGGSKRNALLKWCQKKTEGYQRRNFMLAFQAAESVGIKSTLDINEMVRTERPDWQNVMLYVTAIYKYFET

SEQ ID NO: 19119 - protein, 146 aa, Homo sapiens
MAGPLRAPLLLLAILAVALAVSPAAGSSPGKPPRLVGGPMDASVEEEGVRRALDFAVGEYNKASNDMYHSRALQVVRARKQIVAGVNYFLDVELGRTTCTKTQPNLDNCPFHDQPHLKRKAFCSFQIYAVPWQGTMTLSKSTCQDA

SEQ ID NO: 19120 - protein, 645 aa, Homo sapiens
MSDKSDLKAELERKKQRLAQIREEKKRKEEERKKKEADMQQKKEPVQDDSDLDRKRRETEALLQSIGISPEPPLVQPLHFLTWDTCYFHYLVPTPMSPSSKSVSTPSEAGSQDSGDLGPLTRTLQWDTDPSVLQLQSDSELGRRLHKLGVSKVTQVDFLPREVVSYSKETQTPLATHQSEEDEEDEEMVESKVGQDSELENQDKKQEVKEAPPRELTEEEKQQILHSEEFLIFFDRTIRVIERALAEDSDIFFDYSGRELEEKDGDVQAGANLSFNRQFYDEHWSKHRVVTCMDWSLQYPELMVASYNNNEDAPHEPDGVALVWNMKFKKTTPEYVFHCQSSVMSVCFARFHPNLVVGGTYSGQIVLWDNRSHRRTPVQRTPLSAAAHTHPVYCVNVVGTQNAHNLITVSTDGKMCSWSLDMLSTPQESMELVYNKSKPVAVTGMAFPTGDVNNFVVGSEEGTVYTACRHGSKAGIGEVFEGHQGPVTGINCHMAVGPIDFSHLFVTSSFDWTVKLWTTKHNKPLYSFEDNADYVYDVMWSPVHPALFACVDGMGRLDLWNLNNDTEVPTASVAIEGASALNRVRWAQAGKEVAVGDSEGRIWVYDVGELAVPHNDEWTRFARTLVEIRANRADSEEEGTVELSA

SEQ ID NO: 19121 - protein, 628 aa, Homo sapiens
MSDKSDLKAELERKKQRLAQIREEKKRKEEERKKKEADMQQKKEPVQDDSDLDRKRRETEALLQSIGISPEPPLVPTPMSPSSKSVSTPSEAGSQDSGDLGPLTRTLQWDTDPSVLQLQSDSELGRRLHKLGVSKVTQVDFLPREVVSYSKETQTPLATHQSEEDEEDEEMVESKVGQDSELENQDKKQEVKEAPPRELTEEEKQQILHSEEFLIFFDRTIRVIERALAEDSDIFFDYSGRELEEKDGDVQAGANLSFNRQFYDEHWSKHRVVTCMDWSLQYPELMVASYNNNEDAPHEPDGVALVWNMKFKKTTPEYVFHCQSSVMSVCFARFHPNLVVGGTYSGQIVLWDNRSHRRTPVQRTPLSAAAHTHPVYCVNVVGTQNAHNLITVSTDGKMCSWSLDMLSTPQESMELVYNKSKPVAVTGMAFPTGDVNNFVVGSEEGTVYTACRHGSKAGIGEVFEGHQGPVTGINCHMAVGPIDFSHLFVTSSFDWTVKLWTTKHNKPLYSFEDNADYVYDVMWSPVHPALFACVDGMGRLDLWNLNNDTEVPTASVAIEGASALNRVRWAQAGKEVAVGDSEGRIWVYDVGELAVPHNDEWTRFARTLVEIRANRADSEEEGTVELSA

SEQ ID NO: 19122 - protein, 608 aa, Homo sapiens
MSDKSDLKAELERKKQRLAQIREEKKRKEEERKKKEADMQQKKEPVQDDSDLDRKRRETEALLQSIGISPEPPLVPTPMSPSSKSVSTPSEAGSQDSGDLGPLTRRRLHKLGVSKVTQVDFLPREVVSYSKETQTPLATHQSEEDEEDEEMVESKVGQDSELENQDKKQEVKEAPPRELTEEEKQQILHSEEFLIFFDRTIRVIERALAEDSDIFFDYSGRELEEKDGDVQAGANLSFNRQFYDEHWSKHRVVTCMDWSLQYPELMVASYNNNEDAPHEPDGVALVWNMKFKKTTPEYVFHCQSSVMSVCFARFHPNLVVGGTYSGQIVLWDNRSHRRTPVQRTPLSAAAHTHPVYCVNVVGTQNAHNLITVSTDGKMCSWSLDMLSTPQESMELVYNKSKPVAVTGMAFPTGDVNNFVVGSEEGTVYTACRHGSKAGIGEVFEGHQGPVTGINCHMAVGPIDFSHLFVTSSFDWTVKLWTTKHNKPLYSFEDNADYVYDVMWSPVHPALFACVDGMGRLDLWNLNNDTEVPTASVAIEGASALNRVRWAQAGKEVAVGDSEGRIWVYDVGELAVPHNDEWTRFARTLVEIRANRADSEEEGTVELSA

SEQ ID NO: 19123 - protein, 602 aa, Homo sapiens
MSDKSDLKAELERKKQRLAQIREEKKRKEEERKKKEADMQQKKEPVQDDSDLDRKRRETEALLQSIGISPEPPLVPTPMSPSSKSVSTPSEAGSQDSGDLGPLTRRRLHKLGVSKVTQVDFLPREVVSYSKETQTPLATHQSEEDEEDEEMVESKVGQDSELENQDKKQEVKEAPPRELTEEEKQQILHSEEFLIFFDRTIRVIERALAEDSDIFFDYSGRELEEKDGDVQAGANLSFNRQFYDEHWSKHRVVTCMDWSLQYPELMVASYNNNEDAPHEPDGVALVWNMKFKKTTPEYVFHCQSSVMSVCFARFHPNLVVGGTYSGQIVLWDNRSHRRTPVQRTPLSAAAHTHPVYCVNVVGTQNAHNLITVSTDGKMCSWSLDMLSTPQESMELVYNKSKPVAVTGMAFPTGDVNNFVVGSEEGTVYTACRHGSKAGIGEVFEGHQGPVTGINCHMAVGPIDFSHLFVTSSFDWTVKLWTTKHNKPLYSFEDNADYVYDVMWSPVHPALFACVDGMGRLDLWNLNNDTEVPTASVAIEGASALNRVRWAQAGKEVAVGDSEGRIWVYDVGEGLAMLPGWSQNSWTQAILLCWPPKVLGLQT

SEQ ID NO: 19124 - protein, 625 aa, Homo sapiens
MSDKSDLKAELERKKQRLAQIREEKKRKEEERKKKEADMQQKKEPVQDDSDLDRKRRETEALLQSIGISPEPPLVQPLHFLTWDTCYFHYLVPTPMSPSSKSVSTPSEAGSQDSGDLGPLTRRRLHKLGVSKVTQVDFLPREVVSYSKETQTPLATHQSEEDEEDEEMVESKVGQDSELENQDKKQEVKEAPPRELTEEEKQQILHSEEFLIFFDRTIRVIERALAEDSDIFFDYSGRELEEKDGDVQAGANLSFNRQFYDEHWSKHRVVTCMDWSLQYPELMVASYNNNEDAPHEPDGVALVWNMKFKKTTPEYVFHCQSSVMSVCFARFHPNLVVGGTYSGQIVLWDNRSHRRTPVQRTPLSAAAHTHPVYCVNVVGTQNAHNLITVSTDGKMCSWSLDMLSTPQESMELVYNKSKPVAVTGMAFPTGDVNNFVVGSEEGTVYTACRHGSKAGIGEVFEGHQGPVTGINCHMAVGPIDFSHLFVTSSFDWTVKLWTTKHNKPLYSFEDNADYVYDVMWSPVHPALFACVDGMGRLDLWNLNNDTEVPTASVAIEGASALNRVRWAQAGKEVAVGDSEGRIWVYDVGELAVPHNDEWTRFARTLVEIRANRADSEEEGTVELSA

SEQ ID NO: 19125 - protein, 141 aa, Homo sapiens
MARPLCTLLLLMATLAGALASSSKEENRIIPGGIYDADLNDEWVQRALHFAISEYNKATEDEYYRRPLQVLRAREQTFGGVNYFFDVEVGRTICTKSQPNLDTCAFHEQPELQKKQLCSFEIYEVPWEDRMSLVNSRCQEA

SEQ ID NO: 19126 - protein, 317 aa, Homo sapiens
MTMETQMSQNVCPRNLWLLQPLTVLLLLASADSQAAAPPKAVLKLEPPWINVLQEDSVTLTCQGARSPESDSIQWFHNGNLIPTHTQPSYRFKANNNDSGEYTCQTGQTSLSDPVHLTVLSEWLVLQTPHLEFQEGETIMLRCHSWKDKPLVKVTFFQNGKSQKFSHLDPTFSIPQANHSHSGDYHCTGNIGYTLFSSKPVTITVQVPSMGSSSPMGIIVAVVIATAVAAIVAAVVALIYCRKKRISANSTDPVKAAQFEPPGRQMIAIRKRQLEETNNDYETADGGYMTLNPRAPTDDDKNIYLTLPPNDHVNSNN

SEQ ID NO: 19127 - protein, 316 aa, Homo sapiens
MTMETQMSQNVCPRNLWLLQPLTVLLLLASADSQAAPPKAVLKLEPPWINVLQEDSVTLTCQGARSPESDSIQWFHNGNLIPTHTQPSYRFKANNNDSGEYTCQTGQTSLSDPVHLTVLSEWLVLQTPHLEFQEGETIMLRCHSWKDKPLVKVTFFQNGKSQKFSHLDPTFSIPQANHSHSGDYHCTGNIGYTLFSSKPVTITVQVPSMGSSSPMGIIVAVVIATAVAAIVAAVVALIYCRKKRISANSTDPVKAAQFEPPGRQMIAIRKRQLEETNNDYETADGGYMTLNPRAPTDDDKNIYLTLPPNDHVNSNN

SEQ ID NO: 19128 - protein, 395 aa, Homo sapiens
MESKRPRLLEEADKQKKTVRVGLNAPSMLRKNQLGFLRFANYCRIARELRVSCMQRKKVQIHSWDPSSLASDRFNRILANTNTDQLFTVNQVEAGGSKYGIITMRGLTTPELRVYPHKTLYVPNRKVNSMCWASLNHLDSHLLLCFVGLADTPSCAVLLPASLFIGSFPGMRRPGMLCSFQIPDAWSCAWSLSIHAYHSFSTGLSQQVLLTNVVTGHQQSFGTSSDVLAQQFAIMTPLLFNGCRSGEIFGIDLRCGNQGSGWKAICLSHDSAVTSLQILQDGQFLVSSDMTGTIKLWDLRATKCVTQYEGHVNNSAYLPVHVNEEEGVVAAVGQDCYTRIWSLRHGHLLTTIPSPYPASENDIPSVAFSSRLGGFRGAPGLLMAVREDLYCFSYG

SEQ ID NO: 19129 - protein, 430 aa, Homo sapiens
MWRLVPPKLGRLSRSLKLAALGSLLVLMVLHSPSLLASWQRNELTDRRFLQLNKCPACFGTSWCRRFLNGQVVFEAWGRLRLLDFLNVKNVYFAQYGEPREGGRRRVVLKRLGSQRELAQLDQSICKRATGRPRCDLLQAMPRTEFARLNGDVRLLTPEAVEGWSDLVHCPSQRLLDRLVRRYAETKDSGSFLLRNLKDSERMQLLLTLAFNPEPLVLQSFPSDEGWPFAKYLGACGRMVAVNYVGEELWSYFNAPWEKRVDLAWQLMEIAEQLTNNDFEFALYLLDVSFDNFAVGPRDGKVIIVDAENVLVADKRLIRQNKPENWDVWYESKFDDCDKEACLSFSKEILCARATVDHNYYAVCQNLLSRHATWRGTSGGLLHDPPSEIAKDGRLEALLDECANPKKRYGRFQAAKELREYLAQLSNNVR

SEQ ID NO: 19130 - protein, 221 aa, Homo sapiens
MKSENGTVVGSFPSDEGWPFAKYLGACGRMVAVNYVGEELWSYFNAPWEKRVDLAWQLMEIAEQLTNNDFEFALYLLDVSFDNFAVGPRDGKVIIVDAENVLVADKRLIRQNKPENWDVWYESKFDDCDKEACLSFSKEILCARATVDHNYYAVCQNLLSRHATWRGTSGGLLHDPPSEIAKDGRLEALLDECANPKKRYGRFQAAKELREYLAQLSNNVR

SEQ ID NO: 19131 - protein, 270 aa, Homo sapiens
MATGTRYAGKVVVVTGGGRGIGAGIVRAFVNSGARVVICDKDESGGRALEQELPGAVFILCDVTQEDDVKTLVSETIRRFGRLDCVVNNAGHHPPPQRPEETSAQGFRQLLELNLLGTYTLTKLALPYLRKSQGNVINISSLVGAIGQAQAVPYVATKGAVTAMTKALALDESPYGVRVNCISPGNIWTPLWEELAALMPDPRATIREGMLAQPLGRMGQPAEVGAAAVFLASEANFCTGIELLVTGGAELGYGCKASRSTPVDAPDIPS

SEQ ID NO: 19132 - protein, 387 aa, Homo sapiens
MSTFFSDTAWICLAVPTVLCGTVFCKYKKSSGQLWSWMVCLAGLCAVCLLILSPFWGLILFSVSCFLMYTYLSGQELLPVDQKAVLVTGGDCGLGHALCKYLDELGFTVFAGVLNENGPGAEELRRTCSPRLSVLQMDITKPVQIKDAYSKVAAMLQDRGLWAVINNAGVLGFPTDGELLLMTDYKQCMAVNFFGTVEVTKTFLPLLRKSKGRLVNVSSMGGGAPMERLASYGSSKAAVTMFSSVMRLELSKWGIKVASIQPGGFLTNIAGTSDKWEKLEKDILDHLPAEVQEDYGQDYILAQRNFLLLINSLASKDFSPVLRDIQHAILAKSPFAYYTPGKGAYLWICLAHYLPIGIYDYFAKRHFGQDKPMPRALRMPNYKKKAT

SEQ ID NO: 19133 - protein, 464 aa, Homo sapiens
MILANVFCLFFFLDETLRSLASPSSLQGPELHGWRPPVDCVRANELCAAESNCSSRYRTLRQCLAGRDRNTMLANKECQAALEVLQESPLYDCRCKRGMKKELQCLQIYWSIHLGLTEGEEFYEASPYEPVTSRLSDIFRLASIFSGTGADPVVSAKSNHCLDAAKACNLNDNCKKLRSSYISICNREISPTERCNRRKCHKALRQFFDRVPSEYTYRMLFCSCQDQACAERRRQTILPSCSYEDKEKPNCLDLRGVCRTDHLCRSRLADFHANCRASYQTVTSCPADNYQACLGSYAGMIGFDMTPNYVDSSPTGIVVSPWCSCRGSGNMEEECEKFLRDFTENPCLRNAIQAFGNGTDVNVSPKGPSFQATQAPRVEKTPSLPDDLSDSTSLGTSVITTCTSVQEQGLKANNSKELSMCFTELTTNIIPGSNKVIKPNSGPSRARPSAALTVLSVLMLKLAL

SEQ ID NO: 19134 - protein, 331 aa, Homo sapiens
MILANVFCLFFFLGTGADPVVSAKSNHCLDAAKACNLNDNCKKLRSSYISICNREISPTERCNRRKCHKALRQFFDRVPSEYTYRMLFCSCQDQACAERRRQTILPSCSYEDKEKPNCLDLRGVCRTDHLCRSRLADFHANCRASYQTVTSCPADNYQACLGSYAGMIGFDMTPNYVDSSPTGIVVSPWCSCRGSGNMEEECEKFLRDFTENPCLRNAIQAFGNGTDVNVSPKGPSFQATQAPRVEKTPSLPDDLSDSTSLGTSVITTCTSVQEQGLKANNSKELSMCFTELTTNIIPGSNKVIKPNSGPSRARPSAALTVLSVLMLKLAL

SEQ ID NO: 19135 - protein, 359 aa, Homo sapiens
MILANVFCLFFFLGEEFYEASPYEPVTSRLSDIFRLASIFSGTGADPVVSAKSNHCLDAAKACNLNDNCKKLRSSYISICNREISPTERCNRRKCHKALRQFFDRVPSEYTYRMLFCSCQDQACAERRRQTILPSCSYEDKEKPNCLDLRGVCRTDHLCRSRLADFHANCRASYQTVTSCPADNYQACLGSYAGMIGFDMTPNYVDSSPTGIVVSPWCSCRGSGNMEEECEKFLRDFTENPCLRNAIQAFGNGTDVNVSPKGPSFQATQAPRVEKTPSLPDDLSDSTSLGTSVITTCTSVQEQGLKANNSKELSMCFTELTTNIIPGSNKVIKPNSGPSRARPSAALTVLSVLMLKLAL

SEQ ID NO: 19136 - protein, 149 aa, Homo sapiens
MGRICPVNSRARRLRARPGRPSGDSLPYHQLQGGAPRLWSPDPGRPAAYRRAHVCDVTAPRWGSTSRQGEGAVLQRMLGRRAPPSWSRDHAYSRRGWENAALFLNRKRKQEGTENTSICCRPESALACGGNLSPQFLKKVIQIQTQELW

SEQ ID NO: 19137 - protein, 347 aa, Homo sapiens
MHRRRLALGLGFCLLAGTSLSVLWVYLENWLPVSYVPYYLPCPEIFNMKLHYKREKPLQPVVWSQYPQPKLLEHRPTQLLTLTPWLAPIVSEGTFNPELLQHIYQPLNLTIGVTVFAVGKYTHFIQSFLESAEEFFMRGYRVHYYIFTDNPAAVPGVPLGPHRLLSSIPIQGHSHWEETSMRRMETISQHIAKRAHREVDYLFCLDVDMVFRNPWGPETLGDLVAAIHPSYYAVPRQQFPYERRRVSTAFVADSEGDFYYGGAVFGGQVARVYEFTRGCHMAILADKANGIMAAWREESHLNRHFISNKPSKVLSPEYLWDDRKPQPPSLKLIRFSTLDKDISCLRS

SEQ ID NO: 19138 - protein, 294 aa, Homo sapiens
MHRRRLALGLGFCLLAGTSLSVLWVYLENWLPVSYVPYYLPCPEIFNMKLHYKREKPLQPVVWSQYPQPKLLEHRPTQLLTLTPWLAPIVSEGTFNPELLQHIYQPLNLTIGVTVFAVGNPSWSQPRSSSCVGTGCTTTSSLTTLQPFPGSRWVPTGFSAPSPSRVTPTGRRHPCAGWRPSASTLLRGLTGRWTTSSALMWTWCFGTRGALRPWETWWLPFTQATTPFPASSSPMSAGVFPLPLWQTAKGTSIMVGQSSGGRWPGYMSLLGAATWPSWRTRPMASWLPGGRKAT

SEQ ID NO: 19139 - protein, 330 aa, Homo sapiens
MHRRRLALGLGFCLLAGTSLSVLWVYLENWLPVSYVPYYLPCPEILSQYPQPKLLEHRPTQLLTLTPWLAPIVSEGTFNPELLQHIYQPLNLTIGVTVFAVGKYTHFIQSFLESAEEFFMRGYRVHYYIFTDNPAAVPGVPLGPHRLLSSIPIQGHSHWEETSMRRMETISQHIAKRAHREVDYLFCLDVDMVFRNPWGPETLGDLVAAIHPSYYAVPRQQFPYERRRVSTAFVADSEGDFYYGGAVFGGQVARVYEFTRGCHMAILADKANGIMAAWREESHLNRHFISNKPSKVLSPEYLWDDRKPQPPSLKLIRFSTLDKDISCLRS

SEQ ID NO: 19140 - protein, 89 aa, Homo sapiens
MSDRKAVIKNADMSEDMQQDAVDCATQAMEKYNIEKDIAAYIKKEFDKKYNPTWHCIVGRNFGSYVTHETKHFIYFYLGQVAILLFKSG

SEQ ID NO: 19141 - protein, 298 aa, Homo sapiens
MSDANLDSSKKNFLEGEVDDEESVILTLVPVKDDANMEQMEPSVSSTSDVKLEKPKKYNPGHLLQTNEQFTAPQKARCKIPALPLPTILPPINKVCRDTLRDWCQQLGLSTNGKKIEVYLRLHRHAYPEQRQDMPEMSQETRLQRCSRKRKAVTKRARLQRSYEMNERAEETNTVEVITSAPGAMLASWARIAARAVQPKALNSCSIPVSVEAFLMQASGVRWCVVHGRLLSADTKGWVRLQFHAGQAWVPTTHRRMISLFLLPACIFPSPGIEDNMLCPDCAKRNKKMMKRLMTVEK

SEQ ID NO: 19142 - protein, 504 aa, Homo sapiens
MTEAALVEGQVKLRDGKKWKSRWLVLRKPSPVADCLLMLVYKDKSERIKGLRERSSLTLEDICGLEPGLPYEGLVHTLAIVCLSQAIMLGFDSHEAMCAWDARIRYALGEVHRFHVTVAPGTKLESGPATLHLCNDVLVLARDIPPAVTGQWKLSDLRRYGAVPSGFIFEGGTRCGYWAGVFFLSSAEGEQISFLFDCIVRGISPTKGPFGLRPVLPDPSPPGPSTVEERVAQEALETLQLEKRLSLLSHAGRPGSGGDDRSLSSSSSEASHLDVSASSRLTAWPEQSSSSASTSQEGPRPAAAQAAGEAMVGASRPPPKPLRPRQLQEVGRQSSSDSGIATGSHSSYSSSLSSYAGSSLDVWRATDELGSLLSLPAAGAPEPSLCTCLPGTVEYQVPTSLRAHYDTPRSLCLAPRDHSPPSQGSPGNSAARDSGGQTSAGCPSGWLGTRRRGLVMEAPQGSEATLPGPAPGEPWEAGGPHAGPPPAFFSACPVCGGLKVNPPP

SEQ ID NO: 19143 - protein, 366 aa, Homo sapiens
MMSSSWPGTSPRLSRGSGSCLTSGATGPCQADSSLKAGPGAGVFFLSSAEGEQISFLFDCIVRGISPTKGPFGLRPVLPDPSPPGPSTVEERVAQEALETLQLEKRLSLLSHAGRPGSGGDDRSLSSSSSEASHLDVSASSRLTAWPEQSSSSASTSQEGPRPAAAQAAGEAMVGASRPPPKPLRPRQLQEVGRQSSSDSGIATGSHSSYSSSLSSYAGSSLDVWRATDELGSLLSLPAAGAPEPSLCTCLPGTVEYQVPTSLRAHYDTPRSLCLAPRDHSPPSQGSPGNSAARDSGGQTSAGCPSGWLGTRRRGLVMEAPQGSEATLPGPAPGEPWEAGGPHAGPPPAFFSACPVCGGLKVNPPP

SEQ ID NO: 19144 - protein, 255 aa, Homo sapiens
MTEAALVEGQVKLRDGKKWKSRWLVLRKPSPVADCLLMLVYKDKSERIKGLRERSSLTLEDICGLEPGLPYEGLVHTLAIVCLSQAIMLGFDSHEAMCAWDARIRYALGEVHRFHVTVAPGTKLESGPATLHLCNDVLVLARDIPPAVTGQWKLSDLRRYGAVPSGFIFEGGTRGWRLLPVLGRGGADQLPVRLHRPRHLPHQGPLWAAAGSTRPKSPGTLDCGGACGPGSPGNPTAGEAAEPPLTCGQAGQWRG

SEQ ID NO: 19145 - protein, 608 aa, Homo sapiens
MTEAALVEGQVKLRDGKKWKSRWLVLRKPSPVADCLLMLVYKDKSERIKGLRERSSLTLEDICGLEPGLPYEGLVHTLAIVCLSQAIMLGFDSHEAMCAWDARIRYALGEVHRFHVTVAPGTKLESGPATLHLCNDVLVLARDIPPAVTGQWKLSDLRRYGAVPSGFIFEGGTRCGYWAGVFFLSSAEGEQISFLFDCIVRGISPTKGPFGLRPVLPDPSPPGPSTVEERVAQEALETLQLEKRLSLLSHAGRPGSGGDDRSLSSSSSEASHLDVSASSRLTAWPEQSSSSASTSQEGPRPAAAQAAGEAMVGASRPPPKPLRPRQLQEVGRQSSSDSGIATGSHSSYSSSLSSYAGSSLDVWRATDELGSLLSLPAAGAPEPSLCTCLPGTVEYQVPTSLRAHYDTPRSLCLAPRDHSPPSQGSPGNSAARDSGGQTSAGCPSGWLGTRRRGLVMEAPQGSEATLPGPAPGEPWEAGGPHAGPPPAFFSACPVCGGLKGAAASAPGPATAHSGSPGPVAVDSPGPERPRGESPTYVNIPVSPSSRKQLHYMGLELQEASEGVRGAGASLYAQIDIMATETAHRVGVRHARAREEQLSELEQRKAAPQ

SEQ ID NO: 19146 - protein, 221 aa, Homo sapiens
MASRPLPPGRQEEENAKDSGRKPSPVRPRGCLPSIDEARPAGPGPAPASRRGSMLGLAASFSRRNSLVGPGAGPGGQRPSLGPVPPLGSRVSFSGLPLAPARWVAPSYRTEPVPGERWEAARAQRALEAALAAGLHDACYSSDEAARLVRELCEQVHVRLRELSPPRYKLVCSVVLGPRAGQGVHVVSRALWDVARDGLASVSYTNTSLFAVATVHGLYCE

SEQ ID NO: 19147 - protein, 304 aa, Homo sapiens
MLRGSASSTSMEKAKGKEWTSTEKSREEDQQASNQPNSIALPGTSAKRTKEKMSIKGSKVLCPKKKAEHTDNPRPQKKIPIPPLPSKLPPVNLIHRDILRAWCQQLKLSSKGQKLDAYKRLCAFAYPNQKDFPSTAKEAKIRKSLQKKLKVEKGETSLQSSETHPPEVALPPVGEPPALENSTALLEGVNTVVVTTSAPEALLASWARISARARTPEAVESPQEASGVRWCVVHGKSLPADTDGWVHLQFHAGQAWVPEKQEGRVSALFLLPASNFPPPHLEDNMLCPKCVHRNKVLIKSLQWE

SEQ ID NO: 19148 - protein, 763 aa, Homo sapiens
MHTGGETSACKPSSVRLAPSFSFHAAGLQMAGQMPHSHQYSDRRQPNISDQQVSALSYSDQIQQPLTNQVMPDIVMLQRRMPQTFRDPATAPLRKLSVDLIKTYKHINEVYYAKKKRRHQQGQGDDSSHKKERKVYNDGYDDDNYDYIVKNGEKWMDRYEIDSLIGKGSFGQVVKAYDRVEQEWVAIKIIKNKKAFLNQAQIEVRLLELMNKHDTEMKYYIVHLKRHFMFRNHLCLVFEMLSYNLYDLLRNTNFRGVSLNLTRKFAQQMCTALLFLATPELSIIHCDLKPENILLCNPKRSAIKIVDFGSSCQLGQRIYQYIQSRFYRSPEVLLGMPYDLAIDMWSLGCILVEMHTGEPLFSGANEVDQMNKIVEVLGIPPAHILDQAPKARKFFEKLPDGTWNLKKTKDGKREYKPPGTRKLHNILGVETGGPGGRRAGESGHTVADYLKFKDLILRMLDYDPKTRIQPYYALQHSFFKKTADEGTNTSNSVSTSPAMEQSQSSGTTSSTSSSSGGSSGTSNSGRARSDPTHQHRHSGGHFTAAVQAMDCETHSPQVRQQFPAPLGWSGTEAPTQVTVETHPVQETTFHVAPQQNALHHHHGNSSHHHHHHHHHHHHHGQQALGNRTRPRVYNSPTNSSSTQDSMEVGHSHHSMTSLSSSTTSSSTSSSSTGNQGNQAYQNRPVAANTLDFGQNGAMDVNLTVYSNPRQETGIAGHPTYQFSANTGPAHYMTEGHLTMRQGADREESPMTGVCVQQSPVASS

SEQ ID NO: 19149 - protein, 754 aa, Homo sapiens
MHTGGETSACKPSSVRLAPSFSFHAAGLQMAGQMPHSHQYSDRRQPNISDQQVSALSYSDQIQQPLTNQRRMPQTFRDPATAPLRKLSVDLIKTYKHINEVYYAKKKRRHQQGQGDDSSHKKERKVYNDGYDDDNYDYIVKNGEKWMDRYEIDSLIGKGSFGQVVKAYDRVEQEWVAIKIIKNKKAFLNQAQIEVRLLELMNKHDTEMKYYIVHLKRHFMFRNHLCLVFEMLSYNLYDLLRNTNFRGVSLNLTRKFAQQMCTALLFLATPELSIIHCDLKPENILLCNPKRSAIKIVDFGSSCQLGQRIYQYIQSRFYRSPEVLLGMPYDLAIDMWSLGCILVEMHTGEPLFSGANEVDQMNKIVEVLGIPPAHILDQAPKARKFFEKLPDGTWNLKKTKDGKREYKPPGTRKLHNILGVETGGPGGRRAGESGHTVADYLKFKDLILRMLDYDPKTRIQPYYALQHSFFKKTADEGTNTSNSVSTSPAMEQSQSSGTTSSTSSSSGGSSGTSNSGRARSDPTHQHRHSGGHFTAAVQAMDCETHSPQVRQQFPAPLGWSGTEAPTQVTVETHPVQETTFHVAPQQNALHHHHGNSSHHHHHHHHHHHHHGQQALGNRTRPRVYNSPTNSSSTQDSMEVGHSHHSMTSLSSSTTSSSTSSSSTGNQGNQAYQNRPVAANTLDFGQNGAMDVNLTVYSNPRQETGIAGHPTYQFSANTGPAHYMTEGHLTMRQGADREESPMTGVCVQQSPVASS

SEQ ID NO: 19150 - protein, 529 aa, Homo sapiens
MHTGGETSACKPSSVRLAPSFSFHAAGLQMAGQMPHSHQYSDRRQPNISDQQVSALSYSDQIQQPLTNQVMPDIVMLQRRMPQTFRDPATAPLRKLSVDLIKTYKHINEVYYAKKKRRHQQGQGDDSSHKKERKVYNDGYDDDNYDYIVKNGEKWMDRYEIDSLIGKGSFGQVVKAYDRVEQEWVAIKIIKNKKAFLNQAQIEVRLLELMNKHDTEMKYYIVHLKRHFMFRNHLCLVFEMLSYNLYDLLRNTNFRGVSLNLTRKFAQQMCTALLFLATPELSIIHCDLKPENILLCNPKRSAIKIVDFGSSCQLGQRIYQYIQSRFYRSPEVLLGMPYDLAIDMWSLGCILVEMHTGEPLFSGANEVDQMNKIVEVLGIPPAHILDQAPKARKFFEKLPDGTWNLKKTKDGKREYKPPGTRKLHNILGVETGGPGGRRAGESGHTVADYLKFKDLILRMLDYDPKTRIQPYYALQHSFFKKTADEGTNTSNSVSTSPAMEQSQSSGTTSSTSSSSGASAISCSSWLVRH

SEQ ID NO: 19151 - protein, 525 aa, Homo sapiens
MHTGGETSACKPSSVRLAPSFSFHAAGLQMAGQMPHSHQYSDRRQPNISDQQVSALSYSDQIQQPLTNQVMPDIVMLQRRMPQTFRDPATAPLRKLSVDLIKTYKHINEVYYAKKKRRHQQGQGDDSSHKKERKVYNDGYDDDNYDYIVKNGEKWMDRYEIDSLIGKGSFGQVVKAYDRVEQEWVAIKIIKNKKAFLNQAQIEVRLLELMNKHDTEMKYYIVHLKRHFMFRNHLCLVFEMLSYNLYDLLRNTNFRGVSLNLTRKFAQQMCTALLFLATPELSIIHCDLKPENILLCNPKRSAIKIVDFGSSCQLGQRIYQYIQSRFYRSPEVLLGMPYDLAIDMWSLGCILVEMHTGEPLFSGANEVDQMNKIVEVLGIPPAHILDQAPKARKFFEKLPDGTWNLKKTKDGKREYKPPGTRKLHNILGVETGGPGGRRAGESGHTVADYLKFKDLILRMLDYDPKTRIQPYYALQHSFFKKTADEGTNTSNSVSTSPAMEQSQSSGTTSSTSSSSGGAALDARCL

SEQ ID NO: 19152 - protein, 584 aa, Homo sapiens
MHTGGETSACKPSSVRLAPSFSFHAAGLQMAGQMPHSHQYSDRRQPNISDQQVSALSYSDQIQQPLTNQVMPDIVMLQRRMPQTFRDPATAPLRKLSVDLIKTYKHINEVYYAKKKRRHQQGQGDDSSHKKERKVYNDGYDDDNYDYIVKNGEKWMDRYEIDSLIGKGSFGQVVKAYDRVEQEWVAIKIIKNKKAFLNQAQIEVRLLELMNKHDTEMKYYIVHLKRHFMFRNHLCLVFEMLSYNLYDLLRNTNFRGVSLNLTRKFAQQMCTALLFLATPELSIIHCDLKPENILLCNPKRSAIKIVDFGSSCQLGQRIYQYIQSRFYRSPEVLLGMPYDLAIDMWSLGCILVEMHTGEPLFSGANEVDQMNKIVEVLGIPPAHILDQAPKARKFFEKLPDGTWNLKKTKDGKREYKPPGTRKLHNILGVETGGPGGRRAGESGHTVADYLKFKDLILRMLDYDPKTRIQPYYALQHSFFKKTADEGTNTSNSVSTSPAMEQSQSSGTTSSTSSSSGGSSGTSNSGRARSDPTHQHRHSGGHFTAAVQAMDCETHSPQVSSHVVHLLVSPAILRWSSTGCQVPLE

SEQ ID NO: 19153 - protein, 424 aa, Homo sapiens
MALPTPSDSTLPAEARGRGRRRRLVWTPSQSEALRACFERNPYPGIATRERLAQAIGIPEPRVQIWFQNERSRQLRQHRRESRPWPGRRGPPEGRRKRTAVTGSQTALLLRAFEKDRFPGIAAREELARETGLPESRIQIWFQNRRARHPGQGGRAPAQAGGLCSAAPGGGHPAPSWVAFAHTGAWGTGLPAPHVPCAPGALPQGAFVSQAARAAPALQPSQAAPAEGVSQPAPARGDFAYAAPAPPDGALSHPQAPRWPPHPGKSREDRDPQRDGLPGPCAVAQPGPAQAGPQGQGVLAPPTSQGSPWWGWGRGPQVAGAAWEPQAGAAPPPQPAPPDASASARQGQMQGIPAPSQALQEPAPWSALPCGLLLDELLASPEFLQQAQPLLETEAPGELEASEEAASLEAPLSEEEYRALLEEL

SEQ ID NO: 19154 - protein, 238 aa, Homo sapiens
MAADGQCSLPASWRPVTLTHVEYPAGDLSGHLLAYLSLSPVFVIVGFVTLIIFKRELHTISFLGGLALNEGVNWLIKNVIQEPRPCGGPHTAVGTKYGMPSSHSQFMWFFSVYSFLFLYLRMHQTNNARFLDLLWRHVLSLGLLAVAFLVSYSRVYLLYHTWSQVLYGGIAGGLMAIAWFIFTQEVLTPLFPRIAAWPVSEFFLIRDTSLIPNVLWFEYTVTRAEARNRQRKLGTKLQ

SEQ ID NO: 19155 - protein, 195 aa, Homo sapiens
MAADGQCSLPASWRPVTLTHVEYPAGDLSGHLLAYLSLSPVFVIVGFVTLIIFKRELHTISFLGGLALNEGVNWLIKNVIQEPRPCGGPHTAVGTKYGMPSSHSQFMWFFSVYSFLFLYLRMHQTNNARFLDLLWRHVLSLGLLAVAFLVSYSRPVSEFFLIRDTSLIPNVLWFEYTVTRAEARNRQRKLGTKLQ

SEQ ID NO: 19156 - protein, 187 aa, Homo sapiens
MFLLLNCIVAVSQNMGIGKNGDLPRPPLRNEFRYFQRMTTTSSVEGKQNLVIMGRKTWFSIPEKNRPLKDRINLVLSRELKEPPQGAHFLARSLDDALKLTERPELANKVDMIWIVGGSSVYKEAMNHLGHLKLFVTRIMQDFESDTFFSEIDLEKYKLLPEYPGVLSDVQEGKHIKYKFEVCEKDD

SEQ ID NO: 19157 - protein, 415 aa, Homo sapiens
MASRWWRWRRGCSWKPAARSPGPGSPGRAGPLGPSAAAEVRAQVHRRKGLDLSQIPYINLVKHLTSACPNVCRISRFHHTTPDSKTHSGEKYTDPFKLGWRDLKGLYEDIRKELLISTSELKEMSEYYFDGKGKAFRPIIVALMARACNIHHNNSRHVQASQRAIALIAEMIHTASLVHDDVIDDASSRRGKHTVNKIWGEKKAVLAGDLILSAASIALARIGNTTVISILTQVIEDLVRGEFLQLGSKENENERFAHYLEKTFKKTASLIANSCKAVSVLGCPDPVVHEIAYQYGKNVGIAFQLIDDVLDFTSCSDQMGKPTSADLKLGLATGPVLFACQQFPEMNAMIMRRFSLPGDVDRARQYVLQSDGVQQTTYLAQQYCHEAIREISKLRPSPERDALIQLSEIVLTRDK

SEQ ID NO: 19158 - protein, 306 aa, Homo sapiens
MASRWWRWRRGCSWKPAARSPGPGSPGRAGPLGPSAAAEVRAQVHRRKGLDLSQIPYINLVKHLTSACPNVCRISRFHHTTPDSKTHSGEKYTDPFKLGWRDLKGLYEDIRKELLISTSELKEMSEYYFDGKGKAFRPIIVALMARACNIHHNNSRHVQASQRAIALIAEMIHTASLVHDDVIDDASSRRGKHTVNKIWGEKKAVLAGDLILSAASIALARIGNTTVISILTQVIEDLVRGEFLQLGSKENENERFAHYLEKTFKKTASLIANSCKAVFPRNECYDHATVQFAWRCRQSSTVCTTE

SEQ ID NO: 19159 - protein, 376 aa, Homo sapiens
MPAQVHRRKGLDLSQIPYINLVKHLTSACPNVCRISRFHHTTPDSKTHSGEKYTDPFKLGWRDLKGLYEDIRKELLISTSELKEMSEYYFDGKGKAFRPIIVALMARACNIHHNNSRHVQASQRAIALIAEMIHTASLVHDDVIDDASSRRGKHTVNKIWGEKKAVLAGDLILSAASIALARIGNTTVISILTQVIEDLVRGEFLQLGSKENENERFAHYLEKTFKKTASLIANSCKAVSVLGCPDPVVHEIAYQYGKNVGIAFQLIDDVLDFTSCSDQMGKPTSADLKLGLATGPVLFACQQFPEMNAMIMRRFSLPGDVDRARQYVLQSDGVQQTTYLAQQYCHEAIREISKLRPSPERDALIQLSEIVLTRDK

SEQ ID NO: 19160 - protein, 912 aa, Homo sapiens; identical to SEQ ID NO: 284

SEQ ID NO: 19161 - protein, 723 aa, Homo sapiens
MGILERVVRRNGRVDRSLKDECDTAEKKAKVIAGMNAVEENQGPGESQKVEEASPPAVQQPTDPASPTVATTPEPVGSDAGDKNATKAGDDEPEYEDGRGFGIGELVWGKLRGFSWWPGRIVSWWMTGRSRAAEGTRWVMWFGDGKFSVVCVEKLMPLSSFCSAFHQATYNKQPMYRKAIYEVLQVASSRAGKLFPVCHDSDESDTAKAVEVQNKPMIEWALGGFQPSGPKGLEPPEEEKNPYKEVYTDMWVEPEAAAYAPPPPAKKPRKSTAEKPKVKEIIDERTRERLVYEVRQKCRNIEDICISCGSLNVTLEHPLFVGGMCQNCKNCFLECAYQYDDDGYQSYCTICCGGREVLMCGNNNCCRCFCVECVDLLVGPGAAQAAIKEDPWNCYMCGHKGTYGLLRRREDWPSRLQMFFANNHDQEFDPPKVYPPVPAEKRKPIRVLSLFDGIATGLLVLKDLGIQVDRYIASEVCEDSITVGMVRHQGKIMYVGDVRSVTQKHIQEWGPFDLVIGGSPCNDLSIVNPARKGLYEGTGRLFFEFYRLLHDARPKEGDDRPFFWLFENVVAMGVSDKRDISRFLESNPVMIDAKEVSAAHRARYFWGNLPGMNRPLASTVNDKLELQECLEHGRIAKFSKVRTITTRSNSIKQGKDQHFPVFMNEKEDILWCTEMERVFGFPVHYTDVSNMSRLARQRLLGRSWSVPVIRHLFAPLKEYFACV

SEQ ID NO: 19162 - protein, 166 aa, Homo sapiens
MPAMPSSGPGDTSSSAAEREEDRKDGEEQEEPRGKEERQEPSTTARKVGRPGRKRKHPPVESGDTPKDPAVISKSPSMAQDSGASELLPNGDLEKRSEPQPEEGSPAGGQKGGAPAEGEGAAETLPEASRAVENGCCTPKEGRGAPAEAGESSAPGAASSGPTSIP

SEQ ID NO: 19163 - protein, 853 aa, Homo sapiens; identical to SEQ ID NO: 285

SEQ ID NO: 19164 - protein, 833 aa, Homo sapiens
MKGDTRHLNGEEDAGGREDSILVNGACSDQSSDSPPILEAIRTPEIRGRRSSSRLSKREVSSLLSYTQDLTGDGDGEDGDGSDTPVMPKLFRETRTRSESPAVRTRNNNSVSSRERHRPSPRSTRGRQGRNHVDESPVEFPATRSLRRRATASAGTPWPSPPSSYLTIDLTDDTEDTHGTPQSSSTPYARLAQDSQQGGMESPQVEADSGDGDSSEYQDGKEFGIGDLVWGKIKGFSWWPAMVVSWKATSKRQAMSGMRWVQWFGDGKFSEVSADKLVALGLFSQHFNLATFNKLVSYRKAMYHALEKARVRAGKTFPSSPGDSLEDQLKPMLEWAHGGFKPTGIEGLKPNNTQPENKTRRRTADDSATSDYCPAPKRLKTNCYNNGKDRGDEDQSREQMASDVANNKSSLEDGCLSCGRKNPVSFHPLFEGGLCQTCRDRFLELFYMYDDDGYQSYCTVCCEGRELLLCSNTSCCRCFCVECLEVLVGTGTAAEAKLQEPWSCYMCLPQRCHGVLRRRKDWNVRLQAFFTSDTGLEYEAPKLYPAIPAARRRPIRVLSLFDGIATGYLVLKELGIKVGKYVASEVCEESIAVGTVKHEGNIKYVNDVRNITKKNIEEWGPFDLVIGGSPCNDLSNVNPARKGLYEGTGRLFFEFYHLLNYSRPKEGDDRPFFWMFENVVAMKVGDKRDISRFLECNPVMIDAIKVSAAHRARYFWGNLPGMNRPVIASKNDKLELQDCLEYNRIAKLKKVQTITTKSNSIKQGKNQLFPVVMNGKEDVLWCTELERIFGFPVHYTDVSNMGRGARQKLLGRSWSVPVIRHLFAPLKDYFACE

SEQ ID NO: 19165 - protein, 770 aa, Homo sapiens
MKGDTRHLNGEEDAGGREDSILVNGACSDQSSDSPPILEAIRTPEIRGRRSSSRLSKREVSSLLSYTQDLTGDGDGEDGDGSDTPVMPKLFRETRTRSESPAVRTRNNNSVSSRERHRPSPRSTRGRQGRNHVDESPVEFPATRSLRRRATASAGTPWPSPPSSYLTIDLTDDTEDTHGTPQSSSTPYARLAQDSQQGGMESPQVEADSGDGDSSEYQDGKEFGIGDLVWGKIKGFSWWPAMVVSWKATSKRQAMSGMRWVQWFGDGKFSEVSADKLVALGLFSQHFNLATFNKLVSYRKAMYHALEKARVRAGKTFPSSPGDSLEDQLKPMLEWAHGGFKPTGIEGLKPNNTQPENKTRRRTADDSATSDYCPAPKRLKTNCYNNGKDRGDEDQSREQMASDVANNKSSLEDGCLSCGRKNPVSFHPLFEGGLCQTCRDRFLELFYMYDDDGYQSYCTVCCEGRELLLCSNTSCCRCFCVECLEVLVGTGTAAEAKLQEPWSCYMCLPQRCHGVLRRRKDWNVRLQAFFTSDTGLEYEAPKLYPAIPAARRRPIRVLSLFDGIATGYLVLKELGIKVGKYVASEVCEESIAVGTVKHEGNIKYVNDVRNITKKNIEEWGPFDLVIGGSPCNDLSNVNPARKGLYEGTGRLFFEFYHLLNYSRPKEGDDRPFFWMFENVVAMKVGDKRDISRFLECNPVMIDAIKVSAAHRARYFWGNLPGMNRIFGFPVHYTDVSNMGRGARQKLLGRSWSVPVIRHLFAPLKDYFACE

SEQ ID NO: 19166 - protein, 724 aa, Homo sapiens
MKGDTRHLNGEEDAGGREDSILVNGACSDQSSDSPPILEAIRTPEIRGRRSSSRLSKREVSSLLSYTQDLTGDGDGEDGDGSDTPVMPKLFRETRTRSESPAVRTRNNNSVSSRERHRPSPRSTRGRQGRNHVDESPVEFPATRSLRRRATASAGTPWPSPPSSYLTIDLTDDTEDTHGTPQSSSTPYARLAQDSQQGGMESPQVEADSGDGDSSEYQDGKEFGIGDLVWGKIKGFSWWPAMVVSWKATSKRQAMSGMRWVQWFGDGKFSEVSADKLVALGLFSQHFNLATFNKLVSYRKAMYHALEKARVRAGKTFPSSPGDSLEDQLKPMLEWAHGGFKPTGIEGLKPNNTQPENKTRRRTADDSATSDYCPAPKRLKTNCYNNGKDRGDEDQSREQMASDVANNKSSLEDGCLSCGRKNPVSFHPLFEGGLCQTCRDRFLELFYMYDDDGYQSYCTVCCEGRELLLCSNTSCCRCFCVECLEVLVGTGTAAEAKLQEPWSCYMCLPQRCHGVLRRRKDWNVRLQAFFTSDTGLEYEAPKLYPAIPAARRRPIRVLSLFDGIATGYLVLKELGIKVGKYVASEVCEESIAVGTVKHEGNIKYVNDVRNITKKNIEEWGPFDLVIGGSPCNDLSNVNPARKGLYEGTGRLFFEFYHLLNYSRPKEGDDRPFFWMFENVVAMKVGDKRDISRFLECNPVMIDAIKVSAAHRARYFWGNLPGMNS

SEQ ID NO: 19167 - protein, 792 aa, Homo sapiens
MKGDTRHLNGEEDAGGREDSILVNGACSDQSSDSPPILEAIRTPEIRGRRSSSRLSKREVSSLLSYTQDLTGDGDGEDGDGSDTPVMPKLFRETRTRSESPAVRTRNNNSVSSRERHRPSPRSTRGRQGRNHVDESPVEFPATRSLRRRATASAGTPWPSPPSSYLTIDLTDDTEDTHGTPQSSSTPYARLAQDSQQGGMESPQVEADSGDGDSSEYQDGKEFGIGDLVWGKIKGFSWWPAMVVSWKATSKRQAMSGMRWVQWFGDGKFSEVSADKLVALGLFSQHFNLATFNKLVSYRKAMYHALEKARVRAGKTFPSSPGDSLEDQLKPMLEWAHGGFKPTGIEGLKPNNTQPENKTRRRTADDSATSDYCPAPKRLKTNCYNNGKDRGDEDQSREQMASDVANNKSSLEDGCLSCGRKNPVSFHPLFEGGLCQTCRDRFLELFYMYDDDGYQSYCTVCCEGRELLLCSNTSCCRCFCVECLEVLVGTGTAAEAKLQEPWSCYMCLPQRCHGVLRRRKDWNVRLQAFFTSDTGLEYEAPKLYPAIPAARRRPIRVLSLFDGIATGYLVLKELGIKVGKYVASEVCEESIAVGTVKHEGNIKYVNDVRNITKKNIEEWGPFDLVIGGSPCNDLSNVNPARKGLYEGTGRLFFEFYHLLNYSRPKEGDDRPFFWMFENVVAMKVGDKRDISRFLECNPVMIDAIKVSAAHRARYFWGNLPGMNRPVIASKNDKLELQDCLEYNRIAKDLWLSCALHRRVQHGPWCPPEAAGKVLERACHPTPLRPSEGLLCM

SEQ ID NO: 19168 - protein, 845 aa, Homo sapiens
MEPSPEPPSLESMKGDTRHLNGEEDAGGREDSILVNGACSDQSSDSPPILEAIRTPEIRGRRSSSRLSKREVSSLLSYTQDLTGDGDGEDGDGSDTPVMPKLFRETRTRSESPAVRTRNNNSVSSRERHRPSPRSTRGRQGRNHVDESPVEFPATRSLRRRATASAGTPWPSPPSSYLTIDLTDDTEDTHGTPQSSSTPYARLAQDSQQGGMESPQVEADSGDGDSSEYQDGKEFGIGDLVWGKIKGFSWWPAMVVSWKATSKRQAMSGMRWVQWFGDGKFSEVSADKLVALGLFSQHFNLATFNKLVSYRKAMYHALEKARVRAGKTFPSSPGDSLEDQLKPMLEWAHGGFKPTGIEGLKPNNTQPENKTRRRTADDSATSDYCPAPKRLKTNCYNNGKDRGDEDQSREQMASDVANNKSSLEDGCLSCGRKNPVSFHPLFEGGLCQTCRDRFLELFYMYDDDGYQSYCTVCCEGRELLLCSNTSCCRCFCVECLEVLVGTGTAAEAKLQEPWSCYMCLPQRCHGVLRRRKDWNVRLQAFFTSDTGLEYEAPKLYPAIPAARRRPIRVLSLFDGIATGYLVLKELGIKVGKYVASEVCEESIAVGTVKHEGNIKYVNDVRNITKKNIEEWGPFDLVIGGSPCNDLSNVNPARKGLYEGTGRLFFEFYHLLNYSRPKEGDDRPFFWMFENVVAMKVGDKRDISRFLECNPVMIDAIKVSAAHRARYFWGNLPGMNRPVIASKNDKLELQDCLEYNRIAKLKKVQTITTKSNSIKQGKNQLFPVVMNGKEDVLWCTELERIFGFPVHYTDVSNMGRGARQKLLGRSWSVPVIRHLFAPLKDYFACE

SEQ ID NO: 19169 - protein, 694 aa, Homo sapiens
MKGDTRHLNGEEDAGGREDSILVNGACSDQSSDSPPILEAIRTPEIRGRRSSSRLSKREVSSLLSYTQSLRRRATASAGTPWPSPPSSYLTIDLTDDTEDTHGTPQSSSTPYARLAQDSQQGGMESPQVEADSGDGDSSEYQDGKEFGIGDLVWGKIKGFSWWPAMVVSWKATSKRQAMSGMRWVQWFGDGKFSEVSADKLVALGLFSQHFNLATFNKLVSYRKAMYHALEKARVRAGKTFPSSPGDSLEDQLKPMLEWAHGGFKPTGIEGLKPNNTQPENKTRRRTADDSATSDYCPAPKRLKTNCYNNGKDRGDEDQSREQMASDVANNKSSLEDGCLSCGRKNPVSFHPLFEGGLCQTCRDRFLELFYMYDDDGYQSYCTVCCEGRELLLCSNTSCCRCFCVECLEVLVGTGTAAEAKLQEPWSCYMCLPQRCHGVLRRRKDWNVRLQAFFTSDTGLEYEAPKLYPAIPAARRRPIRVLSLFDGIATGYLVLKELGIKVGKYVASEVCEESIAVGTVKHEGNIKYVNDVRNITKKNIEEWGPFDLVIGGSPCNDLSNVNPARKGLYEGTGRLFFEFYHLLNYSRPKEGDDRPFFWMFENVVAMKVGDKRDISRFLECNPVMIDAIKVSAAHRARYFWGNLPGMNRIFGFPVHYTDVSNMGRGARQKLLGRSWSVPVIRHLFAPLKDYFACE

SEQ ID NO: 19170 - protein, 728 aa, Homo sapiens
MKGDTRHLNGEEDAGGREDSILVNGACSDQSSDSPPILEAIRTPEIRGRRSSSRLSKREVSSLLSYTQDLTGDGDGEDGDGSDTPVMPKLFRETRTRSESPASLRRRATASAGTPWPSPPSSYLTIDLTDDTEDTHGTPQSSSTPYARLAQDSQQGGMESPQVEADSGDGDSSEYQDGKEFGIGDLVWGKIKGFSWWPAMVVSWKATSKRQAMSGMRWVQWFGDGKFSEVSADKLVALGLFSQHFNLATFNKLVSYRKAMYHALEKARVRAGKTFPSSPGDSLEDQLKPMLEWAHGGFKPTGIEGLKPNNTQPENKTRRRTADDSATSDYCPAPKRLKTNCYNNGKDRGDEDQSREQMASDVANNKSSLEDGCLSCGRKNPVSFHPLFEGGLCQTCRDRFLELFYMYDDDGYQSYCTVCCEGRELLLCSNTSCCRCFCVECLEVLVGTGTAAEAKLQEPWSCYMCLPQRCHGVLRRRKDWNVRLQAFFTSDTGLEYEAPKLYPAIPAARRRPIRVLSLFDGIATGYLVLKELGIKVGKYVASEVCEESIAVGTVKHEGNIKYVNDVRNITKKNIEEWGPFDLVIGGSPCNDLSNVNPARKGLYEGTGRLFFEFYHLLNYSRPKEGDDRPFFWMFENVVAMKVGDKRDISRFLECNPVMIDAIKVSAAHRARYFWGNLPGMNRIFGFPVHYTDVSNMGRGARQKLLGRSWSVPVIRHLFAPLKDYFACE

SEQ ID NO: 19171 - protein, 469 aa, Homo sapiens
MFSEQAAQRAHTLLSPPSANNATFARVPVATYTNSSQPFRLGERSFSRQYAHIYATRLIQMRPFLENRAQQHWGSGVGVKKLCELQPEEKCCVVGTLFKAMPLQPSILREVSEEHNLLPQPPRSKYIHPDDELVLEDELQRIKLKGTIDVSKLVTGTVLAVFGSVRDDGKFLVEDYCFADLAPQKPAPPLDTDRFVLLVSGLGLGGGGGESLLGTQLLVDVVTGQLGDEGEQCSAAHVSRVILAGNLLSHSTQSRDSINKAKYLTKKTQAASVEAVKMLDEILLQLSASVPVDVMPGEFDPTNYTLPQQPLHPCMFPLATAYSTLQLVTNPYQATIDGVRFLGTSGQNVSDIFRYSSMEDHLEILEWTLRVRHISPTAPDTLGCYPFYKTDPFIFPECPHVYFCGNTPSFGSKIIRGPEDQTVLLVTVPDFSATQTACLVNLRSLACQPISFSGFGAEDDDLGGLGLGP

SEQ ID NO: 19172 - protein, 236 aa, Homo sapiens
MSKLPADSSVPQTGAANGDRDVPQAEVGRGRREPAPAQPEEAGEGAMAAARGGPVPAAREGRMAAARAAPAAAARGAPVAAAALARAAAAGRESPAAAAAREARMAEVARLLGEPVDEEGPEGRPRSRHGNGGLAALPYLRLRHPLSVLGINYQQFLRHYLENYPIAPGRIQELEERRRRFVEACRAREAAFDAEYQRNPHRVDLDILTFTIALTASEVINPLIEELGCDKFINRE

SEQ ID NO: 19173 - protein, 187 aa, Homo sapiens
MSKLPADSSVPQTGAANGDRDVPQAEVGRGRREPAPAQPEEARESPAAAAAREARMAEVARLLGEPVDEEGPEGRPRSRHGNGGLAALPYLRLRHPLSVLGINYQQFLRHYLENYPIAPGRIQELEERRRRFVEACRAREAAFDAEYQRNPHRVDLDILTFTIALTASEVINPLIEELGCDKFINRE

SEQ ID NO: 19174 - protein, 817 aa, Homo sapiens
MYGVCGCCGALRPRYKRLVDNIFPEDPEDGLVKTNMEKLTFYALSAPEKLDRIGAYLSERLIRDVGRHRYGYVCIAMEALDQLLMACHCQSINLFVESFLKMVAKLLESEKPNLQILGTNSFVKFANIEEDTPSYHRSYDFFVSRFSEMCHSSHDDLEIKTKIRMSGIKGLQGVVRKTVNDELQANIWDPQHMDKIVPSLLFNLQHVEEAESRSPSPLQAPEKEKESPAELAERCLRELLGRAAFGNIKNAIKPVLIHLDNHSLWEPKVFAIRCFKIIMYSIQPQHSHLVIQQLLGHLDANSRSAATVRAGIVEVLSEAAVIAATGSVGPTVLEMFNTLLRQLRLSIDYALTGSYDGAVSLGTKIIKEHEERMFQEAVIKTVGSFASTLPTYQRSEVILFIMSKVPRPSLHQAVDTGRTGENRNRLTQIMLLKSLLQVSTGFQCNNMMSALPSNFLDRLLSTALMEDAEIRLFVLEILISFIDRHGNRHKFSTISTLSDISVLKLKVDKCSRQDTVFMKKHSQQLYRHIYLSCKEETNVQKHYEALYGLLALISIELANEEVVVDLIRLVLAVQDVAQVNEENLPVYNRCALYALGAAYLNLISQLTTVPAFCQHIHEVIETRKKEAPYMLPEDVFVERPRLSQNLDGVVIELLFRQSKISEVLGGSGYNSDRLCLPYIPQLTDEDRLSKRRSIGETISLQVEVESRNSPEKEERVPAEEITYETLKKAIVDSVAVEEQERERRRQVVEKFQKAPFEEIAAHCGARASLLQSKLNQIFEITIRPPPSPSGTITAAYGQPQNHSIPVYEMKFPDLCVY

SEQ ID NO: 19175 - protein, 669 aa, Homo sapiens
MCHSSHDDLEIKTKIRMSGIKGLQGVVRKTVNDELQANIWDPQHMDKIVPSLLFNLQHVEEAESRSPSPLQAPEKEKESPAELAERCLRELLGRAAFGNIKNAIKPVLIHLDNHSLWEPKVFAIRCFKIIMYSIQPQHSHLVIQQLLGHLDANSRSAATVRAGIVEVLSEAAVIAATGSVGPTVLEMFNTLLRQLRLSIDYALTGSYDGAVSLGTKIIKEHEERMFQEAVIKTVGSFASTLPTYQRSEVILFIMSKVPRPSLHQAVDTGRTGENRNRLTQIMLLKSLLQVSTGFQCNNMMSALPSNFLDRLLSTALMEDAEIRLFVLEILISFIDRHGNRHKFSTISTLSDISVLKLKVDKCSRQDTVFMKKHSQQLYRHIYLSCKEETNVQKHYEALYGLLALISIELANEEVVVDLIRLVLAVQDVAQVNEENLPVYNRCALYALGAAYLNLISQLTTVPAFCQHIHEVIETRKKEAPYMLPEDVFVERPRLSQNLDGVVIELLFRQSKISEVLGGSGYNSDRLCLPYIPQLTDEDRLSKRRSIGETISLQVEVESRNSPEKEERVPAEEITYETLKKAIVDSVAVEEQERERRRQVVEKFQKAPFEEIAAHCGARASLLQSKLNQIFEITIRPPPSPSGTITAAYGQPQNHSIPVYEMKFPDLCVY

SEQ ID NO: 19176 - protein, 728 aa, Homo sapiens
MYGVCGCCGALRPRYKRLVDNIFPEDPEDGLVKTNMEKLTFYALSAPEKLDRIGAYLSERLIRDVGRHRYGYVCIAMEALDQLLMACHCQSINLFVESFLKMVAKLLESEKPNLQILGTNSFVKFANIEEDTPSYHRSYDFFVSRFSEMCHSSHDDLEIKTKIRMSGIKGLQGVVRKTVNDELQANIWDPQHMDKIVPSLLFNLQHVEEAESRSPSPLQAPEKEKESPAELAERCLRELLGRAAFGNIKNAIKPVLIHLDNHSLWEPKVFAIRCFKIIMYSIQPQHSHLVIQQLLGHLDANSRSAATVRAGIVEVLSEAAVIAATGSVGPTVLEMFNTLLRQLRLSIDYALTGSYDGAVSLGTKIIKEHEERMFQEAVIKTVGSFASTLPTYQRSEVILFIMSKVPRPSLHQAVDTGRTGENRNRLTQIMLLKSLLQVSTGFQCNNMMSALPSNFLDRLLSTALMEDAEIRLFVLEILISFIDRHGNRHKFSTISTLSDISVLKLKVDKCSRQDTVFMKKHSQQLYRHIYLSCKEETNVQKHYEALYGLLALISIELANEEVVVDLIRLVLAVQDVAQVNEENLPVYNRCALYALGAAYLNLISQLTTVPAFCQHIHEVIETRKKEAPYMLPEDVFVERPRLSQNLDGVVIELLFRQSKISEVLGGSGYNSDRLCLPYIPQLTDEDRLSKRRSIGETISLQVEVESRNSPEKEEVSVRATVLGQPHLL

SEQ ID NO: 19177 - protein, 2069 aa, Homo sapiens
MSQPPLLPASAETRKFTRALSKPGTAAELRQSVSEVVRGSVLLAKPKLIEPLDYENVIVQKKTQILNDCLREMLLFPYDDFQTAILRRQGRYICSTVPAKAEEEAQSLFVTECIKTYNSDWHLVNYKYEDYSGEFRQLPNKVVKLDKLPVHVYEVDEEVDKDEDAASLGSQKGGITKHGWLYKGNMNSAISVTMRSFKRRFFHLIQLGDGSYNLNFYKDEKISKEPKGSIFLDSCMGVVQNNKVRRFAFELKMQDKSSYLLAADSEVEMEEWITILNKILQLNFEAAMQEKRNGDSHEDDEQSKLEGSGSGLDSYLPELAKSAREAEIKLKSESRVKLFYLDPDAQKLDFSSAEPEVKSFEEKFGKRILVKCNDLSFNLQCCVAENEEGPTTNVEPFFVTLSLFDIKYNRKISADFHVDLNHFSVRQMLATTSPALMNGSGQSPSVLKGILHEAAMQYPKQGIFSVTCPHPDIFLVARIEKVLQGSITHCAEPYMKSSDSSKVAQKVLKNAKQACQRLGQYRMPFAWAARTLFKDASGNLDKNARFSAIYRQDSNKLSNDDMLKLLADFRKPEKMAKLPVILGNLDITIDNVSSDFPNYVNSSYIPTKQFETCSKTPITFEVEEFVPCIPKHTQPYTIYTNHLYVYPKYLKYDSQKSFAKARNIAICIEFKDSDEEDSQPLKCIYGRPGGPVFTRSAFAAVLHHHQNPEFYDEIKIELPTQLHEKHHLLLTFFHVSCDNSSKGSTKKRDVVETQVGYSWLPLLKDGRVVTSEQHIPVSANLPSGYLGYQELGMGRHYGPEIKWVDGGKPLLKISTHLVSTVYTQDQHLHNFFQYCQKTESGAQALGNELVKYLKSLHAMEGHVMIAFLPTILNQLFRVLTRATQEEVAVNVTRVIIHVVAQCHEEGLESHLRSYVKYAYKAEPYVASEYKTVHEELTKSMTTILKPSADFLTSNKLLKYSWFFFDVLIKSMAQHLIENSKVKLLRNQRFPASYHHAVETVVNMLMPHITQKFRDNPEASKNANHSLAVFIKRCFTFMDRGFVFKQINNYISCFAPGDPKTLFEYKFEFLRVVCNHEHYIPLNLPMPFGKGRIQRYQDLQLDYSLTDEFCRNHFLVGLLLREVGTALQEFREVRLIAISVLKNLLIKHSFDDRYASRSHQARIATLYLPLFGLLIENVQRINVRDVSPFPVNAGMTVKDESLALPAVNPLVTPQKGSTLDNSLHKDLLGAISGIASPYTTSTPNINSVRNADSRGSLISTDSGNSLPERNSEKSNSLDKHQQSSTLGNSVVRCDKLDQSEIKSLLMCFLYILKSMSDDALFTYWNKASTSELMDFFTISEVCLHQFQYMGKRYIARTGMMHARLQQLGSLDNSLTFNHSYGHSDADVLHQSLLEANIATEVCLTALDTLSLFTLAFKNQLLADHGHNPLMKKVFDVYLCFLQKHQSETALKNVFTALRSLIYKFPSTFYEGRADMCAALCYEILKCCNSKLSSIRTEASQLLYFLMRNNFDYTGKKSFVRTHLQVIISVSQLIADVVGIGGTRFQQSLSIINNCANSDRLIKHTSFSSDVKDLTKRIRTVLMATAQMKEHENDPEMLVDLQYSLAKSYASTPELRKTWLDSMARIHVKNGDLSEAAMCYVHVTALVAEYLTRKEAVQWEPPLLPHSHSACLRRSRGGVFRQGCTAFRVITPNIDEEASMMEDVGMQDVHFNEDVLMELLEQCADGLWKAERYELIADIYKLIIPIYEKRRDFERLAHLYDTLHRAYSKVTEVMHSGRRLLGTYFRVAFFGQAAQYQFTDSETDVEGFFEDEDGKEYIYKEPKLTPLSEISQRLLKLYSDKFGSENVKMIQDSGKVNPKDLDSKYAYIQVTHVIPFFDEKELQERKTEFERSHNIRRFMFEMPFTQTGKRQGGVEEQCKRRTILTAIHCFPYVKKRIPVMYQHHTDLNPIEVAIDEMSKKVAELRQLCSSAEVDMIKLQLKLQGSVSVQVNAGPLAYARAFLDDTNTKRYPDNKVKLLKEVFRQFVEACGQALAVNERLIKEDQLEYQEEMKANYREMAKELSEIMHEQLG

SEQ ID NO: 19178 - protein, 2068 aa, Homo sapiens
MQADKCRTSSRSVKKELVIESPLQYKDAAQGEVEAESPGPVPAKPKLIEPLDYENVIVQKKTQILNDCLREMLLFPYDDFQTAILRRQGRYICSTVPAKAEEEAQSLFVTECIKTYNSDWHLVNYKYEDYSGEFRQLPNKVVKLDKLPVHVYEVDEEVDKDEDAASLGSQKGGITKHGWLYKGNMNSAISVTMRSFKRRFFHLIQLGDGSYNLNFYKDEKISKEPKGSIFLDSCMGVVQNNKVRRFAFELKMQDKSSYLLAADSEVEMEEWITILNKILQLNFEAAMQEKRNGDSHEDDEQSKLEGSGSGLDSYLPELAKSAREAEIKLKSESRVKLFYLDPDAQKLDFSSAEPEVKSFEEKFGKRILVKCNDLSFNLQCCVAENEEGPTTNVEPFFVTLSLFDIKYNRKISADFHVDLNHFSVRQMLATTSPALMNGSGQSPSVLKGILHEAAMQYPKQGIFSVTCPHPDIFLVARIEKVLQGSITHCAEPYMKSSDSSKVAQKVLKNAKQACQRLGQYRMPFAWAARTLFKDASGNLDKNARFSAIYRQDSNKLSNDDMLKLLADFRKPEKMAKLPVILGNLDITIDNVSSDFPNYVNSSYIPTKQFETCSKTPITFEVEEFVPCIPKHTQPYTIYTNHLYVYPKYLKYDSQKSFAKARNIAICIEFKDSDEEDSQPLKCIYGRPGGPVFTRSAFAAVLHHHQNPEFYDEIKIELPTQLHEKHHLLLTFFHVSCDNSSKGSTKKRDVVETQVGYSWLPLLKDGRVVTSEQHIPVSANLPSGYLGYQELGMGRHYGPEIKWVDGGKPLLKISTHLVSTVYTQDQHLHNFFQYCQKTESGAQALGNELVKYLKSLHAMEGHVMIAFLPTILNQLFRVLTRATQEEVAVNVTRVIIHVVAQCHEEGLESHLRSYVKYAYKAEPYVASEYKTVHEELTKSMTTILKPSADFLTSNKLLKYSWFFFDVLIKSMAQHLIENSKVKLLRNQRFPASYHHAVETVVNMLMPHITQKFRDNPEASKNANHSLAVFIKRCFTFMDRGFVFKQINNYISCFAPGDPKTLFEYKFEFLRVVCNHEHYIPLNLPMPFGKGRIQRYQDLQLDYSLTDEFCRNHFLVGLLLREVGTALQEFREVRLIAISVLKNLLIKHSFDDRYASRSHQARIATLYLPLFGLLIENVQRINVRDVSPFPVNAGMTVKDESLALPAVNPLVTPQKGSTLDNSLHKDLLGAISGIASPYTTSTPNINSVRNADSRGSLISTDSGNSLPERNSEKSNSLDKHQQSSTLGNSVVRCDKLDQSEIKSLLMCFLYILKSMSDDALFTYWNKASTSELMDFFTISEVCLHQFQYMGKRYIARTGMMHARLQQLGSLDNSLTFNHSYGHSDADVLHQSLLEANIATEVCLTALDTLSLFTLAFKNQLLADHGHNPLMKKVFDVYLCFLQKHQSETALKNVFTALRSLIYKFPSTFYEGRADMCAALCYEILKCCNSKLSSIRTEASQLLYFLMRNNFDYTGKKSFVRTHLQVIISVSQLIADVVGIGGTRFQQSLSIINNCANSDRLIKHTSFSSDVKDLTKRIRTVLMATAQMKEHENDPEMLVDLQYSLAKSYASTPELRKTWLDSMARIHVKNGDLSEAAMCYVHVTALVAEYLTRKEAVQWEPPLLPHSHSACLRRSRGGVFRQGCTAFRVITPNIDEEASMMEDVGMQDVHFNEDVLMELLEQCADGLWKAERYELIADIYKLIIPIYEKRRDFERLAHLYDTLHRAYSKVTEVMHSGRRLLGTYFRVAFFGQAAQYQFTDSETDVEGFFEDEDGKEYIYKEPKLTPLSEISQRLLKLYSDKFGSENVKMIQDSGKVNPKDLDSKYAYIQVTHVIPFFDEKELQERKTEFERSHNIRRFMFEMPFTQTGKRQGGVEEQCKRRTILTAIHCFPYVKKRIPVMYQHHTDLNPIEVAIDEMSKKVAELRQLCSSAEVDMIKLQLKLQGSVSVQVNAGPLAYARAFLDDTNTKRYPDNKVKLLKEVFRQFVEACGQALAVNERLIKEDQLEYQEEMKANYREMAKELSEIMHEQLG

SEQ ID NO: 19179 - protein, 2061 aa, Homo sapiens
MSQPPLLPASAETRKFTRALSKPGTAAELRQSVSEVVRGSVLLAKPKLIEPLDYENVIVQKKTQILNDCLREMLLFPYDDFQTAILRRQGRYICSTVPAKAEEEAQSLFVTECIKTYNSDWHLVNYKYEDYSGEFRQLPNKVVKLDKLPVHVYEVDEEVDKDEDAASLGSQKGGITKHGWLYKGNMNSAISVTMRSFKRRFFHLIQLGDGSYNLNFYKDEKISKEPKGSIFLDSCMGVVQNNKVRRFAFELKMQDKSSYLLAADSEVEMEEWITILNKILQLNFEAAMQEKRNGDSHEDDEQSKLEGSGSGLDSYLPELAKSAREAEIKLKSESRVKLFYLDPDAQKLDFSSAEPEVKSFEEKFGKRILVKCNDLSFNLQCCVAENEEGPTTNVEPFFVTLSLFDIKYNRKISADFHVDLNHFSVRQMLATTSPALMNGSGQSPSVLKGILHEAAMQYPKQGIFSVTCPHPDIFLVARIEKVLQGSITHCAEPYMKSSDSSKVAQKVLKNAKQACQRLGQYRMPFAWAARTLFKDASGNLDKNARFSAIYRQDSNKLSNDDMLKLLADFRKPEKMAKLPVILGNLDITIDNVSSDFPNYVNSSYIPTKQFETCSKTPITFEVEEFVPCIPKHTQPYTIYTNHLYVYPKYLKYDSQKSFAKARNIAICIEFKDSDEEDSQPLKCIYGRPGGPVFTRSAFAAVLHHHQNPEFYDEIKIELPTQLHEKHHLLLTFFHVSCDNSSKGSTKKRDVVETQVGYSWLPLLKDGRVVTSEQHIPVSANLPSGYLGYQELGMGRHYGPEIKWVDGGKPLLKISTHLVSTVYTQDQHLHNFFQYCQKTESGAQALGNELVKYLKSLHAMEGHVMIAFLPTILNQLFRVLTRATQEEVAVNVTRVIIHVVAQCHEEGLESHLRSYVKYAYKAEPYVASEYKTVHEELTKSMTTILKPSADFLTSNKLLKYSWFFFDVLIKSMAQHLIENSKVKLLRNQRFPASYHHAVETVVNMLMPHITQKFRDNPEASKNANHSLAVFIKRCFTFMDRGFVFKQINNYISCFAPGDPKTLFEYKFEFLRVVCNHEHYIPLNLPMPFGKGRIQRYQDLQLDYSLTDEFCRNHFLVGLLLREVGTALQEFREVRLIAISVLKNLLIKHSFDDRYASRSHQARIATLYLPLFGLLIENVQRINVRDVSPFPVNAGMTVKDESLALPAVNPLVTPQKGSTLDNSLHKDLLGAISGIASPYTTSTPNINSVRNADSRGSLISTDSGNSLPERNSEKSNSLDKHQQSSTLGNSVVRCDKLDQSEIKSLLMCFLYILKSMSDDALFTYWNKASTSELMDFFTISEVCLHQFQYMGKRYIASVRKISSVLGISVDNGYGHSDADVLHQSLLEANIATEVCLTALDTLSLFTLAFKNQLLADHGHNPLMKKVFDVYLCFLQKHQSETALKNVFTALRSLIYKFPSTFYEGRADMCAALCYEILKCCNSKLSSIRTEASQLLYFLMRNNFDYTGKKSFVRTHLQVIISVSQLIADVVGIGGTRFQQSLSIINNCANSDRLIKHTSFSSDVKDLTKRIRTVLMATAQMKEHENDPEMLVDLQYSLAKSYASTPELRKTWLDSMARIHVKNGDLSEAAMCYVHVTALVAEYLTRKEAVQWEPPLLPHSHSACLRRSRGGVFRQGCTAFRVITPNIDEEASMMEDVGMQDVHFNEDVLMELLEQCADGLWKAERYELIADIYKLIIPIYEKRRDFERLAHLYDTLHRAYSKVTEVMHSGRRLLGTYFRVAFFGQAAQYQFTDSETDVEGFFEDEDGKEYIYKEPKLTPLSEISQRLLKLYSDKFGSENVKMIQDSGKVNPKDLDSKYAYIQVTHVIPFFDEKELQERKTEFERSHNIRRFMFEMPFTQTGKRQGGVEEQCKRRTILTAIHCFPYVKKRIPVMYQHHTDLNPIEVAIDEMSKKVAELRQLCSSAEVDMIKLQLKLQGSVSVQVNAGPLAYARAFLDDTNTKRYPDNKVKLLKEVFRQFVEACGQALAVNERLIKEDQLEYQEEMKANYREMAKELSEIMHEQLG

SEQ ID NO: 19180 - protein, 2093 aa, Homo sapiens
MSQPPLLPASAETRKFTRALSKPGTAAELRQSVSEVVRGSVLLAKPKLIEPLDYENVIVQKKTQILNDCLREMLLFPYDDFQTAILRRQGRYICSTVPAKAEEEAQSLFVTECIKTYNSDWHLVNYKYEDYSGEFRQLPNKVVKLDKLPVHVYEVDEEVDKDEDAASLGSQKGGITKHGWLYKGNMNSAISVTMRSFKRRFFHLIQLGDGSYNLNFYKDEKISKEPKGSIFLDSCMGVVQNNKVRRFAFELKMQDKSSYLLAADSEVEMEEWITILNKILQLNFEAAMQEKRNGDSHEDDEQSKLEGSGSGLDSYLPELAKSAREAEIKLKSESRVKLFYLDPDAQKLDFSSAEPEVKSFEEKFGKRILVKCNDLSFNLQCCVAENEEGPTTNVEPFFVTLSLFDIKYNRKISADFHVDLNHFSVRQMLATTSPALMNGSGQSPSVLKGILHEAAMQYPKQGIFSVTCPHPDIFLVARIEKVLQGSITHCAEPYMKSSDSSKVAQKVLKNAKQACQRLGQYRMPFAWAARTLFKDASGNLDKNARFSAIYRQDSNKLSNDDMLKLLADFRKPEKMAKLPVILGNLDITIDNVSSDFPNYVNSSYIPTKQFETCSKTPITFEVEEFVPCIPKHTQPYTIYTNHLYVYPKYLKYDSQKSFAKARNIAICIEFKDSDEEDSQPLKCIYGRPGGPVFTRSAFAAVLHHHQNPEFYDEIKIELPTQLHEKHHLLLTFFHVSCDNSSKGSTKKRDVVETQVGYSWLPLLKDGRVVTSEQHIPVSANLPSGYLGYQELGMGRHYGPEIKWVDGGKPLLKISTHLVSTVYTQDQHLHNFFQYCQKTESGAQALGNELVKYLKSLHAMEGHVMIAFLPTILNQLFRVLTRATQEEVAVNVTRVIIHVVAQCHEEGLESHLRSYVKYAYKAEPYVASEYKTVHEELTKSMTTILKPSADFLTSNKLLKYSWFFFDVLIKSMAQHLIENSKVKLLRNQRFPASYHHAVETVVNMLMPHITQKFRDNPEASKNANHSLAVFIKRCFTFMDRGFVFKQINNYISCFAPGDPKTLFEYKFEFLRVVCNHEHYIPLNLPMPFGKGRIQRYQDLQLDYSLTDEFCRNHFLVGLLLREVGTALQEFREVRLIAISVLKNLLIKHSFDDRYASRSHQARIATLYLPLFGLLIENVQRINVRDVSPFPVNAGMTVKDESLALPAVNPLVTPQKGSTLDNSLHKDLLGAISGIASPYTTSTPNINSVRNADSRGSLISTDSGNSLPERNSEKSNSLDKHQQSSTLGNSVVRCDKLDQSEIKSLLMCFLYILKSMSDDALFTYWNKASTSELMDFFTISEVCLHQFQYMGKRYIARTGMMHARLQQLGSLDNSLTFNHSYGHSDADVLHQSLLEANIATEVCLTALDTLSLFTLAFKNQLLADHGHNPLMKKVFDVYLCFLQKHQSETALKNVFTALRSLIYKFPSTFYEGRADMCAALCYEILKCCNSKLSSIRTEASQLLYFLMRNNFDYTGKKSFVRTHLQVIISVSQLIADVVGIGGTRFQQSLSIINNCANSDRLIKHTSFSSDVKDLTKRIRTVLMATAQMKEHENDPEMLVDLQYSLAKSYASTPELRKTWLDSMARIHVKNGDLSEAAMCYVHVTALVAEYLTRKEAVQWEPPLLPHSHSACLRRSRGGVFRQGCTAFRVITPNIDEEASMMEDVGMQDVHFNEDVLMELLEQCADGLWKAERYELIADIYKLIIPIYEKRRDFERLAHLYDTLHRAYSKVTEVMHSGRRLLGTYFRVAFFGQGFFEDEDGKEYIYKEPKLTPLSEISQRLLKLYSDKFGSENVKMIQDSGKVNPKDLDSKYAYIQVTHVIPFFDEKELQERKTEFERSHNIRRFMFEMPFTQTGKRQGGVEEQCKRRTILTAIHCFPYVKKRIPVMYQHHTDLNPIEVAIDEMSKKVAELRQLCSSAEVDMIKLQLKLQGSVSVQVNAGPLAYARAFLDDTNTKRYPDNKVKLLKEVFRQFVEACGQALAVNERLIKEDQLEYQEEMKANYREMAKELSEIMHEQICPLEEKTSVLPNSLHIFNAISGTPTSTMVHGMTSSSSVV

SEQ ID NO: 19181 - protein, 1253 aa, Homo sapiens
MQADKCRTSSRSVKKELVIESPLQYKDAAQGEVEAESPGPVPAKPKLIEPLDYENVIVQKKTQILNDCLREMLLFPYDDFQTAILRRQGRYICSTVPAKAEEEAQSLFVTECIKTYNSDWHLVNYKYEDYSGEFRQLPNKVVKLDKLPVHVYEVDEEVDKDEDAASLGSQKGGITKHGWLYKGNMNSAISVTMRSFKRRFFHLIQLGDGSYNLNFYKDEKISKEPKGSIFLDSCMGVVQNNKVRRFAFELKMQDKSSYLLAADSEVEMEEWITILNKILQLNFEAAMQEKRNGDSHEDDEQSKLEGSGSGLDSYLPELAKSAREAEIKLKSESRVKLFYLDPDAQKLDFSSAEPEVKSFEEKFGKRILVKCNDLSFNLQCCVAENEEGPTTNVEPFFVTLSLFDIKYNRKISADFHVDLNHFSVRQMLATTSPALMNGSGQSPSVLKGILHEAAMQYPKQGIFSVTCPHPDIFLVARIEKVLQGSITHCAEPYMKSSDSSKVAQKVLKNAKQACQRLGQYRMPFAWAARTLFKDASGNLDKNARFSAIYRQDSNKLSNDDMLKLLADFRKPEKMAKLPVILGNLDITIDNVSSDFPNYVNSSYIPTKQFETCSKTPITFEVEEFVPCIPKHTQPYTIYTNHLYVYPKYLKYDSQKSFAKARNIAICIEFKDSDEEDSQPLKCIYGRPGGPVFTRSAFAAVLHHHQNPEFYDEIKIELPTQLHEKHHLLLTFFHVSCDNSSKGSTKKRDVVETQVGYSWLPLLKDGRVVTSEQHIPVSANLPSGYLGYQELGMGRHYGPEIKWVDGGKPLLKISTHLVSTVYTQDQHLHNFFQYCQKTESGAQALGNELVKYLKSLHAMEGHVMIAFLPTILNQLFRVLTRATQEEVAVNVTRVIIHVVAQCHEEGLESHLRSYVKYAYKAEPYVASEYKTVHEELTKSMTTILKPSADFLTSNKLLKYSWFFFDVLIKSMAQHLIENSKVKLLRNQRFPASYHHAVETVVNMLMPHITQKFRDNPEASKNANHSLAVFIKRCFTFMDRGFVFKQINNYISCFAPGDPKTLFEYKFEFLRVVCNHEHYIPLNLPMPFGKGRIQRYQDLQLDYSLTDEFCRNHFLVGLLLREVGTALQEFREVRLIAISVLKNLLIKHSFDDRYASRSHQARIATLYLPLFGLLIENVQRINVRDVSPFPVNAGMTVKDESLALPAVNPLVTPQKGSTLDNSLHKDLLGAISGIGNAPCSCGLLSTITLKVSWSQ

SEQ ID NO: 19182 - protein, 640 aa, Homo sapiens
MAAGGTGGLREEQRYGLSCGRLGQDNITVLHVKLTETAIRALETYQSHKNLIPFRPSIQFQGLHGLVKIPKNDPLNEVHNFNFYLSNVGKDNPQGSFDCIQQTFSSSGASQLNCLGFIQDKITVCATNDSYQMTRERMTQAEEESRNRSTKVIKPGGPYVGKRVQIRKAPQAVSDTVPERKRSTPMNPANTIRKTHSSSTISQRPYRDRVIHLLALKAYKKPELLARLQKDGVNQKDKNSLGAILQQVANLNSKDLSYTLKDYVFKELQRDWPGYSEIDRRSLESVLSRKLNPSQNAAGTSRSESPVCSSRDAVSSPQKRLLDSEFIDPLMNKKARISHLTNRVPPTLNGHLNPTSEKSAAGLPLPPAAAAIPTPPPLPSTYLPISHPPQIVNSNSNSPSTPEGRGTQDLPVDSFSQNDSIYEDQQDKYTSRTSLETLPPGSVLLKCPKPMEENHSMSHKKSKKKSKKHKEKDQIKKHDIETIEEKEEDLKREEEIAKLNNSSPNSSGGVKEDCTASMEPSAIELPDYLIKYIAIVSYEQRQNYKDDFNAEYDEYRALHARMETVARRFIKLDAQRKRLSPGSKEYQNVHEEVLQEYQKIKQSSPNYHEEKYRCEYLHNKLAHIKRLIGEFDQQQAESWS

SEQ ID NO: 19183 - protein, 390 aa, Homo sapiens
MAAGGTGGLREEQRYGLSCGRLGQDNITVLHVKLTETAIRALETYQSHKNLIPFRPSIQFQGLHGLVKIPKNDPLNEVHNFNFYLSNVGKDNPQGSFDCIQQTFSSSGASQLNCLGFIQDKITVCATNDSYQMTRERMTQIVNSNSNSPSTPEGRGTQDLPVDSFSQNDSIYEDQQDKYTSRTSLETLPPGSVLLKCPKPMEENHSMSHKKSKKKSKKHKEKDQIKKHDIETIEEKEEDLKREEEIAKLNNSSPNSSGGVKEDCTASMEPSAIELPDYLIKYIAIVSYEQRQNYKDDFNAEYDEYRALHARMETVARRFIKLDAQRKRLSPGSKEYQNVHEEVLQEYQKIKQSSPNYHEEKYRCEYLHNKLAHIKRLIGEFDQQQAESWS

SEQ ID NO: 19184 - protein, 267 aa, Homo sapiens
MTLGRRLACLFLACVLPALLLGGTALASEIVGGRRARPHAWPFMVSLQLRGGHFCGATLIAPNFVMSAAHCVANVNVRAVRVVLGAHNLSRREPTRQVFAVQRIFENGYDPVNLLNDIVILQLNGSATINANVQVAQLPAQGRRLGNGVQCLAMGWGLLGRNRGIASVLQELNVTVVTSLCRRSNVCTLVRGRQAGVCFGDSGSPLVCNGLIHGIASFVRGGCASGLYPDAFAPVAQFVNWIDSIIQRSEDNPCPHPRDPDPASRTH

SEQ ID NO: 19185 - protein, 798 aa, Homo sapiens
MHGGRSCGPRTRREPSSGEEAAPVTAMAAESALQVVEKLQARLAANPDPKKLLKYLKKLSTLPITVDILAETGVGKTVNSLRKHEHVGSFARDLVAQWKKLVPVERNAEPDEQDFEKSNSRKRPRDALQKEEEMEGDYQETWKATGSRSYSPDHRQKKHRKLSELERPHKVSHGHERRDERKRCHRMSPTYSSDPESSDYGHVQSPPSCTSPHQMYVDHYRSLEEDQEPIVSHQKPGKGHSNAFQDRLGASQERHLGEPHGKGVVSQNKEHKSSHKDKRPVDAKSDEKASVVSREKSHKALSKEENRRPPSGDNAREKPPSSGVKKEKDREGSSLKKKCLPPSEAASDNHLKKPKHRDPEKAKLDKSKQGLDSFDTGKGAGDLLPKVKEKGSNNLKTPEGKVKTNLDRKSLGSLPKVEETDMEDEFEQPTMSFESYLSYDQPRKKKKKIVKTSATALGDKGLKKNDSKSTGKNLDSVQKLPKVNKTKSEKPAGADLAKLRKVPDVLPVLPDLPLPAIQANYRPLPSLELISSFQPKRKAFSSPQEEEEAGFTGRRMNSKMQVYSGSKCAYLPKMMTLHQQCIRVLKNNIDSIFEVGGVPYSVLEPVLERCTPDQLYRIEEYNHVLIEETDQLWKVHCHRDFKEERPEEYESWREMYLRLQDAREQRLRVLTKNIQFAHANKPKGRQAKMAFVNSVAKPPRDVRRRQEKFGTGGAAVPEKIKIKPAPYPMGSSHASASSISFNPSPEEPAYDGPSTSSAHLAPVVSSTVSYDPRKPTVKKIAPMMAKTIKAFKNRFSRR

SEQ ID NO: 19186 - protein, 913 aa, Homo sapiens
MSRFFTTGSDSESESSLSGEELVTKPVGGNYGKQPLLLSEDEEDTKRVVRSAKDKRFEELTNLIRTIRNAMKIRDVTKCLEEFELLGKAYGKAKSIVDKEGVPRFYIRILADLEDYLNELWEDKEGKKKMNKNNAKALSTLRQKIRKYNRDFESHITSYKQNPEQSADEDAEKNEEDSEGSSDEDEDEDGVSAATFLKKKSEAPSGESRKFLKKMDDEDEDSEDSEDDEDWDTGSTSSDSDSEEEEGKQTALASRFLKKAPTTDEDKKAAEKKREDKAKKKHDRKSKRLDEEEEDNEGGEWERVRGGVPLVKEKPKMFAKGTEITHAVVIKKLNEILQARGKKGTDRAAQIELLQLLVQIAAENNLGEGVIVKIKFNIIASLYDYNPNLATYMKPEMWGKCLDCINELMDILFANPNIFVGENILEESENLHNADQPLRVRGCILTLVERMDEEFTKIMQNTDPHSQEYVEHLKDEAQVCAIIERVQRYLEEKGTTEEVCRIYLLRILHTYYKFDYKAHQRQLTPPEGSSKSEQDQAENEGEDSAVLMERLCKYIYAKDRTDRIRTCAILCHIYHHALHSRWYQARDLMLMSHLQDNIQHADPPVQILYNRTMVQLGICAFRQGLTKDAHNALLDIQSSGRAKELLGQGLLLRSLQERNQEQEKVERRRQVPFHLHINLELLECVYLVSAMLLEIPYMAAHESDARRRMISKQFHHQLRVGERQPLLGPPESMREHVVAASKAMKMGDWKTCHSFIINEKMNGKVWDLFPEADKVRTMLVRKIQEESLRTYLFTYSSVYDSISMETLSDMFELDLPTVHSIISKMIINEELMASLDQPTQTVVMHRTEPTAQQNLALQLAEKLGSLVENNERVFDHKQGTYGGYFRDQKDGYRKNEGYMRRGGYRQQQSQTAY

SEQ ID NO: 19187 - protein, 903 aa, Homo sapiens
MSRFFTTGSDSESESSLSGEELVTKPVGGNYGKQPLLLSEDEEDTKRVVRSAKDKRFEELTNLIRTIRNAMKIRDVTKCLEEFELLGKAYGKAKSIVDKEGVPRFYIRILADLEDYLNEMNKNNAKALSTLRQKIRKYNRDFESHITSYKQNPEQSADEDAEKNEEDSEGSSDEDEDEDGVSAATFLKKKSEAPSGESRKFLKKMDDEDEDSEDSEDDEDWDTGSTSSDSDSEEEEGKQTALASRFLKKAPTTDEDKKAAEKKREDKAKKKHDRKSKRLDEEEEDNEGGEWERVRGGVPLVKEKPKMFAKGTEITHAVVIKKLNEILQARGKKGTDRAAQIELLQLLVQIAAENNLGEGVIVKIKFNIIASLYDYNPNLATYMKPEMWGKCLDCINELMDILFANPNIFVGENILEESENLHNADQPLRVRGCILTLVERMDEEFTKIMQNTDPHSQEYVEHLKDEAQVCAIIERVQRYLEEKGTTEEVCRIYLLRILHTYYKFDYKAHQRQLTPPEGSSKSEQDQAENEGEDSAVLMERLCKYIYAKDRTDRIRTCAILCHIYHHALHSRWYQARDLMLMSHLQDNIQHADPPVQILYNRTMVQLGICAFRQGLTKDAHNALLDIQSSGRAKELLGQGLLLRSLQERNQEQEKVERRRQVPFHLHINLELLECVYLVSAMLLEIPYMAAHESDARRRMISKQFHHQLRVGERQPLLGPPESMREHVVAASKAMKMGDWKTCHSFIINEKMNGKVWDLFPEADKVRTMLVRKIQEESLRTYLFTYSSVYDSISMETLSDMFELDLPTVHSIISKMIINEELMASLDQPTQTVVMHRTEPTAQQNLALQLAEKLGSLVENNERVFDHKQGTYGGYFRDQKDGYRKNEGYMRRGGYRQQQSQTAY

SEQ ID NO: 19188 - protein, 83 aa, Homo sapiens
MGRRKSKRKPPPKKKMTGTLETQFTCPFCNHEKSCDVKMDRARNTGVISCTVCLEEFQTPITYLSEPVDVYSDWIDACEAANQ

SEQ ID NO: 19189 - protein, 443 aa, Homo sapiens
MVRGRISRLSVRDVRFPTSLGGHGADAMHTDPDYSAAYVVIETDAEDGIKGCGITFTLGKGTEVVVCAVNALAHHVLNKDLKDIVGDFRGFYRQLTSDGQLRWIGPEKGVVHLATAAVLNAVWDLWAKQEGKPVWKLLVDMDPRMLVSCIDFRYITDVLTEEDALEILQKGQIGKKEREKQMLAQGYPAYTTSCAWLGYSDDTLKQLCAQALKDGWTRFKVKVGADLQDDMRRCQIIRDMIGPEKTLMMDANQRWDVPEAVEWMSKLAKFKPLWIEEPTSPDDILGHATISKALVPLGIGIATGEQCHNRVIFKQLLQAKALQFLQIDSCRLGSVNENLSVLLMAKKFEIPVCPHAGGVGLCELVQHLIIFDYISVSASLENRVCEYVDHLHEHFKYPVMIQRASYMPPKDPGYSTEMKEESVKKHQYPDGEVWKKLLPAQEN

SEQ ID NO: 19190 - protein, 361 aa, Homo sapiens
MQKMESRGVELPSLWEKALKLIGPEKGVVHLATAAVLNAVWDLWAKQEGKPVWKLLVDMDPRMLVSCIDFRYITDVLTEEDALEILQKGQIGKKEREKQMLAQGYPAYTTSCAWLGYSDDTLKQLCAQALKDGWTRFKVKVGADLQDDMRRCQIIRDMIGPEKTLMMDANQRWDVPEAVEWMSKLAKFKPLWIEEPTSPDDILGHATISKALVPLGIGIATGEQCHNRVIFKQLLQAKALQFLQIDSCRLGSVNENLSVLLMAKKFEIPVCPHAGGVGLCELVQHLIIFDYISVSASLENRVCEYVDHLHEHFKYPVMIQRASYMPPKDPGYSTEMKEESVKKHQYPDGEVWKKLLPAQEN

SEQ ID NO: 19191 - protein, 117 aa, Homo sapiens
MVRGRISRLSVRDVRFPTSLGGHGADAMHTDPDYSAAYVVIETDAEDGIKGCGITFTLGKGTEVDWSRKGRGAPGDSGRPKRGVGLVGQAGGKACLEVTCGHGSQDAGILHRFQVHH

SEQ ID NO: 19192 - protein, 450 aa, Homo sapiens
MVSADAMVSADAMVSADAMVSADAMVSADAMVSADAMVSADAMVSADAMHTDPDYSAAYVVIETDAEDGIKGCGITFTLGKGTEVVVCAVNALAHHVLNKDLKDIVGDFRGFYRQLTSDGQLRWIGPEKGVVHLATAAVLNAVWDLWAKQEGKPVWKLLVDMDPRMLVSCIDFRYITDVLTEEDALEILQKGQIGKKEREKQMLAQGYPAYTTSCAWLGYSDDTLKQLCAQALKDGWTRFKVKVGADLQDDMRRCQIIRDMIGPEKTLMMDANQRWDVPEAVEWMSKLAKFKPLWIEEPTSPDDILGHATISKCHNRVIFKQLLQAKALQFLQIDSCRLGSVNENLSVLLMAKKFEIPVCPHAGGVGLCELVQHLIIFDYISVSASLENRVCEYVDHLHEHFKYPVMIQRASYMPPKDPGYSTEMKEESVKKHQYPDGEVWKKLLPAQEN

SEQ ID NO: 19193 - protein, 474 aa, Homo sapiens
MVSADAMVSADAMVSADAMVSADAMVSADAMVSADAMVSADAMVSADAMVSADAMVSADAMVSADAMVSADAMHTDPDYSAAYVVIETDAEDGIKGCGITFTLGKGTEVVVCAVNALAHHVLNKDLKDIVGDFRGFYRQLTSDGQLRWIGPEKGVVHLATAAVLNAVWDLWAKQEGKPVWKLLVDMDPRMLVSCIDFRYITDVLTEEDALEILQKGQIGKKEREKQMLAQGYPAYTTSCAWLGYSDDTLKQLCAQALKDGWTRFKVKVGADLQDDMRRCQIIRDMIGPEKTLMMDANQRWDVPEAVEWMSKLAKFKPLWIEEPTSPDDILGHATISKCHNRVIFKQLLQAKALQFLQIDSCRLGSVNENLSVLLMAKKFEIPVCPHAGGVGLCELVQHLIIFDYISVSASLENRVCEYVDHLHEHFKYPVMIQRASYMPPKDPGYSTEMKEESVKKHQYPDGEVWKKLLPAQEN

SEQ ID NO: 19194 - protein, 262 aa, Homo sapiens
MLAQGYPAYTTSCAWLGYSDDTLKQLCAQALKDGWTRFKVKVGADLQDDMRRCQIIRDMIGPEKTLMMDANQRWDVPEAVEWMSKLAKFKPLWIEEPTSPDDILGHATISKALVPLGIGIATGEQCHNRVIFKQLLQAKALQFLQIDSCRLGSVNENLSVLLMAKKFEIPVCPHAGGVGLCELVQHLIIFDYISVSASLENRVCEYVDHLHEHFKYPVMIQRASYMPPKDPGYSTEMKEESVKKHQYPDGEVWKKLLPAQEN

SEQ ID NO: 19195 - protein, 213 aa, Homo sapiens
MRRCQIIRDMIGPEKTLMMDANQRWDVPEAVEWMSKLAKFKPLWIEEPTSPDDILGHATISKALVPLGIGIATGEQCHNRVIFKQLLQAKALQFLQIDSCRLGSVNENLSVLLMAKKFEIPVCPHAGGVGLCELVQHLIIFDYISVSASLENRVCEYVDHLHEHFKYPVMIQRASYMPPKDPGYSTEMKEESVKKHQYPDGEVWKKLLPAQEN

SEQ ID NO: 19196 - protein, 327 aa, Homo sapiens
MTAPCPPPPPDPQFVLRGTQSPVHALHFCEGAQAQGRPLLFSGSQSGLVHIWSLQTRRAVTTLDGHGGQCVTWLQTLPQGRQLLSQGRDLKLCLWDLAEGRSAVVDSVCLESVGFCRSSILAGGQPRWTLAVPGRGSDEVQILEMPSKTSVCALKPKADAKLGMPMCLRLWQADCSSRPLLLAGYEDGSVVLWDVSEQKVCSRIACHEEPVMDLDFDSQKARGISGSAGKALAVWSLDWQQALQVRGTHELTNPGIAEVTIRPDRKILATAGWDHRIRVFHWRTMQPLAVLAFHSAAVQCVAFTADGLLAAGSKDQRISLWSLYPRA

SEQ ID NO: 19197 - protein, 212 aa, Homo sapiens
MTAPCPPPPPDPQFVLRGTQSPVHALHFCEGAQAQGRPLLFSGSQSGLVHIWSLQTRRAVTTLDGHGGQCVTWLQTLPQGRQLLSQGRDLKLCLWDLAEGRSAVVDSVCLESVGFCRSSILAGGQPRWTLAVPGRGSDEVQILEMPSKTSVCALKPKADAKLGMPMCLRLWQADCSSRPLLLAGYEDGSVVLWDVSEQKVCSRIACHEEPGL

SEQ ID NO: 19198 - protein, 482 aa, Homo sapiens
MWTVPSFTNDSYQVYNVFSTNSFQLLTVKRTPHEAWRVPLTTKTNKTKGLPDCPKKPTNGPFIVTSILWDNCNAPKAVVLQTLAMGIVIDWAPKGHYWQDCSSKNTLCSEFIYSLDYIEHGWQSYTMRQRVSPYPFKWMDTGIAPPRPKIIHPFFTPEHPELWKLAAALSGIKIWNTTYQLLRTKTKTPTFNITLISEWVIPIRSCVKPPYMLLVGNIIMMPDAQTIECHNCKLFTCIDATFNPTTSILLVRAREGVWIPVSLHRPWESSPSIHIVNEVLKDILKRTKRFIFTLIAVLAGLLAVTATAATAGVAIRSSVQTAHYVEACQKNSSRLWNSQAQIDQKLANQINDLRQSVTWLGDRVMNLQHRMQLQCDWNTSDYCITPYAYNQDQHSWENVSRHLKAWDDNLTLDISQLKEQIFEASQAHLSTVPGSHIFEGITKQLPDFNPFKWLKPVRGSLLLLALLILVCLCCLLLVCRCL

SEQ ID NO: 19199 - protein, 721 aa, Homo sapiens
MAAPVVAPPGVVVSRANKRSGAGPGGSGGGGARGAEEEPPPPLQAVLVADSFDRRFFPISKDQPRVLLPLANVALIDYTLEFLTATGVQETFVFCCWKAAQIKEHLLKSKWCRPTSLNVVRIITSELYRSLGDVLRDVDAKALVRSDFLLVYGDVISNINITRALEEHRLRRKLEKNVSVMTMIFKESSPSHPTRCHEDNVVVAVDSTTNRVLHFQKTQGLRRFAFPLSLFQGSSDGVEVRYDLLDCHISICSPQVAQLFTDNFDYQTRDDFVRGLLVNEEILGNQIHMHVTAKEYGARVSNLHMYSAVCADVIRRWVYPLTPEANFTDSTTQSCTHSRHNIYRGPEVSLGHGSILEENVLLGSGTVIGSNCFITNSVIGPGCHIGDNVVLDQTYLWQGVRVAAGAQIHQSLLCDNAEVKERVTLKPRSVLTSQVVVGPNITLPEGSVISLHPPDAEEDEDDGEFSDDSGADQEKDKVKMKGYNPAEVGAAGKGYLWKAAGMNMEEEEELQQNLWGLKINMEEESESESEQSMDSEEPDSRGGSPQMDDIKVFQNEVLGTLQRGKEENISCDNLVLEINSLKYAYNISLKEVMQVLSHVVLEFPLQQMDSPLDSSRYCALLLPLLKAWSPVFRNYIKRAADHLEALAAIEDFFLEHEALGISMAKVLMAFYQLEILAEETILSWFSQRDTTDKGQQLRKNQQLQRFIQWLKEAEEESSEDD

SEQ ID NO: 19200 - protein, 527 aa, Homo sapiens
MNSPCDRLQQFIQVLLEESWSFPSFANTLHWPENLLSYIDELVWQGSLQNFHQHEVRFDKPPLRLPLTGFSSLTENWSSRQAVSSRLVATAASPPAGCQAPIAFLGLKFSSLGPARKNPALCFLYDQSNSKCNTSWVKENVGCPWHWCNIHEALIRTEKGSDPMFYVNTSTGGRDGFNGFNLQISDPWDPRWASGVDGGLYEHKTFMYPVAKIRIARTLKTTVTGLSDLASSIQSAEKELTSQLQPAADQAKSSRFSWLTLISEGAQLLQSTGVQNLSHCFLCAALRRPPLVAVPLPTPFNYTINSSTPIPPVPKGQVPLFSDPIRHKFPFCYSTPNASWCNQTRMLTSTPAPPRGYFWCNSTLTKVLNSTGNHTLCLPISLIPGLTLYSQDELSHLLAWTEPRPQNKSKWAIFLPLVLGISLASSLVASGLGKGALTHSIQTSQDLSTHLQLAIEASAESLDSLQRQITTVAQVAAQNRQALDLLMAEKGRTCLFLQEECCYYLNESGVVENSLQTLKKKKSSKRS

SEQ ID NO: 19201 - protein, 293 aa, Homo sapiens
MGSRAELCTLLGGFSFLLLLIPGEGAKGGSLRESQGVCSKQTLVVPLHYNESYSQPVYKPYLTLCAGRRICSTYRTMYRVMWREVRREVQQTHAVCCQGWKKRHPGALTCEAICAKPCLNGGVCVRPDQCECAPGWGGKHCHVDVDECRTSITLCSHHCFNTAGSFTCGCPHDLVLGVDGRTCMEGSPEPPTSASILSVAVREAEKDERALKQEIHELRGRLERLEQWAGQAGAWVRAVLPVPPEELQPEQVAELWGRGDRIESLSDQVLLLEERLGACSCEDNSLGLGVNHR

SEQ ID NO: 19202 - protein, 399 aa, Homo sapiens
MASPGKPGADEAQEEEGELEGGSAGPRAAILEQAEELFLLCDKEAKGFITKHDLQGLQSDLPLTPEQLEAVFESLDRAHTGFLTAREFCLGLGMFVGVASAQGANPCRTPEETFESGGLDVQGTAGSLDEEEEEEERFHTVLEQLGVAPVLGKQRAVRTLWARLQRERPELLGSFEDVLIRASACLEEAARERDGLEQALRRRESEHEREVRALYEETEQLREQSRRPPSQNFARGERRSRLELELQSREQDLERAGLRQRELEQQLHAQAAEHLEAQAQNSQLWRAHEALRTQLEGAQEQIRRLESEARGRQEQTQRDVVAVSRNMQKEKVSLLRQLELLRELNTRLRDDRDACEARRAGSSCRKALTTARLPGPTCCCCCCWARPPRRGSGHLPSAR

SEQ ID NO: 19203 - protein, 230 aa, Homo sapiens
MPAGMFVGVASAQGANPCRTPEETFESGGLDVQGTAGSLDEEEEEEERFHTVLEQLGVAPVLGDSRPPSRQRAVRTLWARLQRERPELLGSFEDVLIRASACLEEAARERDGLEQALRRRESEHEREVRALYEETEQLREQSRRPPSQNFARGERRSRLELELQSREQDLERAGLRQREVSTRPLPCPHGRPCTLPLCLSVPGLSGAWGTRSTPGKRGRSSPVSILPPSS

SEQ ID NO: 19204 - protein, 294 aa, Homo sapiens
MASPGKPGADEAQEEEGELEGGSAGPRAAILEQAEELFLLCDKEAKGFITKHDLQGLQSDLPLTPEQLEAVFESLDRAHTGFLTAREFCLGLGMFVGVASAQGANPCRTPEETFESGGLDVQGTAGSLDEEEEEEERFHTVLEQLGVAPVLGKQRAVRTLWARLQRERPELLGSFEDVLIRASACLEEAARERDGLEQALRRRESEHEREVRALYEETEQLREQSRRPPSQNFARGERRSRLELELQSREQDLERAGLRQRERRGRRLQEHAERESQPATATGAAQGAEYTAAG

SEQ ID NO: 19205 - protein, 1017 aa, Homo sapiens
MDLIRGVLLRLLLLASSLGPGAVSLRAAIRKPGKVGPPLDIKLGALNCTAFSIQWKMPRHPGSPILGYTVFYSEVGADKSLQEQLHSVPLSRDIPTTEEVIGDLKPGTEYRVSIAAYSQAGKGRLSSPRHVTTLSQDSCLPPAAPQQPHVIVVSDSEVALSWKPGASEGSAPIQYYSVEFIRPDFDKKWTSIHERIQMDSMVIKGLDPDTNYQFAVRAMNSHGPSPRSWPSDIIRTLCPEEAGSGRYGPRYITDMGAGEDDEGFEDDLDLDISFEEVKPLPATKGGNKKFLVESKKMSISNPKTISRLIPPTSASLPVTTVAPQPIPIQRKGKNGVAIMSRLFDMPCDETLCSADSFCVNDYTWGGSRCQCTLGKGGESCSEDIVIQYPQFFGHSYVTFEPLKNSYQAFQITLEFRAEAEDGLLLYCGENEHGRGDFMSLAIIRRSLQFRFNCGTGVAIIVSETKIKLGGWHTVMLYRDGLNGLLQLNNGTPVTGQSQGQYSKITFRTPLYLGGAPSAYWLVRATGTNRGFQGCVQSLAVNGRRIDMRPWPLGKALSGADVGECSSGICDEASCIHGGTCTAIKADSYICLCPLGFKGRHCEDAFTLTIPQFRESLRSYAATPWPLEPQHYLSFMEFEITFRPDSGDGVLLYSYDTGSKDFLSINLAGGHVEFRFDCGSGTGVLRSEDPLTLGNWHELRVSRTAKNGILQVDKQKIVEGMAEGGFTQIKCNTDIFIGGVPNYDDVKKNSGVLKPFSGSIQKIILNDRTIHVKHDFTSGVNVENAAHPCVRAPCAHGGSCRPRKEGYDCDCPLGFEGLHCQKECGNYCLNTIIEAIEIPQFIGRSYLTYDNPDILKRVSGSRSNVFMRFKTTAKDGLLLWRGDSPMRPNSDFISLGLRDGALVFSYNLGSGVASIMVNGSFNDGRWHRVKAVRDGQSGKITVDDYGARTGKSPGMMRQLNINGALYVGGMKEIALHTNRQYMRGLVGCISHFTLSTDYHISLVEDAVDGKNINTCGAK

SEQ ID NO: 19206 - protein, 1009 aa, Homo sapiens
MDLIRGVLLRLLLLASSLGPGAVSLRAAIRKPGKVGPPLDIKLGALNCTAFSIQWKMPRHPGSPILGYTVFYSEVGADKSLQEQLHSVPLSRDIPTTEEVIGDLKPGTEYRVSIAAYSQAGKGRLSSPRHVTTLSQDSCLPPAAPQQPHVIVVSDSEVALSWKPGASEGSAPIQYYSVEFIRPDFDKKWTSIHERIQMDSMVIKGLDPDTNYQFAVRAMNSHGPSPRSWPSDIIRTLCPEEAGSGRYGPRYITDMGAGEDDEGFEDDLDLDISFEEVKPLPATKGGNKKFLVESKKMSISNPKTISRLIPPTSASLPVTTVAPQPIPIQRKGKNGVAIMSRLFDMPCDETLCSADSFCVNDYTWGGSRCQCTLGKGGESCSEDIVIQYPQFFGHSYVTFEPLKNSYQAFQITLEFRAEAEDGLLLYCGENEHGRGDFMSLAIIRRSLQFRFNCGTGVAIIVSETKIKLGGWHTVMLYRDGLNGLLQLNNGTPVTGQSQGQYSKITFRTPLYLGGAPSAYWLVRATGTNRGFQGCVQSLAVNGRRIDMRPWPLGKALSGADVGECSSGICDEASCIHGGTCTAIKADSYICLCPLGFKGRHCEDAFTLTIPQFRESLRSYAATPWPLEPQHYLSFMEFEITFRPDSGDGVLLYSYDTGSKDFLSINLAGGHVEFRFDCGSGTGVLRSEDPLTLGNWHELRVSRTAKNGILQVDKQKIVEGMAEGGFTQIKCNTDIFIGGVPNYDDVKKNSGVLKPFSGSIQKIILNDRTIHVKHDFTSGVNVENAAHPCVRAPCAHGGSCRPRKEGYDCDCPLGFEGLHCQKAIIEAIEIPQFIGRSYLTYDNPDILKRVSGSRSNVFMRFKTTAKDGLLLWRGDSPMRPNSDFISLGLRDGALVFSYNLGSGVASIMVNGSFNDGRWHRVKAVRDGQSGKITVDDYGARTGKSPGMMRQLNINGALYVGGMKEIALHTNRQYMRGLVGCISHFTLSTDYHISLVEDAVDGKNINTCGAK

SEQ ID NO: 19207 - protein, 375 aa, Homo sapiens
MEFEITFRPDSGDGVLLYSYDTGSKDFLSINLAGGHVEFRFDCGSGTGVLRSEDPLTLGNWHELRVSRTAKNGILQVDKQKIVEGMAEGGFTQIKCNTDIFIGGVPNYDDVKKNSGVLKPFSGSIQKIILNDRTIHVKHDFTSGVNVENAAHPCVRAPCAHGGSCRPRKEGYDCDCPLGFEGLHCQKAIIEAIEIPQFIGRSYLTYDNPDILKRVSGSRSNVFMRFKTTAKDGLLLWRGDSPMRPNSDFISLGLRDGALVFSYNLGSGVASIMVNGSFNDGRWHRVKAVRDGQSGKITVDDYGARTGKSPGMMRQLNINGALYVGGMKEIALHTNRQYMRGLVGCISHFTLSTDYHISLVEDAVDGKNINTCGAK

SEQ ID NO: 19208 - protein, 775 aa, Homo sapiens
MHPGPEEAGSGRYGPRYITDMGAGEDDEGFEDDLDLDISFEEVKPLPATKGGNKKFLVESKKMSISNPKTISRLIPPTSASLPVTTVAPQPIPIQRKGKNGVAIMSRLFDMPCDETLCSADSFCVNDYTWGGSRCQCTLGKGGESCSEDIVIQYPQFFGHSYVTFEPLKNSYQAFQITLEFRAEAEDGLLLYCGENEHGRGDFMSLAIIRRSLQFRFNCGTGVAIIVSETKIKLGGWHTVMLYRDGLNGLLQLNNGTPVTGQSQGQYSKITFRTPLYLGGAPSAYWLVRATGTNRGFQGCVQSLAVNGRRIDMRPWPLGKALSGADVGECSSGICDEASCIHGGTCTAIKADSYICLCPLGFKGRHCEDAFTLTIPQFRESLRSYAATPWPLEPQHYLSFMEFEITFRPDSGDGVLLYSYDTGSKDFLSINLAGGHVEFRFDCGSGTGVLRSEDPLTLGNWHELRVSRTAKNGILQVDKQKIVEGMAEGGFTQIKCNTDIFIGGVPNYDDVKKNSGVLKPFSGSIQKIILNDRTIHVKHDFTSGVNVENAAHPCVRAPCAHGGSCRPRKEGYDCDCPLGFEGLHCQKAIIEAIEIPQFIGRSYLTYDNPDILKRVSGSRSNVFMRFKTTAKDGLLLWRGDSPMRPNSDFISLGLRDGALVFSYNLGSGVASIMVNGSFNDGRWHRVKAVRDGQSGKITVDDYGARTGKSPGMMRQLNINGALYVGGMKEIALHTNRQYMRGLVGCISHFTLSTDYHISLVEDAVDGKNINTCGAK

SEQ ID NO: 19209 - protein, 152 aa, Homo sapiens
MRFKTTAKDGLLLWRGDSPMRPNSDFISLGLRDGALVFSYNLGSGVASIMVNGSFNDGRWHRVKAVRDGQSGKITVDDYGARTGKSPGMMRQLNINGALYVGGMKEIALHTNRQYMRGLVGCISHFTLSTDYHISLVEDAVDGKNINTCGAK

SEQ ID NO: 19210 - protein, 1501 aa, Homo sapiens
MCKMAIIPDWLRSHPHTRKFTHSRPHSSPCRVYSRNGSPNKFRSSSTTAVANPTLSSLDVKRILFQKITDRGDELQKAFQLLDTGQNLTVSKSELRRIITDFLMPLTREQFQDVLAQIPLSTSGTVPYLAFLSRFGGIDLYINGIKRGGGNEMNCCRTLRELEIQVGEKVFKNIKTVMKAFELIDVNKTGLVRPQELRRVLETFCMKLRDEEYEKFSKHYNIHKDTAVDYNVFLKNLSINNDLNLRYCMGNQEVSLENQQAKNSKKERLLGSASSEDIWRNYSLDEIERNFCLQLSKSYEKVEKALSAGDPCKGGYVSFNYLKIVLDTFVYQIPRRIFIQLMKRFGLKATTKINWKQFLTSFHEPQGLQVSSKGPLTKRNSINSRNESHKENIITKLFRHTEDHSASLKKALLIINTKPDGPITREEFRYILNCMAVKLSDSEFKELMQMLDPGDTGVVNTSMFIDLIEENCRMRKTSPCTDAKTPFLLAWDSVEEIVHDTITRNLQAFYNMLRSYDLGDTGRIGRNNFKKIMHVFCPFLTNAHFIKLCSKIQDIGSGRILYKKLLACIGIDGPPTVSPVLVPKDQLLSEHLQKDEQQQPDLSERTKLTEDKTTLTKKMTTEEVIEKFKKCIQQQDPAFKKRFLDFSKEPNGKINVHDFKKVLEDTGMPMDDDQYALLTTKIGFEKEGMSYLDFAAGFEDPPMRGPETTPPQPPTPSKSYVNSHFITAEECLKLFPRRLKESFRDPYSAFFKTDADRDGIINMHDLHRLLLHLLLNLKDDEFERFLGLLGLRLSVTLNFREFQNLCEKRPWRTDEAPQRLIRPKQKVADSELACEQAHQYLVTKAKNRWSDLSKNFLETDNEGNGILRRRDIKNALYGFDIPLTPREFEKLWARYDTEGKGHITYQEFLQKLGINYSPAVHRPCAEDYFNFMGHFTKPQQLQEEMKELQQSTEKAVAARDKLMDRHQDISKAFTKTDQSKTNYISICKMQEVLEECGCSLTEGELTHLLNSWGVSRHDNAINYLDFLRAVENSKSTGAQPKEKEESMPINFATLNPQEAVRKIQEVVESSQLALSTAFSALDKEDTGFVKATEFGQVLKDFCYKLTDNQYHYFLRKLRIHLTPYINWKYFLQNFSCFLEETADEWAEKMPKGPPPTSPKATADRDILARLHKAVTSHYHAITQEFENFDTMKTNTISREEFRAICNRRVQILTDEQFDRLWNEMPVNAKGRLKYPDFLSRFSSETAATPMATGDSAVAQRGSSVPDVSEGTRSALSLPTQELRPGSKSQSHPCTPASTTVIPGTPPLQNCDPIESRLRKRIQGCWRQLLKECKEKDVARQGDINASDFLALVEKFNLDISKEECQQLIIKYDLKSNGKFAYCDFIQSCVLLLKAKESSLMHRMKIQNAHKMKEAGAETPSFYSALLRIQPKIVHCWRPMRRTFKSYDEAGTGLLSVADFRTVLRQYSINLSEEEFFHILEYYDKTLSSKISYNDFLRAFLQ

SEQ ID NO: 19211 - protein, 1349 aa, Homo sapiens
MNCCRTLRELEIQVGEKVFKNIKTVMKAFELIDVNKTGLVRPQELRRVLETFCMKLRDEEYEKFSKHYNIHKDTAVDYNVFLKNLSINNDLNLRYCMGNQEVSLENQQAKNSKKERLLGSASSEDIWRNYSLDEIERNFCLQLSKSYEKVEKALSAGDPCKGGYVSFNYLKIVLDTFVYQIPRRIFIQLMKRFGLKATTKINWKQFLTSFHEPQGLQVSSKGPLTKRNSINSRNESHKENIITKLFRHTEDHSASLKKALLIINTKPDGPITREEFRYILNCMAVKLSDSEFKELMQMLDPGDTGVVNTSMFIDLIEENCRMRKTSPCTDAKTPFLLAWDSVEEIVHDTITRNLQAFYNMLRSYDLGDTGRIGRNNFKKIMHVFCPFLTNAHFIKLCSKIQDIGSGRILYKKLLACIGIDGPPTVSPVLVPKDQLLSEHLQKDEQQQPDLSERTKLTEDKTTLTKKMTTEEVIEKFKKCIQQQDPAFKKRFLDFSKEPNGKINVHDFKKVLEDTGMPMDDDQYALLTTKIGFEKEGMSYLDFAAGFEDPPMRGPETTPPQPPTPSKSYVNSHFITAEECLKLFPRRLKESFRDPYSAFFKTDADRDGIINMHDLHRLLLHLLLNLKDDEFERFLGLLGLRLSVTLNFREFQNLCEKRPWRTDEAPQRLIRPKQKVADSELACEQAHQYLVTKAKNRWSDLSKNFLETDNEGNGILRRRDIKNALYGFDIPLTPREFEKLWARYDTEGKGHITYQEFLQKLGINYSPAVHRPCAEDYFNFMGHFTKPQQLQEEMKELQQSTEKAVAARDKLMDRHQDISKAFTKTDQSKTNYISICKMQEVLEECGCSLTEGELTHLLNSWGVSRHDNAINYLDFLRAVENSKSTGAQPKEKEESMPINFATLNPQEAVRKIQEVVESSQLALSTAFSALDKEDTGFVKATEFGQVLKDFCYKLTDNQYHYFLRKLRIHLTPYINWKYFLQNFSCFLEETADEWAEKMPKGPPPTSPKATADRDILARLHKAVTSHYHAITQEFENFDTMKTNTISREEFRAICNRRVQILTDEQFDRLWNEMPVNAKGRLKYPDFLSRFSSETAATPMATGDSAVAQRGSSVPDVSEGTRSALSLPTQELRPGSKSQSHPCTPASTTVIPGTPPLQNCDPIESRLRKRIQGCWRQLLKECKEKDVARQGDINASDFLALVEKFNLDISKEECQQLIIKYDLKSNGKFAYCDFIQSCVLLLKAKESSLMHRMKIQNAHKMKEAGAETPSFYSALLRIQPKIVHCWRPMRRTFKSYDEAGTGLLSVADFRTVLRQYSINLSEEEFFHILEYYDKTLSSKISYNDFLRAFLQ

SEQ ID NO: 19212 - protein, 570 aa, Homo sapiens
MGHFTKPQQLQEEMKELQQSTEKAVAARDKLMDRHQDISKAFTKTDQSKTNYISICKMQEVLEECGCSLTEGELTHLLNSWGVSRHDNAINYLDFLRAVENSKSTGAQPKEKEESMPINFATLNPQEAVRKIQEVVESSQLALSTAFSALDKEDTGFVKATEFGQVLKDFCYKLTDNQYHYFLRKLRIHLTPYINWKYFLQNFSCFLEETADEWAEKMPKGPPPTSPKATADRDILARLHKAVTSHYHAITQEFENFDTMKTNTISREEFRAICNRRVQILTDEQFDRLWNEMPVNAKGRLKYPDFLSRFSSETAATPMATGDSAVAQRGSSVPDVSEGTRSALSLPTQELRPGSKSQSHPCTPASTTVIPGTPPLQNCDPIESRLRKRIQGCWRQLLKECKEKDVARQGDINASDFLALVEKFNLDISKEECQQLIIKYDLKSNGKFAYCDFIQSCVLLLKAKESSLMHRMKIQNAHKMKEAGAETPSFYSALLRIQPKIVHCWRPMRRTFKSYDEAGTGLLSVADFRTVLRQYSINLSEEEFFHILEYYDKTLSSKISYNDFLRAFLQ

SEQ ID NO: 19213 - protein, 362 aa, Homo sapiens
MTADEWAEKMPKGPPPTSPKATADRDILARLHKAVTSHYHAITQEFENFDTMKTNTISREEFRAICNRRVQILTDEQFDRLWNEMPVNAKGRLKYPDFLSRFSSETAATPMATGDSAVAQRGSSVPDVSEGTRSALSLPTQELRPGSKSQSHPCTPASTTVIPGTPPLQNCDPIESRLRKRIQGCWRQLLKECKEKDVARQGDINASDFLALVEKFNLDISKEECQQLIIKYDLKSNGKFAYCDFIQSCVLLLKAKESSLMHRMKIQNAHKMKEAGAETPSFYSALLRIQPKIVHCWRPMRRTFKSYDEAGTGLLSVADFRTVLRQYSINLSEEEFFHILEYYDKTLSSKISYNDFLRAFLQ

SEQ ID NO: 19214 - protein, 420 aa, Homo sapiens
MCKMAIIPDWLRSHPHTRKFTHSRPHSSPCRVYSRNGSPNKFRSSSTTAVANPTLSSLDVKRILFQKITDRGDELQKAFQLLDTGQNLTVSKSELRRIITDFLMPLTREQFQDVLAQIPLSTSGTVPYLAFLSRFGGIDLYINGIKRGGGNEMNCCRTLRELEIQVGEKVFKNIKTVMKAFELIDVNKTGLVRPQELRRVLETFCMKLRDEEYEKFSKHYNIHKDTAVDYNVFLKNLSINNDLNLRYCMGNQEVSLENQQAKNSKKERLLGSASSEDIWRNYSLDEIERNFCLQLSKSYEKVEKALSAGDPCKGGYVSFNYLKIVLDTFVYQIPRRIFIQLMKRFGLKATTKINWKQFLTSFHEPQGLQVSSKGPLTKRNSINSRNESHKENIITKLFRHTEDHSASLKKALLIINTVRF

SEQ ID NO: 19215 - protein, 1249 aa, Homo sapiens
MCKMAIIPDWLRSHPHTRKFTHSRPHSSPCRVYSRNGSPNKFRSSSTTAVANPTLSSLDVKRILFQKITDRGDELQKAFQLLDTGQNLTVSKSELRRIITDFLMPLTREQFQDVLAQIPLSTSGTVPYLAFLSRFGGIDLYINGIKRGGGNEMNCCRTLRELEIQVGEKVFKNIKTVMKAFELIDVNKTGLVRPQELRRVLETFCMKLRDEEYEKFSKHYNIHKDTAVDYNVFLKNLSINNDLNLRYCMGNQEVSLENQQAKNSKKERLLGSASSEDIWRNYSLDEIERNFCLQLSKSYEKVEKALSAGDPCKGGYVSFNYLKIVLDTFVYQIPRRIFIQLMKRFGLKATTKINWKQFLTSFHEPQGLQVSSKGPLTKRNSINSRNESHKENIITKLFRHTEDHSASLKKALLIINTKPDGPITREEFRYILNCMAVKLSDSEFKELMQMLDPGDTGVVNTSMFIDLIEENCRMRKTSPCTDAKTPFLLAWDSVEEIVHDTITRNLQAFYNMLRSYDLGDTGRIGRNNFKKIMHVFCPFLTNAHFIKLCSKIQDIGSGRILYKKLLACIGIDGPPTVSPVLVPKDQLLSEHLQKDEQQQPDLSERTKLTEDKTTLTKKMTTEEVIEKFKKCIQQQDPAFKKRFLDFSKEPNGKINVHDFKKVLEDTGMPMDDDQYALLTTKIGFEKEGMSYLDFAAGFEDPPMRGPETTPPQPPTPSKSYVNSHFITAEECLKLFPRRLKESFRDPYSAFFKTDADRDGIINMHDLHRLLLHLLLNLKDDEFERFLGLLGLRLSVTLNFREFQNLCEKRPWRTDEAPQRLIRPKQKVADSELACEQAHQYLVTKAKNRWSDLSKNFLETDNEGNGILRRRDIKNALYGFDIPLTPREFEKLWARYDTEGKGHITYQEFLQKLGINYSPAVHRPCAEDYFNFMGHFTKPQQLQEEMKELQQSTEKAVAARDKLMDRHQDISKAFTKTDQSKTNYISICKMQEVLEECGCSLTEGELTHLLNSWGVSRHDNAINYLDFLRAVENSKSTGAQPKEKEESMPINFATLNPQEAVRKIQEVVESSQLALSTAFSALDKEDTGFVKATEFGQVLKDFCYKLTDNQYHYFLRKLRIHLTPYINWKYFLQNFSCFLEETADEWAEKMPKGPPPTSPKATADRDILARLHKAVTSHYHAITQEFENFDTMKTNTISREEFRAICNRRVQILTDEQVRNASQSSPCTPLAERQPGPWPECTEFKTVLYF

SEQ ID NO: 19216 - protein, 130 aa, Homo sapiens
MKLAFLFLGPMALLLLAGYGCVLGASSGNLRTFVGCAVREFTFLAKKPGCRGLRITTDACWGRCETWEKPILEPPYIEAHHRVCTYNETKQVTVKLPNCAPGVDPFYTYPVAIRCDCGACSTATTECETI

SEQ ID NO: 19217 - protein, 238 aa, Homo sapiens
MEPGLWLLFGLTVTSAAGFVPCSQSGDAGRRGVSQAPTAARSEGDCEETVAGPGEETVAGPGEGTVAPTALQGPSPGSPGQEQAAEGAPEHHRSRRCTCFTYKDKECVYYCHLDIIWINTPEQTVPYGLSNYRGSFRGKRSAGPLPGNLQLSHRPHLRCACVGRYDKACLHFCTQTLDVSSNSRTAEKTDKEEEGKVEVKDQQSKQALDLHHPKLMPGSGLALAPSTCPRCLFQEGAP

SEQ ID NO: 19218 - protein, 224 aa, Homo sapiens
MEPGLWLLFGLTVTSAAGFVPCSQSGDAGRRGVSQAPTAARSEGDCEETVAGPGEETVAGPGEGTVAPTALQGPSPGSPGQEQAAEGAPEHHRSRRCTCFTYKDKECVYYCHLDIIWINTPEQTVPYGLSNYRGSFRGKRSAGPLPGNLQLSHRPHLRCACVGRYDKACLHFCTQTLDVSRQVEVKDQQSKQALDLHHPKLMPGSGLALAPSTCPRCLFQEGAP

SEQ ID NO: 19219 - protein, 219 aa, Homo sapiens
MEPGLWLLFGLTVTSAAGFVPCSQSGDAGRRGVSQAPTAARSEGDCEETVAGPGEETVAGPGEGTVAPTALQGPSPGSPGQEQAAEGAPEHHRSRRCTCFTYKDKECVYYCHLDIIWINTPEQTVPYGLSNYRGSFRGKRSAGPLPGNLQLSHRPHLRCACVGRYDKACLHFCTQTLDVSSNSRTAEKTDKEEEGKVRGANRGLCQRRLKSRTNKASRL

SEQ ID NO: 19220 - protein, 427 aa, Homo sapiens
METLCLRASFWLALVGCVISDNPERYSTNLSNHVDDFTTFRGTELSFLVTTHQPTNLVLPSNGSMHNYCPQQTKITSAFKYINTVISCTIFIVGMVGNATLLRIIYQNKCMRNGPNALIASLALGDLIYVVIDLPINVFKLLAGRWPFDHNDFGVFLCKLFPFLQKSSVGITVLNLCALSVDRYRAVASWSRVQGIGIPLVTAIEIVSIWILSFILAIPEAIGFVMVPFEYRGEQHKTCMLNATSKFMEFYQDVKDWWLFGFYFCMPLVCTAIFYTLMTCEMLNRRNGSLRIALSEHLKQRREVAKTVFCLVVIFALCWFPLHLSRILKKTVYNEMDKNRCELLSFLLLMDYIGINLATMNSCINPIALYFVSKKFKNCFQSCLCCCCYQSKSLMTSVPMNGTSIQWKNHDQNNHNTDRSSHKDSMN

SEQ ID NO: 19221 - protein, 161 aa, Homo sapiens
METLCLRASFWLALVGCVISDNPERYSTNLSNHVDDFTTFRGTELSFLVTTHQPTNLVLPSNGSMHNYCPQQTKITSAFKYINTVISCTIFIVGMVGNATLLRIIYQNKCMRNGPNALIASLALGDLIYVVIDLPINVFKVQSSCLLESCSGNWDSFGNCH

SEQ ID NO: 19222 - protein, 187 aa, Homo sapiens
METLCLRASFWLALVGCVISDNPERYSTNLSNHVDDFTTFRGTELSFLVTTHQPTNLVLPSNGSMHNYCPQQTKITSAFKYINTVISCTIFIVGMVGNATLLRIIYQNKCMRNGPNALIASLALGDLIYVVIDLPINVFKLLAGRWPFDHNDFGVFLCKLFPFLQKSSVGITVLNLCALSVDSSTKM

SEQ ID NO: 19223 - protein, 318 aa, Homo sapiens
METLCLRASFWLALVGCVISDNPERYSTNLSNHVDDFTTFRGTELSFLVTTHQPTNLVLPSNGSMHNYCPQQTKITSAFKYINTVISCTIFIVGMVGNATLLRIIYQNKCMRNGPNALIASLALGDLIYVVIDLPINVFKFYQDVKDWWLFGFYFCMPLVCTAIFYTLMTCEMLNRRNGSLRIALSEHLKQRREVAKTVFCLVVIFALCWFPLHLSRILKKTVYNEMDKNRCELLSFLLLMDYIGINLATMNSCINPIALYFVSKKFKNCFQSCLCCCCYQSKSLMTSVPMNGTSIQWKNHDQNNHNTDRSSHKDSMN

SEQ ID NO: 19224 - protein, 202 aa, Homo sapiens
MVPFEYRGEQHKTCMLNATSKFMEFYQDVKDWWLFGFYFCMPLVCTAIFYTLMTCEMLNRRNGSLRIALSEHLKQRREVAKTVFCLVVIFALCWFPLHLSRILKKTVYNEMDKNRCELLSFLLLMDYIGINLATMNSCINPIALYFVSKKFKNCFQSCLCCCCYQSKSLMTSVPMNGTSIQWKNHDQNNHNTDRSSHKDSMN

SEQ ID NO: 19225 - protein, 442 aa, Homo sapiens
MQPPPSLCGRALVALVLACGLSRIWGEERGFPPDRATPLLQTAEIMTPPTKTLWPKGSNASLARSLAPAEVPKGDRTAGSPPRTISPPPCQGPIEIKETFKYINTVVSCLVFVLGIIGNSTLLRIIYKNKCMRNGPNILIASLALGDLLHIVIDIPINVYKLLAEDWPFGAEMCKLVPFIQKASVGITVLSLCALSIDRYRAVASWSRIKGIGVPKWTAVEIVLIWVVSVVLAVPEAIGFDIITMDYKGSYLRICLLHPVQKTAFMQFYKTAKDWWLFSFYFCLPLAITAFFYTLMTCEMLRKKSGMQIALNDHLKQRREVAKTVFCLVLVFALCWLPLHLSRILKLTLYNQNDPNRCELLSFLLVLDYIGINMASLNSCINPIALYLVSKRFKNCFKSCLCCWCQSFEEKQSLEEKQSCLKFKANDHGYDNFRSSNKYSSS

SEQ ID NO: 19226 - protein, 436 aa, Homo sapiens
MQPPPSLCGRALVALVLACGLSRIWGEERGFPPDRATPLLQTAEIMTPPTKTLWPKGSNASLARSLAPAEVPKGDRTAGSPPRTISPPPCQGPIEIKETFKYINTVVSCLVFVLGIIGNSTLLRIIYKNKCMRNGPNILIASLALGDLLHIVIDIPINVYKLLAEDWPFGAEMCKLVPFIQKASVGITVLSLCALSIDRYRAVASWSRIKGIGVPKWTAVEIVLIWVVSVVLAVPEAIGFDIITMDYKGSYLRICLLHPVQKTAFMQFYKTAKDWWLFSFYFCLPLAITAFFYTLMTCEMLRKKSGMQIALNDHLKQRREVAKTVFCLVLVFALCWLPLHLSRILKLTLYNQNDPNRCELLSFLLVLDYIGINMASLNSCINPIALYLVSKRFKNCFKAGPHVGNKLVMLFSVNIECDGTVNQNPTMWPERKSNNN

SEQ ID NO: 19227 - protein, 532 aa, Homo sapiens
MNKSTCLMAAETPSKRWRLHCLAFSQRFVRAGPACSSREACSSPRAGWNPAGFRLPGRWSPFVALHLVCQIREALKLRSGHRTPSGAGSSMQPPPSLCGRALVALVLACGLSRIWGEERGFPPDRATPLLQTAEIMTPPTKTLWPKGSNASLARSLAPAEVPKGDRTAGSPPRTISPPPCQGPIEIKETFKYINTVVSCLVFVLGIIGNSTLLRIIYKNKCMRNGPNILIASLALGDLLHIVIDIPINVYKLLAEDWPFGAEMCKLVPFIQKASVGITVLSLCALSIDRYRAVASWSRIKGIGVPKWTAVEIVLIWVVSVVLAVPEAIGFDIITMDYKGSYLRICLLHPVQKTAFMQFYKTAKDWWLFSFYFCLPLAITAFFYTLMTCEMLRKKSGMQIALNDHLKQRREVAKTVFCLVLVFALCWLPLHLSRILKLTLYNQNDPNRCELLSFLLVLDYIGINMASLNSCINPIALYLVSKRFKNCFKSCLCCWCQSFEEKQSLEEKQSCLKFKANDHGYDNFRSSNKYSSS

SEQ ID NO: 19228 - protein, 224 aa, Homo sapiens
MAQKEEAAVATEAASQNGEDLENLDDPEKLKELIELPPFEIVTGERLPANFFKFQFRNVEYSSGRNKTFLCYVVEAQGKGGQVQASRGYLEDEHAAAHAEEAFFNTILPAFDPALRYNVTWYVSSSPCAACADRIIKTLSKTKNLRLLILVGRLFMWEEPEIQAALKKLKEAGCKLRIMKPQDFEYVWQNFVEQEEGESKAFQPWEDIQENFLYYEEKLADILK

SEQ ID NO: 19229 - protein, 517 aa, Homo sapiens
MEGPVLTLGLLAALAVCGSWGLNEEERLIRHLFQEKGYNKELRPVAHKEESVDVALALTLSNLISLKEVEETLTTNVWIEHGWTDNRLKWNAEEFGNISVLRLPPDMVWLPEIVLENNNDGSFQISYSCNVLVYHYGFVYWLPPAIFRSSCPISVTYFPFDWQNCSLKFSSLKYTAKEITLSLKQDAKENRTYPVEWIIIDPEGFTENGEWEIVHRPARVNVDPRAPLDSPSRQDITFYLIIRRKPLFYIINILVPCVLISFMVNLVFYLPADSGEKTSVAISVLLAQSVFLLLISKRLPATSMAIPLIGKFLLFGMVLVTMVVVICVIVLNIHFRTPSTHVLSEGVKKLFLETLPELLHMSRPAEDGPSPGALVRRSSSLGYISKAEEYFLLKSRSDLMFEKQSERHGLARRLTTARRPPASSEQAQQELFNELKPAVDGANFIVNHMRDQNNYNEEKDSWNRVARTVDRLCLFVVTPVMVVGTAWIFLQGVYNQPPPQPFPGDPYSYNVQDKRFI

SEQ ID NO: 19230 - protein, 502 aa, Homo sapiens
MEGPVLTLGLLAALAVCGSWGLNEEERLIRHLFQEKGYNKELRPVAHKEESVDVALALTLSNLISLGWTDNRLKWNAEEFGNISVLRLPPDMVWLPEIVLENNNDGSFQISYSCNVLVYHYGFVYWLPPAIFRSSCPISVTYFPFDWQNCSLKFSSLKYTAKEITLSLKQDAKENRTYPVEWIIIDPEGFTENGEWEIVHRPARVNVDPRAPLDSPSRQDITFYLIIRRKPLFYIINILVPCVLISFMVNLVFYLPADSGEKTSVAISVLLAQSVFLLLISKRLPATSMAIPLIGKFLLFGMVLVTMVVVICVIVLNIHFRTPSTHVLSEGVKKLFLETLPELLHMSRPAEDGPSPGALVRRSSSLGYISKAEEYFLLKSRSDLMFEKQSERHGLARRLTTARRPPASSEQAQQELFNELKPAVDGANFIVNHMRDQNNYNEEKDSWNRVARTVDRLCLFVVTPVMVVGTAWIFLQGVYNQPPPQPFPGDPYSYNVQDKRFI

SEQ ID NO: 19231 - protein, 1025 aa, Homo sapiens
MAGTYSSTLKTLEDLTLDSGYGAGDSCRSLSLSSSKSNSQALNSSAQQHRGAAWWCYSGSMNSRHNSWDTVNTVLPEDPEVADLFSRCPRLPELEEFPWTEGDVARVLRKGAGGRRLPQFSAEAVRRLAGLLRRALIRVAREAQRLSVLHAKCTRFEVQSAVRLVHSWALAESCALAAVKALSLYSMSAGDGLRRGKSARCGLTFSVGRFFRWMVDTRISVRIHEYAAISLTACMENLVEEIRARVMASHSPDGGGAGGGEVSAEALEMVINNDAELWGVLQPYEHLICGKNANGVLSLPAYFSPYNGGSLGHDERADAYAQLELRTLEQSLLATCVGSISELSDLVSRAMHHMQGRHPLCPGASPARQARQPPQPITWSPDALHTLYYFLRCPQMESMENPNLDPPRMTLNNERPFMLLPPLMEWMRVAITYAEHRRSLTVDSGDIRQAARLLLPGLDCEPRQLKPEHCFSSFRRLDARAATEKFNQDLGFRMLNCGRTDLINQAIEALGPDGVNTMDDQGMTPLMYACAAGDEAMVQMLIDAGANLDIQVPSNSPRHPSIHPDSRHWTSLTFAVLHGHISVVQLLLDAGAHVEGSAVNGGEDSYAETPLQLASAAGNYELVSLLLSRGADPLLSMLEAHGMGSSLHEDMNCFSHSAAHGHRNVLRKLLTQPQQAKADVLSLEEILAEGVEESDASSQGSGSEGPVRLSRTRTKALQEAMYYSAEHGYVDITMELRALGVPWKLHIWIESLRTSFSQSRYSVVQSLLRDFSSIREEEYNEELVTEGLQLMFDILKTSKNDSVIQQLATIFTHCYGSSPIPSIPEIRKTLPARLDPHFLNNKEMSDVTFLVEGKLFYAHKVLLVTASNRFKTLMTNKSEQDGDSSKTIEISDMKYHIFQMMMQYLYYGGTESMEIPTTDILELLSAASLFQLDALQRHCEILCSQTLSMESAVNTYKYAKIHNAPELALFCEGFFLKHMKALLEQDAFRQLIYGRSSKVQGLDPLQDLQNTLAERVHSVYITSRV

SEQ ID NO: 19232 - protein, 839 aa, Homo sapiens
MSAGDGLRRGKSARCGLTFSVGRFFRWMVDTRISVRIHEYAAISLTACMENLVEEIRARVMASHSPDGGGAGGGEVSAEALEMVINNDAELWGVLQPYEHLICGKNANGVLSLPAYFSPYNGGSLGHDERADAYAQLELRTLEQSLLATCVGSISELSDLVSRAMHHMQGRHPLCPGASPARQARQPPQPITWSPDALHTLYYFLRCPQMESMENPNLDPPRMTLNNERPFMLLPPLMEWMRVAITYAEHRRSLTVDSGDIRQAARLLLPGLDCEPRQLKPEHCFSSFRRLDARAATEKFNQDLGFRMLNCGRTDLINQAIEALGPDGVNTMDDQGMTPLMYACAAGDEAMVQMLIDAGANLDIQVPSNSPRHPSIHPDSRHWTSLTFAVLHGHISVVQLLLDAGAHVEGSAVNGGEDSYAETPLQLASAAGNYELVSLLLSRGADPLLSMLEAHGMGSSLHEDMNCFSHSAAHGHRNVLRKLLTQPQQAKADVLSLEEILAEGVEESDASSQGSGSEGPVRLSRTRTKALQEAMYYSAEHGYVDITMELRALGVPWKLHIWIESLRTSFSQSRYSVVQSLLRDFSSIREEEYNEELVTEGLQLMFDILKTSKNDSVIQQLATIFTHCYGSSPIPSIPEIRKTLPARLDPHFLNNKEMSDVTFLVEGKLFYAHKVLLVTASNRFKTLMTNKSEQDGDSSKTIEISDMKYHIFQMMMQYLYYGGTESMEIPTTDILELLSAASLFQLDALQRHCEILCSQTLSMESAVNTYKYAKIHNAPELALFCEGFFLKHMKALLEQDAFRQLIYGRSSKVQGLDPLQDLQNTLAERVHSVYITSRV

SEQ ID NO: 19233 - protein, 478 aa, Homo sapiens
MDTSDLFASCRKGDVGRVRYLLEQRDVEVNVRDKWDSTPLYYACLCGHEELVLYLLANGARCEANTFDGERCLYGALSDPIRRALRDYKQVTASCRRRDYYDDFLQRLLEQGIHSDVVFVVHGKPFRVHRCVLGARSAYFANMLDTKWKGKSVVVLRHPLINPVAFGALLQYLYTGRLDIGVEHVSDCERLAKQCQLWDLLSDLEAKCEKVSEFVASKPGTCVKVLTIEPPPADPRLREDMALLADCALPPELRGDLWELPFPCPDGFNSCPDICFRVAGCSFLCHKAFFCGRSDYFRALLDDHFRESEEPATSGGPPAVTLHGISPDVFTHVLYYMYSDHTELSPEAAYDVLSVADMYLLPGLKRLCGRSLAQMLDEDTVVGVWRVAKLFRLARLEDQCTEYMAKVIEKLVEREDFVEAVKEEAAAVAARQETDSIPLVDDIRFHVASTVQTYSAIEEAQQRLRALEDLLVSIGLDC

SEQ ID NO: 19234 - protein, 336 aa, Homo sapiens
MLDTKWKGKSVVVLRHPLINPVAFGALLQYLYTGRLDIGVEHVSDCERLAKQCQLWDLLSDLEAKCEKVSEFVASKPGTCVKVLTIEPPPADPRLREDMALLADCALPPELRGDLWELPFPCPDGFNSCPDICFRVAGCSFLCHKAFFCGRSDYFRALLDDHFRESEEPATSGGPPAVTLHGISPDVFTHVLYYMYSDHTELSPEAAYDVLSVADMYLLPGLKRLCGRSLAQMLDEDTVVGVWRVAKLFRLARLEDQCTEYMAKVIEKLVEREDFVEAVKEEAAAVAARQETDSIPLVDDIRFHVASTVQTYSAIEEAQQRLRALEDLLVSIGLDC

SEQ ID NO: 19235 - protein, 453 aa, Homo sapiens
MWAECGTCWSSETWRYYACLCGHEELVLYLLANGARCEANTFDGERCLYGALSDPIRRALRDYKQVTASCRRRDYYDDFLQRLLEQGIHSDVVFVVHGKPFRVHRCVLGARSAYFANMLDTKWKGKSVVVLRHPLINPVAFGALLQYLYTGRLDIGVEHVSDCERLAKQCQLWDLLSDLEAKCEKVSEFVASKPGTCVKVLTIEPPPADPRLREDMALLADCALPPELRGDLWELPFPCPDGFNSCPDICFRVAGCSFLCHKAFFCGRSDYFRALLDDHFRESEEPATSGGPPAVTLHGISPDVFTHVLYYMYSDHTELSPEAAYDVLSVADMYLLPGLKRLCGRSLAQMLDEDTVVGVWRVAKLFRLARLEDQCTEYMAKVIEKLVEREDFVEAVKEEAAAVAARQETDSIPLVDDIRFHVASTVQTYSAIEEAQQRLRALEDLLVSIGLDC

SEQ ID NO: 19236 - protein, 405 aa, Homo sapiens
MDTSDLFASCRKGDVGRVRYLLELVLYLLANGARCEANTFDGERCLYGALSDPIRRALRLCGHEELWDLLSDLEAKCEKVSEFVASKPGTCVKVLTIEPPPADPRLREDMALLADCALPPELRAFFCGRSDYFRALLDDHFRESEEPATSGGPPAVTLHGISPDVFTHVLYYMYSDHTELSPEAAYDVLSVADMYLLPGLKRLCGRSLAQMLDEDTVVGVWRVAKLFRLARLEDQCTEYMAKVIEKLVEREDFVEAVKEEAAAVAARQETDSIPLVDDIRFHVASTVQTYSAIEEAQQRLRALLETSMCMRLCAALLPAPCTLRASWGVRGAQWGFSSLHEPGDPRGGSIWDEPPPPNAQASPQDPGGGHHSGKPGVGVGFGLSTFLLQIPPTHPSPKSSPLALA

SEQ ID NO: 19237 - protein, 481 aa, Homo sapiens
MGKLRPGRVEWLASGHTERPHLFQNLLLFLWALLNCGLGVSAQGPGEWTPWVSWTRCSSSCGRGVSVRSRRCLRLPGEEPCWGDSHEYRLCQLPDCPPGAVPFRDLQCALYNGRPVLGTQKTYQWVPFHGAPNQCDLNCLAEGHAFYHSFGRVLDGTACSPGAQGVCVAGRCLSAGCDGLLGSGALEDRCGRCGGANDSCLFVQRVFRDAGAFAGYWNVTLIPEGARHIRVEHRSRNHLALMGGDGRYVLNGHWVVSPPGTYEAAGTHVVYTRDTGPQETLQAAGPTSHDLLLQVLLQEPNPGIEFEFWLPRERYSPFQARVQALGWPLRQPQPRGVEPQPPAAPAVTPAQTPTLAPDPCPPCPDTRGRAHRLLHYCGSDFVFQARVLGHHHQAQETRYEVRIQLVYKNRSPLRAREYVWAPGHCPCPMLAPHRDYLMAVQRLVSPDGTQDQLLLPHAGYARPWSPAEDSRIRLTARRCPG

SEQ ID NO: 19238 - protein, 481 aa, Homo sapiens
MGKLRPGRVEMDSAPLFPRPHLFQNLLLFLWALLNCGLGVSAQGPGEWTPWVSWTRCSSSCGRGVSVRSRRCLRLPGEEPCWGDSHEYRLCQLPDCPPGAVPFRDLQCALYNGRPVLGTQKTYQWVPFHGAPNQCDLNCLAEGHAFYHSFGRVLDGTACSPGAQGVCVAGRCLSAGCDGLLGSGALEDRCGRCGGANDSCLFVQRVFRDAGAFAGYWNVTLIPEGARHIRVEHRSRNHLALMGGDGRYVLNGHWVVSPPGTYEAAGTHVVYTRDTGPQETLQAAGPTSHDLLLQVLLQEPNPGIEFEFWLPRERYSPFQARVQALGWPLRQPQPRGVEPQPPAAPAVTPAQTPTLAPDPCPPCPDTRGRAHRLLHYCGSDFVFQARVLGHHHQAQETRYEVRIQLVYKNRSPLRAREYVWAPGHCPCPMLAPHRDYLMAVQRLVSPDGTQDQLLLPHAGYARPWSPAEDSRIRLTARRCPG

SEQ ID NO: 19239 - protein, 202 aa, Homo sapiens
MASQGRRRRPLRRPETVVPGEATETDSERSASSSEEEELYLGPSGPTRGRPTGLRVAGEAAETDSEPEPEPEPTAAPRDLPPLVVQRESAEEAWGTEEAPAPAPARSLLQLRLAESQARLDHDVAAAVSGVYRRAGRDVAALASRLAAAQAAGLAAAHSVRLARGDLCALAERLDIVAGCRLLPDIRGVPGTEPEKDPGPRA

SEQ ID NO: 19240 - protein, 780 aa, Homo sapiens
MKPGATGESDLAEVLPQHKFDSKSLEAYLNQHLSGFGAEREATLTIAQYRAGKSNPTFYLQKGFQTYVLRKKPPGSLLPKAHQIDREFKVQKALFSIGFPVPKPILYCSDTSVIGTEFYVMEHVQGRIFRDLTIPGLSPAERSAIYVATVETLAQLHSLNIQSLQLEGYGIGAGYCKRQVSTWTKQYQAAAHQDIPAMQQLSEWLMKNLPDNDNEENLIHGDFRLDNIVFHPKECRVIAVLDWELSTIGHPLSDLAHFSLFYFWPRTVPMINQGSYSENSGIPSMEELISIYCRCRGINSILPNWNFFLALSYFKMAGIAQGVYSRYLLGNNSSEDSFLFANIVQPLAETGLQLSKRTFSTVLPQIDTTGQLFVQTRKGQEVLIKVKHFMKQHILPAEKEVTEFYVQNENSVDKWGKPLVIDKLKEMAKVEGLWNLFLPAVSGLSHVDYALIAEETGKCFFAPDVFNCQAPDTGNMEVLHLYGSEEQKKQWLEPLLQGNITSCFCMTEPDVASSDATNIECSIQRDEDSYVINGKKWWSSGAGNPKCKIAIVLGRTQNTSLSRHKQHSMILVPMNTPGVKIIRPLSVFGYTDNFHGGHFEIHFNQVRVPATNLILGEGRGFEISQGRLGPGRIHHCMRTVGLAERALQIMCERATQRIAFKKKLYAHEVVAHWIAESRIAIEKIRLLTLKAAHSMDTLGSAGAKKEIAMIKVAAPRAVSKIVDWAIQVCGGAGVSQDYPLANMYAITRVLRLADGPDEVHLSAIATMELRDQAKRLTAKI

SEQ ID NO: 19241 - protein, 676 aa, Homo sapiens
MKPGATGESDLAEVLPQHKFDSKSLEAYLNQHLSGFGAEREATLTIAQYRAGKSNPTFYLQKGFQTYVLRKKPPGSLLPKAHQIDREFKVQKALFSIGFPVPKPILYCSDTSVIGTEFYVMEHVQGRIFRDLTIPGLSPAERSAIYVATVETLAQLHSLNIQSLQLEGYGIGAGYCKRQVSTWTKQYQAAAHQDIPAMQQLSEWLMKNLPDNDNEENLIHGDFRLDNIVFHPKECRVIAVLDWELSTIGHPLSDLAHFSLFYFWPRTVPMINQGSYSENSGIPSMEELISIYCRCRGINSILPNWNFFLALSYFKMAGIAQGVYSRYLLGNNSSEDSFLFANIVQPLAETGLQLSKRTFSTVLPQIDTTGQLFVQTRKGQEVLIKVKHFMKQHILPAEKEVTEFYVQNENSVDKWGKPLVIDKLKEMAKVEGLWNLFLPAVSGLSHVDYALIAEETGKCFFAPDVFNCQAPDTGNMEVLHLYGSEEQKKQWLEPLLQGNITSCFCMTEPDVASSDATNIECSIQRDEDSYVINGKKWWSSGAGNPKCKIAIVLGRTQNTSLSREVVAHWIAESRIAIEKIRLLTLKAAHSMDTLGSAGAKKEIAMIKVAAPRAVSKIVDWAIQVCGGAGVSQDYPLANMYAITRVLRLADGPDEVHLSAIATMELRDQAKRLTAKI

SEQ ID NO: 19242 - protein, 660 aa, Homo sapiens
MEHVQGRIFRDLTIPGLSPAERSAIYVATVETLAQLHSLNIQSLQLEGYGIGAGYCKRQVSTWTKQYQAAAHQDIPAMQQLSEWLMKNLPDNDNEENLIHGDFRLDNIVFHPKECRVIAVLDWELSTIGHPLSDLAHFSLFYFWPRTVPMINQGSYSENSGIPSMEELISIYCRCRGINSILPNWNFFLALSYFKMAGIAQGVYSRYLLGNNSSEDSFLFANIVQPLAETGLQLSKRTFSTVLPQIDTTGQLFVQTRKGQEVLIKVKHFMKQHILPAEKEVTEFYVQNENSVDKWGKPLVIDKLKEMAKVEGLWNLFLPAVSGLSHVDYALIAEETGKCFFAPDVFNCQAPDTGNMEVLHLYGSEEQKKQWLEPLLQGNITSCFCMTEPDVASSDATNIECSIQRDEDSYVINGKKWWSSGAGNPKCKIAIVLGRTQNTSLSRHKQHSMILVPMNTPGVKIIRPLSVFGYTDNFHGGHFEIHFNQVRVPATNLILGEGRGFEISQGRLGPGRIHHCMRTVGLAERALQIMCERATQRIAFKKKLYAHEVVAHWIAESRIAIEKIRLLTLKAAHSMDTLGSAGAKKEIAMIKVAAPRAVSKIVDWAIQVCGGAGVSQDYPLANMYAITRVLRLADGPDEVHLSAIATMELRDQAKRLTAKI

SEQ ID NO: 19243 - protein, 1617 aa, Homo sapiens
MNMKQKSVYQQTKALLCKNFLKKWRMKRESLLEWGLSILLGLCIALFSSSMRNVQFPGMAPQNLGRVDKFNSSSLMVVYTPISNLTQQIMNKTALAPLLKGTSVIGAPNKTHMDEILLENLPYAMGIIFNETFSYKLIFFQGYNSPLWKEDFSAHCWDGYGEFSCTLTKYWNRGFVALQTAINTAIIEITTNHPVMEELMSVTAITMKTLPFITKNLLHNEMFILFFLLHFSPLVYFISLNVTKERKKSKNLMKMMGLQDSAFWLSWGLIYAGFIFIISIFVTIIITFTQIIVMTGFMVIFILFFLYGLSLVALVFLMSVLLKKAVLTNLVVFLLTLFWGCLGFTVFYEQLPSSLEWILNICSPFAFTTGMIQIIKLDYNLNGVIFPDPSGDSYTMIATFSMLLLDGLIYLLLALYFDKILPYGDERHYSPLFFLNSSSCFQHQRTNAKVIEKEIDAEHPSDDYFEPVAPEFQGKEAIRIRNVKKEYKGKSGKVEALKGLLFDIYEGQITAILGHSGAGKSSLLNILNGLSVPTEGSVTIYNKNLSEMQDLEEIRKITGVCPQFNVQFDILTVKENLSLFAKIKGIHLKEVEQEVQRILLELDMQNIQDNLAKHLSEGQKRKLTFGITILGDPQILLLDEPTTGLDPFSRDQVWSLLRERRADHVILFSTQSMDEADILADRKVIMSNGRLKCAGSSMFLKRRWGLGYHLSLHRNEICNPEQITSFITHHIPDAKLKTENKEKLVYTLPLERTNTFPDLFSDLDKCSDQGVTGYDISMSTLNEVFMKLEGQSTIEQDFEQVEMIRDSESLNEMELAHSSFSEMQTAVSDMGLWRMQVFAMARLRFLKLKRQTKVLLTLLLVFGIAIFPLIVENIMYAMLNEKIDWEFKNELYFLSPGQLPQEPRTSLLIINNTESNIEDFIKSLKHQNILLEVDDFENRNGTDGLSYNGAIIVSGKQKDYRFSVVCNTKRLHCFPILMNIISNGLLQMFNHTQHIRIESSPFPLSHIGLWTGLPDGSFFLFLVLCSISPYITMGSISDYKKNAKSQLWISGLYTSAYWCGQALVDVSFFILILLLMYLIFYIENMQYLLITSQIVFALVIVTPGYAASLVFFIYMISFIFRKRRKNSGLWSFYFFFASTIMFSITLINHFDLSILITTMVLVPSYTLLGFKTFLEVRDQEHYREFPEANFELSATDFLVCFIPYFQTLLFVFVLRCMELKCGKKRMRKDPVFRISPQSRDAKPNPEEPIDEDEDIQTERIRTATALTTSILDEKPVIIASCLHKEYAGQKKSCFSKRKKKIAARNISFCVQEGEILGLLGPNGAGKSSSIRMISGITKPTAGEVELKGCSSVLGHLGYCPQENVLWPMLTLREHLEVYAAVKGLRKADARLAIARLVSAFKLHEQLNVPVQKLTAGITRKLCFVLSLLGNSPVLLLDEPSTGIDPTGQQQMWQAIQAVVKNTERGVLLTTHNLAEAEALCDRVAIMVSGRLRCIGSIQHLKNKLGKDYILELKVKETSQVTLVHTEILKLFPQAAGQERYSSLLTYKLPVADVYPLSQTFHKLEAVKHNFNLEEYSLSQCTLEKVFLELSKEQEVGNFDEEIDTTMRWKLLPHSDEP

SEQ ID NO: 19244 - protein, 637 aa, Homo sapiens
MNMKQKSVYQQTKALLCKNFLKKWRMKRESLLEWGLSILLGLCIALFSSSMRNVQFPGMAPQNLGRVDKFNSSSLMVVYTPISNLTQQIMNKTALAPLLKGTSVIGAPNKTHMDEILLENLPYAMGIIFNETFSYKLIFFQGYNSPLWKEDFSAHCWDGYGEFSCTLTKYWNRGFVALQTAINTAIIEITTNHPVMEELMSVTAITMKTLPFITKNLLHNEMFILFFLLHFSPLVYFISLNVTKERKKSKNLMKMMGLQDSAFWLSWGLIYAGFIFIISIFVTIIITFTQIIVMTGFMVIFILFFLYGLSLVALVFLMSVLLKKAVLTNLVVFLLTLFWGCLGFTVFYEQLPSSLEWILNICSPFAFTTGMIQIIKLDYNLNGVIFPDPSGDSYTMIATFSMLLLDGLIYLLLALYFDKILPYGDERHYSPLFFLNSSSCFQHQRTNAKVIEKEIDAEHPSDDYFEPVAPEFQGKEAIRIRNVKKEYKGKSGKVEALKGLLFDIYEGQITAILGHSGAGKSSLLNILNGLSVPTEGSVTIYNKNLSEMQDLEEIRKITGVCPQFNVQFDILTVKENLSLFAKIKGIHLKEVEQEVQRILLELDMQNIQDNLAKHLSEGQKRKLTFGITILGDPQIEK

SEQ ID NO: 19245 - protein, 185 aa, Homo sapiens
MNMKQKSVYQQTKALLCKNFLKKWRMKRESLLEWGLSILLGLCIALFSSSMRNVQFPGMAPQNLGRVDKFNSSSLMVVYTPISNLTQQIMNKTALAPLLKGTSVIGAPNKTHMDEILLENLPYAMGIIFNETFSYKLIFFQGYNSPLWKEDFSGDFPYQISLWNFSCFQHKEQRRLGNRDAFNDT

SEQ ID NO: 19246 - protein, 118 aa, Homo sapiens
MSGGSSCSQTPSRAIPATRRVVLGDGVQLPPGDYSTTPGGTLFSTTPGGTRIIYDRKFLMECRNSPVTKTPPRDLPTIPGVTSPSSDEPPMEASQSHLRNSPEDKRAGGEESQFEMDI

SEQ ID NO: 19247 - protein, 217 aa, Homo sapiens
MEGSFSDGGALPEGLAEEAEPQGAAWSGDSGTVSQSHSSASGPWEDEGAEDGAPGRDLPLLRRAAAGYAACLLPGAGARPEVEALDASLEDLLTRVDEFVGMLDMLRGDSSHVVSEGVPRIHAKAAEMRRIYSRIDRLEAFVRMVGGRVARMEEQVTKAEAELGTFPRAFKKLLHTMNVPSLFSKSAPSRPQQAGYEAPVLFRTEDYFPCCSERPQL

SEQ ID NO: 19248 - protein, 409 aa, Homo sapiens
MQRLAMDLRMLSRELSLYLEHQVRVGFFGSGVGLSLILGFSVAYAFYYLSSIAKKPQLVTGGESFSRFLQDHCPVVTETYYPTVWCWEGRGQTLLRPFITSKPPVQYRNELIKTADGGQISLDWFDNDNSTCYMDASTRPTILLLPGLTGTSKESYILHMIHLSEELGYRCVVFNNRGVAGENLLTPRTYCCANTEDLETVIHHVHSLYPSAPFLAAGVSMGGMLLLNYLGKIGSKTPLMAAATFSVGWNTFACSESLEKPLNWLLFNYYLTTCLQSSVNKHRHMFVKQVDMDHVMKAKSIREFDKRFTSVMFGYQTIDDYYTDASPSPRLKSVGIPVLCLNSVDDVFSPSHAIPIETAKQNPNVALVLTSYGGHIGFLEGIWPRQSTYMDRVFKQFVQAMVEHGHELS

SEQ ID NO: 19249 - protein, 136 aa, Homo sapiens
MQRLAMDLRMLSRELSLYLEHQVRVGFFGSGVGLSLILGFSVAYAFYYLSSIAKKRTTRRSGAGRVEDRPCLDLSSLRSPRCSTGMNLLKLQMEDRFHWTGLIMITVRVIWMPAPDLLSYCCLASREQARSHISFI

SEQ ID NO: 19250 - protein, 172 aa, Homo sapiens
MTSASTKVGEIFSAAGAAFTKLGELTMQLHPVADSSPAGAKWTETEIEMLRAAVKRFGDDLNHISCVIKERTVAQIKATVKRKVYEDSGIPLPAESPKKGPKKVASGVLSPPPAAPPPSSSSVPEAGGPPIKKQKADVTLSALNDSDANSDVVDIEGLGETPPAKKLNFDQA

SEQ ID NO: 19251 - protein, 138 aa, Homo sapiens
MTSASTKVGEIFSAAGAAFTKLGELTMQLHPVADSSPAGAQIKATVKRKVYEDSGIPLPAESPKKGPKKVASGVLSPPPAAPPPSSSSVPEAGGPPIKKQKADVTLSALNDSDANSDVVDIEGLGETPPAKKLNFDQA

SEQ ID NO: 19252 - protein, 192 aa, Homo sapiens
MTSASTKVGEIFSAAGAAFTKLGELTMQLHPVADSSPAGAKWTETEIEMLRAAVKRFGDDLNHISCVIKERTVAQIKATVKRKVYEDSGIPLPAESPKKGPKKVASGVLSPPPAAPPPSSSSVPEAGGPPIKKQKADVTLSALNDSDANSDVVDIEGLGETPPAKKLNFDQDSLTLDSGLLMTSADPPLLSC

SEQ ID NO: 19253 - protein, 120 aa, Homo sapiens
MSSSAGSGHQPSQSRAIPTRTVAISDAAQLPHDYCTTPGGTLFSTTPGGTRIIYDRKFLLDRRNSPMAQTPPCHLPNIPGVTSPGTLIEDSKVEVNNLNNLNNHDRKHAVGDDAQFEMDI

SEQ ID NO: 19254 - protein, 1624 aa, Homo sapiens
MSKRRMSVGQQTWALLCKNCLKKWRMKRQTLLEWLFSFLLVLFLYLFFSNLHQVHDTPQMSSMDLGRVDSFNDTNYVIAFAPESKTTQEIMNKVASAPFLKGRTIMGWPDEKSMDELDLNYSIDAVRVIFTDTFSYHLKFSWGHRIPMMKEHRDHSAHCQAVNEKMKCEGSEFWEKGFVAFQAAINAAIIEIATNHSVMEQLMSVTGVHMKILPFVAQGGVATDFFIFFCIISFSTFIYYVSVNVTQERQYITSLMTMMGLRESAFWLSWGLMYAGFILIMATLMALIVKSAQIVVLTGFVMVFTLFLLYGLSLITLAFLMSVLIKKPFLTGLVVFLLIVFWGILGFPALYTRLPAFLEWTLCLLSPFAFTVGMAQLIHLDYDVNSNAHLDSSQNPYLIIATLFMLVFDTLLYLVLTLYFDKILPAEYGHRCSPLFFLKSCFWFQHGRANHVVLENETDSDPTPNDCFEPVSPEFCGKEAIRIKNLKKEYAGKCERVEALKGVVFDIYEGQITALLGHSGAGKTTLLNILSGLSVPTSGSVTVYNHTLSRMADIENISKFTGFCPQSNVQFGFLTVKENLRLFAKIKGILPHEVEKEVQRVVQELEMENIQDILAQNLSGGQNRKLTFGIAILGDPQVLLLDEPTAGLDPLSRHRIWNLLKEGKSDRVILFSTQFIDEADILADRKVFISNGKLKCAGSSLFLKKKWGIGYHLSLHLNERCDPESITSLVKQHISDAKLTAQSEEKLVYILPLERTNKFPELYRDLDRCSNQGIEDYGVSITTLNEVFLKLEGKSTIDESDIGIWGQLQTDGAKDIGSLVELEQVLSSFHETRKTISGVALWRQQVCAIAKVRFLKLKKERKSLWTILLLFGISFIPQLLEHLFYESYQKSYPWELSPNTYFLSPGQQPQDPLTHLLVINKTGSTIDNFLHSLRRQNIAIEVDAFGTRNGTDDPSYNGAIIVSGDEKDHRFSIACNTKRLNCFPVLLDVISNGLLGIFNSSEHIQTDRSTFFEEHMDYEYGYRSNTFFWIPMAASFTPYIAMSSIGDYKKKAHSQLRISGLYPSAYWFGQALVDVSLYFLILLLMQIMDYIFSPEEIIFIIQNLLIQILCSIGYVSSLVFLTYVISFIFRNGRKNSGIWSFFFLIVVIFSIVATDLNEYGFLGLFFGTMLIPPFTLIGSLFIFSEISPDSMDYLGASESEIVYLALLIPYLHFLIFLFILRCLEMNCRKKLMRKDPVFRISPRSNAIFPNPEEPEGEEEDIQMERMRTVNAMAVRDFDETPVIIASCLRKEYAGKKKNCFSKRKKKIATRNVSFCVKKGEVIGLLGHNGAGKSTTIKMITGDTKPTAGQVILKGSGGGEPLGFLGYCPQENALWPNLTVRQHLEVYAAVKGLRKGDAMIAITRLVDALKLQDQLKAPVKTLSEGIKRKLCFVLSILGNPSVVLLDEPSTGMDPEGQQQMWQVIRATFRNTERGALLTTHYMAEAEAVCDRVAIMVSGRLRCIGSIQHLKSKFGKDYLLEMKLKNLAQMEPLHAEILRLFPQAAQQERFSSLMVYKLPVEDVRPLSQAFFKLEIVKQSFDLEEYSLSQSTLEQVFLELSKEQELGDLEEDFDPSVKWKLLLQEEP

SEQ ID NO: 19255 - protein, 266 aa, Homo sapiens
MSKRRMSVGQQTWALLCKNCLKKWRMKRQTLLEWLFSFLLVLFLYLFFSNLHQVHDTPQMSSMDLGRVDSFNDTNYVIAFAPESKTTQEIMNKVASAPFLKGRTIMGWPDEKSMDELDLNYSIDAVRVIFTDTFSYHLKFSWGHRIPMMKEHRDHSAHCQAVNEKMKCEGSEFWEKGFVAFQAAINAAIIEIATNHSVMEQLMSVTGVHMKILPFVAQGGVATDFFIFFCIISFSTFIYYVSVNVTQERQYITSLMTMMGLRESAF

SEQ ID NO: 19256 - protein, 1440 aa, Homo sapiens
MSKRRMSVGQQTWALLCKNCLKKWRMKRQTLLEWLFSFLLVLFLYLFFSNLHQVHDTPQMSSMDLGRVDSFNDTNYVIAFAPESKTTQEIMNKVASAPFLKGRTIMGWPDEKSMDELDLNYSIDAVRVIFTDTFSYHLKFSWGHRIPMMKEHRDHSAHCQAVNEKMKCEGSEFWEKGFVAFQAAINAAIIEIATNHSVMEQLMSVTGVHMKILPFVAQGGVATDFFIFFCIISFSTFIYYVSVNVTQERQYITSLMTMMGLRESAFWLSWGLMYAGFILIMATLMALIVKSAQIVVLTGFVMVFTLFLLYGLSLITLAFLMSVLIKKPFLTGLVVFLLIVFWGILGFPALYTRLPAFLEWTLCLLSPFAFTVGMAQLIHLDYDVNSNAHLDSSQNPYLIIATLFMLVFDTLLYLVLTLYFDKILPAEYGHRCSPLFFLKSCFWFQHGRANHVVLENETDSDPTPNDCFEPVSPEFCGKEAIRIKNLKKEYAGKCERVEALKGVVFDIYEGQITALLGHSGAGKTTLLNILSGLSVPTSGSVTVYNHTLSRMADIENISKFTGFCPQSNVQFGFLTVKENLRLFAKIKGILPHEVEKEVQRVVQELEMENIQDILAQNLSGGQNRKLTFGIAILGDPQVLLLDEPTAGLDPLSRHRIWNLLKEGKSDRVILFSTQFIDEADILADRKVFISNGKLKCAGSSLFLKKKWGIGYHLSLHLNERCDPESITSLVKQHISDAKLTAQSEEKLVYILPLERTNKFPELYRDLDRCSNQGIEDYGVSITTLNEVFLKLEGKSTIDESDIGIWGQLQTDGAKDIGSLVELEQVLSSFHETRKTISGVALWRQQVCAIAKVRFLKLKKERKSLWTILLLFGISFIPQLLEHLFYESYQKSYPWELSPNTYFLSPGQQPQDPLTHLLVINKTGSTIDNFLHSLRRQNIAIEVDAFGTRNGTDDPSYNGAIIVSGDEKDHRFSIACNTKRLNCFPVLLDVISNGLLGIFNSSEHIQTDRSTFFEEHMDYEYGYRSNTFFWIPMAASFTPYIAMSSIGDYKKKAHSQLRISGLYPSAYWFGQALVDVSLYFLILLLMQIMDYIFSPEEIIFIIQNLLIQILCSIGYVSSLVFLTYVISFIFRNGRKNSGIWSFFFLIVVIFSIVATDLNEYGFLGLFFGTMLIPPFTLIGSLFIFSEISPDSMDYLGASESEIVYLALLIPYLHFLIFLFILRCLEMNCRKKLMRKDPVFRISPRSNAIFPNPEEPEGEEEDIQMERMRTVNAMAVRDFDETPVIIASCLRKEYAGKKKNCFSKRKKKIATRNVSFCVKKGEVIGLLGHNGAGKSTTIKMITGDTKPTAGQVILKGSGGGEPLGFLGYCPQENALWPNLTVRQHLEVYAAVKGLRKGDAMIAITRLVDALKLQDQLKAPVKTLSEGIKRKVRAGLVVALQVP

SEQ ID NO: 19257 - protein, 1435 aa, Homo sapiens
MSKRRMSVGQQTWALLCKNCLKKWRMKRQTLLEWLFSFLLVLFLYLFFSNLHQVHDTPQMSSMDLGRVDSFNDTNYVIAFAPESKTTQEIMNKVASAPFLKGRTIMGWPDEKSMDELDLNYSIDAVRVIFTDTFSYHLKFSWGHRIPMMKEHRDHSAHCQAVNEKMKCEGSEFWEKGFVAFQAAINAAIIEIATNHSVMEQLMSVTGVHMKILPFVAQGGVATDFFIFFCIISFSTFIYYVSVNVTQERQYITSLMTMMGLRESAFWLSWGLMYAGFILIMATLMALIVKSAQIVVLTGFVMVFTLFLLYGLSLITLAFLMSVLIKKPFLTGLVVFLLIVFWGILGFPALYTRLPAFLEWTLCLLSPFAFTVGMAQLIHLDYDVNSNAHLDSSQNPYLIIATLFMLVFDTLLYLVLTLYFDKILPAEYGHRCSPLFFLKSCFWFQHGRANHVVLENETDSDPTPNDCFEPVSPEFCGKEAIRIKNLKKEYAGKCERVEALKGVVFDIYEGQITALLGHSGAGKTTLLNILSGLSVPTSGSVTVYNHTLSRMADIENISKFTGFCPQSNVQFGFLTVKENLRLFAKIKGILPHEVEKEVQRVVQELEMENIQDILAQNLSGGQNRKLTFGIAILGDPQVLLLDEPTAGLDPLSRHRIWNLLKEGKSDRVILFSTQFIDEADILADRKVFISNGKLKCAGSSLFLKKKWGIGYHLSLHLNERCDPESITSLVKQHISDAKLTAQSEEKLVYILPLERTNKFPELYRDLDRCSNQGIEDYGVSITTLNEVFLKLEGKSTIDESDIGIWGQLQTDGAKDIGSLVELEQVLSSFHETRKTISGVALWRQQVCAIAKVRFLKLKKERKSLWTILLLFGISFIPQLLEHLFYESYQKSYPWELSPNTYFLSPGQQPQDPLTHLLVINKTGSTIDNFLHSLRRQNIAIEVDAFGTRNGTDDPSYNGAIIVSGDEKDHRFSIACNTKRLNCFPVLLDVISNGLLGIFNSSEHIQTDRSTFFEEHMDYEYGYRSNTFFWIPMAASFTPYIAMSSIGDYKKKAHSQLRISGLYPSAYWFGQALVDVSLYFLILLLMQIMDYIFSPEEIIFIIQNLLIQILCSIGYVSSLVFLTYVISFIFRNGRKNSGIWSFFFLIVVIFSIVATDLNEYGFLGLFFGTMLIPPFTLIGSLFIFSEISPDSMDYLGASESEIVYLALLIPYLHFLIFLFILRCLEMNCRKKLMRKDPVFRISPRSNAIFPNPEEPEGEEEDIQMERMRTVNAMAVRDFDETPVIIASCLRKEYAGKKKNCFSKRKKKIATRNVSFCVKKGEVIGLLGHNGAGKSTTIKMITGDTKPTAGQVILKGSGGGEPLGFLGYCPQENALWPNLTVRQHLEVYAAVKGLRKGDAMIAITRLVDALKLQDQLKAPVKTLSEGIKRKAGDSGHL

SEQ ID NO: 19258 - protein, 267 aa, Homo sapiens
MSKRRMSVGQQTWALLCKNCLKKWRMKRQTLLEWLFSFLLVLFLYLFFSNLHQVHDTPQMSSMDLGRVDSFNDTNYVIAFAPESKTTQEIMNKVASAPFLKGRTIMGWPDEKSMDELDLNYSIDAVRVIFTDTFSYHLKFSWGHRIPMMKEHRDHSAHCQAVNEKMKCEGSEFWEKGFVAFQAAINAAIIEIATNHSVMEQLMSVTGVHMKILPFVAQGGVATDFFIFFCIISFSTFIYYVSVNVTQERQYITSLMTMMGLRESAFW

SEQ ID NO: 19259 - protein, 1101 aa, Homo sapiens
MSAKAISEQTGKELLYKFICTTSAIQNRFKYARVTPDTDWARLLQDHPWLLSQNLVVKPDQLIKRRGKLGLVGVNLTLDGVKSWLKPRLGQEATVGKATGFLKNFLIEPFVPHSQAEEFYVCIYATREGDYVLFHHEGGVDVGDVDAKAQKLLVGVDEKLNPEDIKKHLLVHAPEDKKEILASFISGLFNFYEDLYFTYLEINPLVVTKDGVYVLDLAAKVDATADYICKVKWGDIEFPPPFGREAYPEEAYIADLDAKSGASLKLTLLNPKGRIWTMVAGGGASVVYSDTICDLGGVNELANYGEYSGAPSEQQTYDYAKTILSLMTREKHPDGKILIIGGSIANFTNVAATFKGIVRAIRDYQGPLKEHEVTIFVRRGGPNYQEGLRVMGEVGKTTGIPIHVFGTETHMTAIVGMALGHRPIPNQPPTAAHTANFLLNASGSTSTPAPSRTASFSESRADEVAPAKKAKPAMPQDSVPSPRSLQGKSTTLFSRHTKAIVWGMQTRAVQGMLDFDYVCSRDEPSVAAMVYPFTGDHKQKFYWGHKEILIPVFKNMADAMRKHPEVDVLINFASLRSAYDSTMETMNYAQIRTIAIIAEGIPEALTRKLIKKADQKGVTIIGPATVGGIKPGCFKIGNTGGMLDNILASKLYRPGSVAYVSRSGGMSNELNNIISRTTDGVYEGVAIGGDRYPGSTFMDHVLRYQDTPGVKMIVVLGEIGGTEEYKICRGIKEGRLTKPIVCWCIGTCATMFSSEVQFGHAGACANQASETAVAKNQALKEAGVFVPRSFDELGEIIQSVYEDLVANGVIVPAQEVPPPTVPMDYSWARELGLIRKPASFMTSICDERGQELIYAGMPITEVFKEEMGIGGVLGLLWFQKRLPKYSCQFIEMCLMVTADHGPAVSGAHNTIICARAGKDLVSSLTSGLLTIGDRFGGALDAAAKMFSKAFDSGIIPMEFVNKMKKEGKLIMGIGHRVKSINNPDMRVQILKDYVRQHFPATPLLDYALEVEKITTSKKPNLILNVDGLIGVAFVDMLRNCGSFTREEADEYIDIGALNGIFVLGRSMGFIGHYLDQKRLKQGLYRHPWDDISYVLPEHMSM

SEQ ID NO: 19260 - protein, 1091 aa, Homo sapiens
MSAKAISEQTGKELLYKFICTTSAIQNRFKYARVTPDTDWARLLQDHPWLLSQNLVVKPDQLIKRRGKLGLVGVNLTLDGVKSWLKPRLGQEATVGKATGFLKNFLIEPFVPHSQAEEFYVCIYATREGDYVLFHHEGGVDVGDVDAKAQKLLVGVDEKLNPEDIKKHLLVHAPEDKKEILASFISGLFNFYEDLYFTYLEINPLVVTKDGVYVLDLAAKVDATADYICKVKWGDIEFPPPFGREAYPEEAYIADLDAKSGASLKLTLLNPKGRIWTMVAGGGASVVYSDTICDLGGVNELANYGEYSGAPSEQQTYDYAKTILSLMTREKHPDGKILIIGGSIANFTNVAATFKGIVRAIRDYQGPLKEHEVTIFVRRGGPNYQEGLRVMGEVGKTTGIPIHVFGTETHMTAIVGMALGHRPIPNQPPTAAHTANFLLNASGSTSTPAPSRTASFSESRADEVAPAKKAKPAMPQGKSTTLFSRHTKAIVWGMQTRAVQGMLDFDYVCSRDEPSVAAMVYPFTGDHKQKFYWGHKEILIPVFKNMADAMRKHPEVDVLINFASLRSAYDSTMETMNYAQIRTIAIIAEGIPEALTRKLIKKADQKGVTIIGPATVGGIKPGCFKIGNTGGMLDNILASKLYRPGSVAYVSRSGGMSNELNNIISRTTDGVYEGVAIGGDRYPGSTFMDHVLRYQDTPGVKMIVVLGEIGGTEEYKICRGIKEGRLTKPIVCWCIGTCATMFSSEVQFGHAGACANQASETAVAKNQALKEAGVFVPRSFDELGEIIQSVYEDLVANGVIVPAQEVPPPTVPMDYSWARELGLIRKPASFMTSICDERGQELIYAGMPITEVFKEEMGIGGVLGLLWFQKRLPKYSCQFIEMCLMVTADHGPAVSGAHNTIICARAGKDLVSSLTSGLLTIGDRFGGALDAAAKMFSKAFDSGIIPMEFVNKMKKEGKLIMGIGHRVKSINNPDMRVQILKDYVRQHFPATPLLDYALEVEKITTSKKPNLILNVDGLIGVAFVDMLRNCGSFTREEADEYIDIGALNGIFVLGRSMGFIGHYLDQKRLKQGLYRHPWDDISYVLPEHMSM

SEQ ID NO: 19261 - protein, 830 aa, Homo sapiens
MSAKAISEQTGKELLYKFICTTSAIQNRFKYARVTPDTDWARLLQDHPWLLSQNLVVKPDQLIKRRGKLGLVGVNLTLDGVKSWLKPRLGQEATGIVRAIRDYQGPLKEHEVTIFVRRGGPNYQEGLRVMGEVGKTTGIPIHVFGTETHMTAIVGMALGHRPIPNQPPTAAHTANFLLNASGSTSTPAPSRTASFSESRADEVAPAKKAKPAMPQGKSTTLFSRHTKAIVWGMQTRAVQGMLDFDYVCSRDEPSVAAMVYPFTGDHKQKFYWGHKEILIPVFKNMADAMRKHPEVDVLINFASLRSAYDSTMETMNYAQIRTIAIIAEGIPEALTRKLIKKADQKGVTIIGPATVGGIKPGCFKIGNTGGMLDNILASKLYRPGSVAYVSRSGGMSNELNNIISRTTDGVYEGVAIGGDRYPGSTFMDHVLRYQDTPGVKMIVVLGEIGGTEEYKICRGIKEGRLTKPIVCWCIGTCATMFSSEVQFGHAGACANQASETAVAKNQALKEAGVFVPRSFDELGEIIQSVYEDLVANGVIVPAQEVPPPTVPMDYSWARELGLIRKPASFMTSICDERGQELIYAGMPITEVFKEEMGIGGVLGLLWFQKRLPKYSCQFIEMCLMVTADHGPAVSGAHNTIICARAGKDLVSSLTSGLLTIGDRFGGALDAAAKMFSKAFDSGIIPMEFVNKMKKEGKLIMGIGHRVKSINNPDMRVQILKDYVRQHFPATPLLDYALEVEKITTSKKPNLILNVDGLIGVAFVDMLRNCGSFTREEADEYIDIGALNGIFVLGRSMGFIGHYLDQKRLKQGLYRHPWDDISYVLPEHMSM

SEQ ID NO: 19262 - protein, 594 aa, Homo sapiens
MESNHKSGDGLSGTQKEAALRALVQRTGYSLVQENGQRKYGGPPPGWDAAPPERGCEIFIGKLPRDLFEDELIPLCEKIGKIYEMRMMMDFNGNNRGYAFVTFSNKVEAKNAIKQLNNYEIRNGRLLGVCASVDNCRLFVGGIPKTKKREEILSEMKKVTEGVVDVIVYPSAADKTKNRGFAFVEYESHRAAAMARRKLLPGRIQLWGHGIAVDWAEPEVEVDEDTMSSVKILYVRNLMLSTSEEMIEKEFNNIKPGAVERVKKIRDYAFVHFSNREDAVEAMKALNGKVLDGSPIEVTLAKPVDKDSYVRYTRGTGGRGTMLQGEYTYSLGQVYDPTTTYLGAPVFYAPQTYAAIPSLHFPATKGHLSNRAIIRAPSVREIYMNVPVGAAGVRGLGGRGYLAYTGLGRGYQVKGDKREDKLYDILPGMELTPMNPVTLKPQGIKLAPQILEEICQKNNWGQPVYQLHSAIGQDQRQLFLYKITIPALASQNPAIHPFTPPKLSAFVDEAKTYAAEYTLQTLGIPTDGGDGTMATAAAAATAFPGYAVPNATAPVSAAQLKQAVTLGQDLAAYTTYEVYPTFAVTARGDGYGTF

SEQ ID NO: 19263 - protein, 586 aa, Homo sapiens
MESNHKSGDGLSGTQKEAALRALVQRTGYSLVQENGQRKYGGPPPGWDAAPPERGCEIFIGKLPRDLFEDELIPLCEKIGKIYEMRMMMDFNGNNRGYAFVTFSNKVEAKNAIKQLNNYEIRNGRLLGVCASVDNCRLFVGGIPKTKKREEILSEMKKVTEGVVDVIVYPSAADKTKNRGFAFVEYESHRAAAMARRKLLPGRIQLWGHGIAVDWAEPEVEVDEDTMSSVKILYVRNLMLSTSEEMIEKEFNNIKPGAVERVKKIRDYAFVHFSNREDAVEAMKALNGKVLDGSPIEVTLAKPVDKDSYVRYTRGTGGRGTMLQGEYTYSLGQVYDPTTTYLGAPVFYAPQTYAAIPSLHFPATKGHLSNRAIIRAPSVRGAAGVRGLGGRGYLAYTGLGRGYQVKGDKREDKLYDILPGMELTPMNPVTLKPQGIKLAPQILEEICQKNNWGQPVYQLHSAIGQDQRQLFLYKITIPALASQNPAIHPFTPPKLSAFVDEAKTYAAEYTLQTLGIPTDGGDGTMATAAAAATAFPGYAVPNATAPVSAAQLKQAVTLGQDLAAYTTYEVYPTFAVTARGDGYGTF

SEQ ID NO: 19264 - protein, 569 aa, Homo sapiens
MLCSPSFCKLCWKRKKENGQRKYGGPPPGWDAAPPERGCEIFIGKLPRDLFEDELIPLCEKIGKIYEMRMMMDFNGNNRGYAFVTFSNKVEAKNAIKQLNNYEIRNGRLLGVCASVDNCRLFVGGIPKTKKREEILSEMKKVTEGVVDVIVYPSAADKTKNRGFAFVEYESHRAAAMARRKLLPGRIQLWGHGIAVDWAEPEVEVDEDTMSSVKILYVRNLMLSTSEEMIEKEFNNIKPGAVERVKKIRDYAFVHFSNREDAVEAMKALNGKVLDGSPIEVTLAKPVDKDSYVRYTRGTGGRGTMLQGEYTYSLGQVYDPTTTYLGAPVFYAPQTYAAIPSLHFPATKGHLSNRAIIRAPSVRGAAGVRGLGGRGYLAYTGLGRGYQVKGDKREDKLYDILPGMELTPMNPVTLKPQGIKLAPQILEEICQKNNWGQPVYQLHSAIGQDQRQLFLYKITIPALASQNPAIHPFTPPKLSAFVDEAKTYAAEYTLQTLGIPTDGGDGTMATAAAAATAFPGYAVPNATAPVSAAQLKQAVTLGQDLAAYTTYEVYPTFAVTARGDGYGTF

SEQ ID NO: 19265 - protein, 594 aa, Homo sapiens
MEAVCLGTCPEPEASMSTAIPGLKKGNNALQSIILQTLLEKENGQRKYGGPPPGWDAAPPERGCEIFIGKLPRDLFEDELIPLCEKIGKIYEMRMMMDFNGNNRGYAFVTFSNKVEAKNAIKQLNNYEIRNGRLLGVCASVDNCRLFVGGIPKTKKREEILSEMKKVTEGVVDVIVYPSAADKTKNRGFAFVEYESHRAAAMARRKLLPGRIQLWGHGIAVDWAEPEVEVDEDTMSSVKILYVRNLMLSTSEEMIEKEFNNIKPGAVERVKKIRDYAFVHFSNREDAVEAMKALNGKVLDGSPIEVTLAKPVDKDSYVRYTRGTGGRGTMLQGEYTYSLGQVYDPTTTYLGAPVFYAPQTYAAIPSLHFPATKGHLSNRAIIRAPSVRGAAGVRGLGGRGYLAYTGLGRGYQVKGDKREDKLYDILPGMELTPMNPVTLKPQGIKLAPQILEEICQKNNWGQPVYQLHSAIGQDQRQLFLYKITIPALASQNPAIHPFTPPKLSAFVDEAKTYAAEYTLQTLGIPTDGGDGTMATAAAAATAFPGYAVPNATAPVSAAQLKQAVTLGQDLAAYTTYEVYPTFAVTARGDGYGTF

SEQ ID NO: 19266 - protein, 510 aa, Homo sapiens
MRMMMDFNGNNRGYAFVTFSNKVEAKNAIKQLNNYEIRNGRLLGVCASVDNCRLFVGGIPKTKKREEILSEMKKVTEGVVDVIVYPSAADKTKNRGFAFVEYESHRAAAMARRKLLPGRIQLWGHGIAVDWAEPEVEVDEDTMSSVKILYVRNLMLSTSEEMIEKEFNNIKPGAVERVKKIRDYAFVHFSNREDAVEAMKALNGKVLDGSPIEVTLAKPVDKDSYVRYTRGTGGRGTMLQGEYTYSLGQVYDPTTTYLGAPVFYAPQTYAAIPSLHFPATKGHLSNRAIIRAPSVREIYMNVPVGAAGVRGLGGRGYLAYTGLGRGYQVKGDKREDKLYDILPGMELTPMNPVTLKPQGIKLAPQILEEICQKNNWGQPVYQLHSAIGQDQRQLFLYKITIPALASQNPAIHPFTPPKLSAFVDEAKTYAAEYTLQTLGIPTDGGDGTMATAAAAATAFPGYAVPNATAPVSAAQLKQAVTLGQDLAAYTTYEVYPTFAVTARGDGYGTF

SEQ ID NO: 19267 - protein, 539 aa, Homo sapiens
MESNHKSGDGLSGTQKEAALRALVQRTGYSLVQENGQRKYGGPPPGWDAAPPERGCEIFIGKLPRDLFEDELIPLCEKIGKIYEMRMMMDFNGNNRGYAFVTFSNKVEAKNAIKQLNNYEIRNGRLLGVCASVDNCRLFVGGIPKTKKREEILSEMKKVTEGVVDVIVYPSAADKTKNRGFAFVEYESHRAAAMARRKLLPGAVERVKKIRDYAFVHFSNREDAVEAMKALNGKVLDGSPIEVTLAKPVDKDSYVRYTRGTGGRGTMLQGEYTYSLGQVYDPTTTYLGAPVFYAPQTYAAIPSLHFPATKGHLSNRAIIRAPSVREIYMNVPVGAAGVRGLGGRGYLAYTGLGRGYQVKGDKREDKLYDILPGMELTPMNPVTLKPQGIKLAPQILEEICQKNNWGQPVYQLHSAIGQDQRQLFLYKITIPALASQNPAIHPFTPPKLSAFVDEAKTYAAEYTLQTLGIPTDGGDGTMATAAAAATAFPGYAVPNATAPVSAAQLKQAVTLGQDLAAYTTYEVYPTFAVTARGDGYGTF

SEQ ID NO: 19268 - protein, 5058 aa, Homo sapiens
MGHAGCQFKALLWKNWLCRLRNPVLFLAEFFWPCILFVILTVLRFQEPPRYRDICYLQPRDLPSCGVIPFVQSLLCNTGSRCRNFSYEGSMEHHFRLSRFQTAADPKKVNNLAFLKEIQDLAEEIHGMMDKAKNLKRLWVERSNTPDSSYGSSFFTMDLNKTEEVILKLESLHQQPHIWDFLLLLPRLHTSHDHVEDGMDVAVNLLQTILNSLISLEDLDWLPLNQTFSQVSELVLNVTISTLTFLQQHGVAVTEPVYHLSMQNIVWDPQKVQYDLKSQFGFDDLHTEQILNSSAELKEIPTDTSLEKMVCSVLSSTSEDEAEKWGHVGGCHPKWSEAKNYLVHAVSWLRVYQQVFVQWQQGSLLQKTLTGMGHSLEALRNQFEEESKPWKVVEALHTALLLLNDSLSADGPKDNHTFPKILQHLWKLQSLLQNLPQWPALKRFLQLDGALRNAIAQNLHFVQEVLICLETSANDFKWFELNQLKLEKDVFFWELKQMLAKNAVCPNGRFSEKEVFLPPGNSSIWGGLQGLLCYCNSSETSVLNKLLGSVEDADRILQEVITWHKNMSVLIPEEYLDWQELEMQLSEASLSCTRLFLLLGADPSPENDVFSSDCKHQLVSTVIFHTLEKTQFFLEQAYYWKAFKKFIRKTCEVAQYVNMQESFQNRLLAFPEESPCFEENMDWKMISDNYFQFLNNLLKSPTASISRALNFTKHLLMMEKKLHTLEDEQMNFLLSFVEFFEKLLLPNLFDSSIVPSFHSLPSLTEDILNISSLWTNHLKSLKRDPSATDAQKLLEFGNEVIWKMQTLGSHWIRKEPKNLLRFIELILFEINPKLLELWAYGISKGKRAKLENFFTLLNFSVPENEILSTSFNFSQLFHSDWPKSPAMNIDFVRLSEAIITSLHEFGFLEQEQISEALNTVYAIRNASDLFSALSEPQKQEVDKILTHIHLNVFQDKDSALLLQIYSSFYRYIYELLNIQSRGSSLTFLTQISKHILDIIKQFNFQNISKAFAFLFKTAEVLGGISNVSYCQQLLSIFNFLELQAQSFMSTEGQELEVIHTTLTGLKQLLIIDEDFRISLFQYMSQFFNSSVEDLLDNKCLISDNKHISSVNYSTSEESSFVFPLAQIFSNLSANVSVFNKFMSIHCTVSWLQMWTEIWETISQLFKFDMNVFTSLHHGFTQLLDELEDDVKVSKSCQGILPTHNVARLILNLFKNVTQANDFHNWEDFLDLRDFLVALGNALVSVKKLNLEQVEKSLFTMEAALHQLKTFPFNESTSREFLNSLLEVFIEFSSTSEYIVRNLDSINDFLSNNLTNYGEKFENIITELREAIVFLRNVSHDRDLFSCADIFQNVTECILEDGFLYVNTSQRMLRILDTLNSTFSSENTISSLKGCIVWLDVINHLYLLSNSSFSQGHLQNILGNFRDIENKMNSILKIVTWVLNIKKPLCSSNGSHINCVNIYLKDVTDFLNIVLTTVFEKEKKPKFEILLALLNDSTKQVRMSINNLTTDFDFASQSNWRYFTELILRPIEMSDEIPNQFQNIWLHLITLGKEFQKLVKGIYFNILENNSSSKTENLLNIFATSPKEKDVNSVGNSIYHLASYLAFSLSHDLQNSPKIIISPEIMKATGLGIQLIRDVFNSLMPVVHHTSPQNAGYMQALKKVTSVMRTLKKADIDLLVDQLEQVSVNLMDFFKNISSVGTGNLVVNLLVGLMEKFADSSHSWNVNHLLQLSRLFPKDVVDAVIDVYYVLPHAVRLLQGVPGKNITEGLKDVYSFTLLHGITISNITKEDFAIVIKILLDTIELVSDKPDIISEALACFPVVWCWNHTNSGFRQNSKIDPCNVHGLMSSSFYGKVASILDHFHLSPQGEDSPCSNESSRMEITRKVVCIIHELVDWNSILLELSEVFHVNISLVKTVQKFWHKILPFVPPSINQTRDSISELCPSGSIKQVALQIIEKLKNVNFTKVTSGENILDKLSSLNKILNINEDTETSVQNIISSNLERTVQLISEDWSLEKSTHNLLSLFMMLQNANVTGSSLEALSSFIEKSETPYNFEELWPKFQQIMKDLTQDFRIRHLLSEMNKGIKSINSMALQKITLQFAHFLEILDSPSLKTLEIIEDFLLVTKNWLQEYANEDYSRMIETLFIPVTNESSTEDIALLAKAIATFWGSLKNISRAGNFDVAFLTHLLNQEQLTNFSVVQLLFENILINLINNLAGNSQEAAWNLNDTDLQIMNFINLILNHMQSETSRKTVLSLRSIVDFTEQFLKTFFSLFLKEDSENKISLLLKYFHKDVIAEMSFVPKDKILEILKLDQFLTLMIQDRLMNIFSSLKETIYHLMKSSFILDNGEFYFDTHQGLKFMQDLFNALLRETSMKNKTENNIDFFTVVSQLFFHVNKSEDLFKLNQDLGSALHLVRECSTEMARLLDTILHSPNKDFYALYPTLQEVILANLTDLLFFINNSFPLRNRATLEITKRLVGAISRASEESHVLKPLLEMSGTLVMLLNDSADLRDLATSMDSIVKLLKLVKKVSGKMSTVFKTHFISNTKDSVKFFDTLYSIMQQSVQNLVKEIATLKKIDHFTFEKINDLLVPFLDLAFEMIGVEPYISSNSDIFSMSPSILSYMNQSKDFSDILEEIAEFLTSVKMNLEDMRSLAVAFNNETQTFSMDSVNLREEILGCLVPINNITNQMDFLYPNPISTHSGPQDIKWEIIHEVIPFLDKILSQNSTEIGSFLKMVICLTLEALWKNLKKDNWNVSNVLMTFTQHPNNLLKTIETVLEASSGIKSDYEGDLNKSLYFDTPLSQNITHHQLEKAIHNVLSRIALWRKGLLFNNSEWITSTRTLFQPLFEIFIKATTGKNVTSEKEERTKKEMIDFPYSFKPFFCLEKYLGGLFVLTKYWQQIPLTDQSVVEICEVFQQTVKPSEAMEMLQKVKMMVVRVLTIVAENPSWTKDILCATLSCKQNGIRHLILSAIQGVTLAQDHFQEIEKIWSSPNQLNCESLSKNLSSTLESFKSSLENATGQDCTSQPRLETVQQHLYMLAKSLEETWSSGNPIMTFLSNFTVTEDVKIKDLMKNITKLTEELRSSIQISNETIHSILEANISHSKVLFSALTVALSGKCDQEILHLLLTFPKGEKSWIAAEELCSLPGSKVYSLIVLLSRNLDVRAFIYKTLMPSEANGLLNSLLDIVSSLSALLAKAQHVFEYLPEFLHTFKITALLETLDFQQVSQNVQARSSAFGSFQFVMKMVCKDQASFLSDSNMFINLPRVKELLEDDKEKFNIPEDSTPFCLKLYQEILQLPNGALVWTFLKPILHGKILYTPNTPEINKVIQKANYTFYIVDKLKTLSETLLEMSSLFQRSGSGQMFNQLQEALRNKFVRNFVENQLHIDVDKLTEKLQTYGGLLDEMFNHAGAGRFRFLGSILVNLSSCVALNRFQALQSVDILETKAHELLQQNSFLASIIFSNSLFDKNFRSESVKLPPHVSYTIRTNVLYSVRTDVVKNPSWKFHPQNLPADGFKYNYVFAPLQDMIERAIILVQTGQEALEPAAQTQAAPYPCHTSDLFLNNVGFFFPLIMMLTWMVSVASMVRKLVYEQEIQIEEYMRMMGVHPVIHFLAWFLENMAVLTISSATLAIVLKTSGIFAHSNTFIVFLFLLDFGMSVVMLSYLLSAFFSQANTAALCTSLVYMISFLPYIVLLVLHNQLSFVNQTFLCLLSTTAFGQGVFFITFLEGQETGIQWNNMYQALEQGGMTFGWVCWMILFDSSLYFLCGWYLSNLIPGTFGLRKPWYFPFTASYWKSVGFLVEKRQYFLSSSLFFFNENFDNKGSSLQNREGELEGSAPGVTLVSVTKEYEGHKAVVQDLSLTFYRDQITALLGTNGAGKTTIISMLTGLHPPTSGTIIINGKNLQTDLSRVRMELGVCPQQDILLDNLTVREHLLLFASIKAPQWTKKELHQQVNQTLQDVDLTQHQHKQTRALSGGLKRKLSLGIAFMGMSRTVVLDEPTSGVDPCSRHSLWDILLKYREGRTIIFTTHHLDEAEALSDRVAVLQHGRLRCCGPPFCLKEAYGQGLRLTLTRQPSVLEAHDLKDMACVTSLIKIYIPQAFLKDSSGSELTYTIPKDTDKACLKGLFQALDENLHQLHLTGYGISDTTLEEVFLMLLQDSNKKSHIALGTESELQNHRPTGHLSGYCGSLARPATVQGVQLLRAQVAAILARRLRRTLRAGKSTLADLLLPVLFVALAMGLFMVRPLATEYPPLRLTPGHYQRAETYFFSSGGDNLDLTRVLLRKFRDQDLPCADLNPRQKNSSCWRTDPFSHPEFQDSCGCLKCPNRSASAPYLTNHLGHTLLNLSGFNMEEYLLAPSEKPRLGGWSFGLKIPSEAGGANGNISKPPTLAKVWYNQKGFHSLPSYLNHLNNLILWQHLPPTVDWRQYGITLYSHPYGGALLNKDKILESIRQCGVALCIVLGFSILSASIGSSVVRDRVIGAKRLQHISGLGYRMYWFTNFLYDMLFYLVSVCLCVAVIVAFQLTAFTFRKNLAATALLLSLFGYATLPWMYLMSRIFSSSDVAFISYVSLNFIFGLCTMLITIMPRLLAIISKAKNLQNIYDVLKWVFTIFPQFCLGQGLVELCYNQIKYDLTHNFGIDSYVSPFEMNFLGWIFVQLASQGTVLLLLRVLLHWDLLRWPRGHSTLQGTVKSSKDTDVEKEEKRVFEGRTNGDILVLYNLSKHYRRFFQNIIAVQDISLGIPKGECFGLLGVNGAGKSTTFKMLNGEVSLTSGHAIIRTPMGDAVDLSSAGTAGVLIGYCPQQDALDELLTGWEHLYYYCSLRGIPRQCIPEVAGDLIRRLHLEAHADKPVATYSGGTKRKLSTALALVGKPDILLLDEPSSGMDPCSKRYLWQTIMKEVREGCAAVLTSHSMEECEALCTRLAIMVNGSFKCLGSPQHIKNRFGDGYTVKVWLCKEANQHCTVSDHLKLYFPGIQFKGQHLNLLEYHVPKRWGCLADLFKVIENNKTFLNIKHYSINQTTLEQVFINFASEQQQTLQSTLDPSTDSHHTHHLPI

SEQ ID NO: 19269 - protein, 317 aa, Homo sapiens
MGHAGCQFKALLWKNWLCRLRNPVLFLAEFFWPCILFVILTVLRFQEPPRYRDICYLQPRDLPSCGVIPFVQSLLCNTGSRCRNFSYEGSMEHHFRLSRFQTAADPKKVNNLAFLKEIQDLAEEIHGMMDKAKNLKRLWVERSNTPDSSYGSSFFTMDLNKTEEVILKLESLHQQPHIWDFLLLLPRLHTSHDHVEDGMDVAVNLLQTILNSLISLEDLDWLPLNQTFSQVSELVLNVTISTLTFLQQHGVAVTEPVYHLSMQNIVWDPQKVQYDLKSQFGFDDLHTEQILNSSAELKEVHMLDCFSHRWAFPGDWI

SEQ ID NO: 19270 - protein, 2760 aa, Homo sapiens
MSFVPKDKILEILKLDQFLTLMIQDRLMNIFSSLKETIYHLMKSSFILDNGEFYFDTHQGLKFMQDLFNALLRETSMKNKTENNIDFFTVVSQLFFHVNKSEDLFKLNQDLGSALHLVRECSTEMARLLDTILHSPNKDFYALYPTLQEVILANLTDLLFFINNSFPLRNRATLEITKRLVGAISRASEESHVLKPLLEMSGTLVMLLNDSADLRDLATSMDSIVKLLKLVKKVSGKMSTVFKTHFISNTKDSVKFFDTLYSIMQQSVQNLVKEIATLKKIDHFTFEKINDLLVPFLDLAFEMIGVEPYISSNSDIFSMSPSILSYMNQSKDFSDILEEIAEFLTSVKMNLEDMRSLAVAFNNETQTFSMDSVNLREEILGCLVPINNITNQMDFLYPNPISTHSGPQDIKWEIIHEVIPFLDKILSQNSTEIGSFLKMVICLTLEALWKNLKKDNWNVSNVLMTFTQHPNNLLKTIETVLEASSGIKSDYEGDLNKSLYFDTPLSQNITHHQLEKAIHNVLSRIALWRKGLLFNNSEWITSTRTLFQPLFEIFIKATTGKNVTSEKEERTKKEMIDFPYSFKPFFCLEKYLGGLFVLTKYWQQIPLTDQSVVEICEVFQQTVKPSEAMEMLQKVKMMVVRVLTIVAENPSWTKDILCATLSCKQNGIRHLILSAIQGVTLAQDHFQEIEKIWSSPNQLNCESLSKNLSSTLESFKSSLENATGQDCTSQPRLETVQQHLYMLAKSLEETWSSGNPIMTFLSNFTVTEDVKIKDLMKNITKLTEELRSSIQISNETIHSILEANISHSKVLFSALTVALSGKCDQEILHLLLTFPKGEKSWIAAEELCSLPGSKVYSLIVLLSRNLDVRAFIYKTLMPSEANGLLNSLLDIVSSLSALLAKAQHVFEYLPEFLHTFKITALLETLDFQQVSQNVQARSSAFGSFQFVMKMVCKDQASFLSDSNMFINLPRVKELLEDDKEKFNIPEDSTPFCLKLYQEILQLPNGALVWTFLKPILHGKILYTPNTPEINKVIQKANYTFYIVDKLKTLSETLLEMSSLFQRSGSGQMFNQLQEALRNKFVRNFVENQLHIDVDKLTEKLQTYGGLLDEMFNHAGAGRFRFLGSILVNLSSCVALNRFQALQSVDILETKAHELLQQNSFLASIIFSNSLFDKNFRSESVKLPPHVSYTIRTNVLYSVRTDVVKNPSWKFHPQNLPADGFKYNYVFAPLQDMIERAIILVQTGQEALEPAAQTQAAPYPCHTSDLFLNNVGFFFPLIMMLTWMVSVASMVRKLVYEQEIQIEEYMRMMGVHPVIHFLAWFLENMAVLTISSATLAIVLKTSGIFAHSNTFIVFLFLLDFGMSVVMLSYLLSAFFSQANTAALCTSLVYMISFLPYIVLLVLHNQLSFVNQTFLCLLSTTAFGQGVFFITFLEGQETGIQWNNMYQALEQGGMTFGWVCWMILFDSSLYFLCGWYLSNLIPGTFGLRKPWYFPFTASYWKSVGFLVEKRQYFLSSSLFFFNENFDNKGSSLQNREGELEGSAPGVTLVSVTKEYEGHKAVVQDLSLTFYRDQITALLGTNGAGKTTIISMLTGLHPPTSGTIIINGKNLQTDLSRVRMELGVCPQQDILLDNLTVREHLLLFASIKAPQWTKKELHQQVNQTLQDVDLTQHQHKQTRALSGGLKRKLSLGIAFMGMSRTVVLDEPTSGVDPCSRHSLWDILLKYREGRTIIFTTHHLDEAEALSDRVAVLQHGRLRCCGPPFCLKEAYGQGLRLTLTRQPSVLEAHDLKDMACVTSLIKIYIPQAFLKDSSGSELTYTIPKDTDKACLKGLFQALDENLHQLHLTGYGISDTTLEEVFLMLLQDSNKKSHIALGTESELQNHRPTGHLSGYCGSLARPATVQGVQLLRAQVAAILARRLRRTLRAGKSTLADLLLPVLFVALAMGLFMVRPLATEYPPLRLTPGHYQRAETYFFSSGGDNLDLTRVLLRKFRDQDLPCADLNPRQKNSSCWRTDPFSHPEFQDSCGCLKCPNRSASAPYLTNHLGHTLLNLSGFNMEEYLLAPSEKPRLGGWSFGLKIPSEAGGANGNISKPPTLAKVWYNQKGFHSLPSYLNHLNNLILWQHLPPTVDWRQYGITLYSHPYGGALLNKDKILESIRQCGVALCIVLGFSILSASIGSSVVRDRVIGAKRLQHISGLGYRMYWFTNFLYDMLFYLVSVCLCVAVIVAFQLTAFTFRKNLAATALLLSLFGYATLPWMYLMSRIFSSSDVAFISYVSLNFIFGLCTMLITIMPRLLAIISKAKNLQNIYDVLKWVFTIFPQFCLGQGLVELCYNQIKYDLTHNFGIDSYVSPFEMNFLGWIFVQLASQGTVLLLLRVLLHWDLLRWPRGHSTLQGTVKSSKDTDVEKEEKRVFEGRTNGDILVLYNLSKHYRRFFQNIIAVQDISLGIPKGECFGLLGVNGAGKSTTFKMLNGEVSLTSGHAIIRTPMGDAVDLSSAGTAGVLIGYCPQQDALDELLTGWEHLYYYCSLRGIPRQCIPEVAGDLIRRLHLEAHADKPVATYSGGTKRKLSTALALVGKPDILLLDEPSSGMDPCSKRYLWQTIMKEVREGCAAVLTSHSMEECEALCTRLAIMVNGSFKCLGSPQHIKNRFGDGYTVKVWLCKEANQHCTVSDHLKLYFPGIQFKGQHLNLLEYHVPKRWGCLADLFKVIENNKTFLNIKHYSINQTTLEQVFINFASEQQQTLQSTLDPSTDSHHTHHLPI

SEQ ID NO: 19271 - protein, 5059 aa, Homo sapiens
MGHAGCQFKALLWKNWLCRLRNPVLFLAEFFWPCILFVILTVLRFQEPPRYRDICYLQPRDLPSCGVIPFVQSLLCNTGSRCRNFSYEGSMEHHFRLSRFQTAADPKKVNNLAFLKEIQDLAEEIHGMMDKAKNLKRLWVERSNTPDSSYGSSFFTMDLNKTEEVILKLESLHQQPHIWDFLLLLPRLHTSHDHVEDGMDVAVNLLQTILNSLISLEDLDWLPLNQTFSQVSELVLNVTISTLTFLQQHGVAVTEPVYHLSMQNIVWDPQKVQYDLKSQFGFDDLHTEQILNSSAELKEIPTDTSLEKMVCSVLSSTSEDEAEKWGHVGGCHPKWSEAKNYLVHAVSWLRVYQQVFVQWQQGSLLQKTLTGMGHSLEALRNQFEEESKPWKVVEALHTALLLLNDSLSADGPKDNHTFPKILQHLWKLQSLLQNLPQWPALKRFLQLDGALRNAIAQNLHFVQEVLICLETSANDFKWFELNQLKLEKDVFFWELKQMLAKNAVCPNGRFSEKEVFLPPGNSSIWGGLQGLLCYCNSSETSVLNKLLGSVEDADRILQEVITWHKNMSVLIPEEYLDWQELEMQLSEASLSCTRLFLLLGADPSPENDVFSSDCKHQLVSTVIFHTLEKTQFFLEQAYYWKAFKKFIRKTCEVAQYVNMQESFQNRLLAFPEESPCFEENMDWKMISDNYFQFLNNLLKSPTASISRALNFTKHLLMMEKKLHTLEDEQMNFLLSFVEFFEKLLLPNLFDSSIVPSFHSLPSLTEDILNISSLWTNHLKSLKRDPSATDAQKLLEFGNEVIWKMQTLGSHWIRKEPKNLLRFIELILFEINPKLLELWAYGISKGKRAKLENFFTLLNFSVPENEILSTSFNFSQLFHSDWPKSPAMNIDFVRLSEAIITSLHEFGFLEQEQISEALNTVYAIRNASDLFSALSEPQKQEVDKILTHIHLNVFQDKDSALLLQIYSSFYRYIYELLNIQSRGSSLTFLTQISKHILDIIKQFNFQNISKAFAFLFKTAEVLGGISNVSYCQQLLSIFNFLELQAQSFMSTEGQELEVIHTTLTGLKQLLIIDEDFRISLFQYMSQFFNSSVEDLLDNKCLISDNKHISSVNYSTSEESSFVFPLAQIFSNLSANVSVFNKFMSIHCTVSWLQMWTEIWETISQLFKFDMNVFTSLHHGFTQLLDELEDDVKVSKSCQGILPTHNVARLILNLFKNVTQANDFHNWEDFLDLRDFLVALGNALVSVKKLNLEQVEKSLFTMEAALHQLKTFPFNESTSREFLNSLLEVFIEFSSTSEYIVRNLDSINDFLSNNLTNYGEKFENIITELREAIVFLRNVSHDRDLFSCADIFQNVTECILEDGFLYVNTSQRMLRILDTLNSTFSSENTISSLKGCIVWLDVINHLYLLSNSSFSQGHLQNILGNFRDIENKMNSILKIVTWVLNIKKPLCSSNGSHINCVNIYLKDVTDFLNIVLTTVFEKEKKPKFEILLALLNDSTKQVRMSINNLTTDFDFASQSNWRYFTELILRPIEMSDEIPNQFQNIWLHLITLGKEFQKLVKGIYFNILENNSSSKTENLLNIFATSPKEKDVNSVGNSIYHLASYLAFSLSHDLQNSPKIIISPEIMKATGLGIQLIRDVFNSLMPVVHHTSPQNAGYMQALKKVTSVMRTLKKADIDLLVDQLEQVSVNLMDFFKNISSVGTGNLVVNLLVGLMEKFADSSHSWNVNHLLQLSRLFPKDVVDAVIDVYYVLPHAVRLLQGVPGKNITEGLKDVYSFTLLHGITISNITKEDFAIVIKILLDTIELVSDKPDIISEALACFPVVWCWNHTNSGFRQNSKIDPCNVHGLMSSSFYGKVASILDHFHLSPQGEDSPCSNESSRMEITRKVVCIIHELVDWNSILLELSEVFHVNISLVKTVQKFWHKILPFVPPSINQTRDSISELCPSGSIKQVALQIIEKLKNVNFTKVTSGENILDKLSSLNKILNINEDTETSVQNIISSNLERTVQLISEDWSLEKSTHNLLSLFMMLQNANVTGSSLEALSSFIEKSETPYNFEELWPKFQQIMKDLTQDFRIRHLLSEMNKGIKSINSMALQKITLQFAHFLEILDSPSLKTLEIIEDFLLVTKNWLQEYANEDYSRMIETLFIPVTNESSTEDIALLAKAIATFWGSLKNISRAGNFDVAFLTHLLNQEQLTNFSVVQLLFENILINLINNLAGNSQEAAWNLNDTDLQIMNFINLILNHMQSETSRKTVLSLRSIVDFTEQFLKTFFSLFLKEDSENKISLLLKYFHKDVIAEMSFVPKDKILEILKLDQFLTLMIQDRLMNIFSSLKETIYHLMKSSFILDNGEFYFDTHQGLKFMQDLFNALLRETSMKNKTENNIDFFTVVSQLFFHVNKSEDLFKLNQDLGSALHLVRECSTEMARLLDTILHSPNKDFYALYPTLQEVILANLTDLLFFINNSFPLRNRATLEITKRLVGAISRASEESHVLKPLLEMSGTLVMLLNDSADLRDLATSMDSIVKLLKLVKKVSGKMSTVFKTHFISNTKDSVKFFDTLYSIMQQSVQNLVKEIATLKKIDHFTFEKINDLLVPFLDLAFEMIGVEPYISSNSDIFSMSPSILSYMNQSKDFSDILEEIAEFLTSVKMNLEDMRSLAVAFNNETQTFSMDSVNLREEILGCLVPINNITNQMDFLYPNPISTHSGPQDIKWEIIHEVIPFLDKILSQNSTEIGSFLKMVICLTLEALWKNLKKDNWNVSNVLMTFTQHPNNLLKTIETVLEASSGIKSDYEGDLNKSLYFDTPLSQNITHHQLEKAIHNVLSRIALWRKGLLFNNSEWITSTRTLFQPLFEIFIKATTGKNVTSEKEERTKKEMIDFPYSFKPFFCLEKYLGGLFVLTKYWQQIPLTDQSVVEICEVFQQTVKPSEAMEMLQKVKMMVVRVLTIVAENPSWTKDILCATLSCKQNGIRHLILSAIQGVTLAQDHFQEIEKIWSSPNQLNCESLSKNLSSTLESFKSSLENATGQDCTSQPRLETVQQHLYMLAKSLEETWSSGNPIMTFLSNFTVTEDVKIKDLMKNITKLTEELRSSIQISNETIHSILEANISHSKVLFSALTVALSGKCDQEILHLLLTFPKGEKSWIAAEELCSLPGSKVYSLIVLLSRNLDVRAFIYKTLMPSEANGLLNSLLDIVSSLSALLAKAQHVFEYLPEFLHTFKITALLETLDFQQVSQNVQARSSAFGSFQFVMKMVCKDQASFLSDSNMFINLPRVKELLEDDKEKFNIPEDSTPFCLKLYQEILQLPNGALVWTFLKPILHGKILYTPNTPEINKVIQKANYTFYIVDKLKTLSETLLEMSSLFQRSGSGQMFNQLQEALRNKFVRNFVENQLHIDVDKLTEKLQTYGGLLDEMFNHAGAGRFRFLGSILVNLSSCVALNRFQALQSVDILETKAHELLQQNSFLASIIFSNSLFDKNFRSESVKLPPHVSYTIRTNVLYSVRTDVVKNPSWKFHPQNLPADGFKYNYVFAPLQDMIERAIILVQTGQEALEPAAQTQAAPYPCHTSDLFLNNVGFFFPLIMMLTWMVSVASMVRKLVYEQEIQIEEYMRMMGVHPVIHFLAWFLENMAVLTISSATLAIVLKTSGIFAHSNTFIVFLFLLDFGMSVVMLSYLLSAFFSQANTAALCTSLVYMISFLPYIVLLVLHNQLSFVNQTFLCLLSTTAFGQGVFFITFLEGQETGIQWNNMYQALEQGGMTFGWVCWMILFDSSLYFLCGWYLSNLIPGTFGLRKPWYFPFTASYWKSVGFLVEKRQYFLSSSLFFFNENFDNKGSSLQNREGELEGSAPGVTLVSVTKEYEGHKAVVQDLSLTFYRDQITALLGTNGAGKTTIISMLTGLHPPTSGTIIINGKNLQTDLSRVRMELGVCPQQDILLDNLTVREHLLLFASIKAPQWTKKELHQQVNQTLQDVDLTQHQHKQTRALSGGLKRKLSLGIAFMGMSRTVVLDEPTSGVDPCSRHSLWDILLKYREGRTIIFTTHHLDEAEALSDRVAVLQHGRLRCCGPPFCLKEAYGQGLRLTLTRQPSVLEAHDLKDMACVTSLIKIYIPQAFLKDSSGSELTYTIPKDTDKACLKGLFQALDENLHQLHLTGYGISDTTLEEVFLMLLQDSNKKSHIALGTESELQNHRPTGHLSGYCGSLARPATVQGVQLLRAQVAAILARRLRRTLRAGKSTLADLLLPVLFVALAMGLFMVRPLATEYPPLRLTPGHYQRAETYFFSSSGGDNLDLTRVLLRKFRDQDLPCADLNPRQKNSSCWRTDPFSHPEFQDSCGCLKCPNRSASAPYLTNHLGHTLLNLSGFNMEEYLLAPSEKPRLGGWSFGLKIPSEAGGANGNISKPPTLAKVWYNQKGFHSLPSYLNHLNNLILWQHLPPTVDWRQYGITLYSHPYGGALLNKDKILESIRQCGVALCIVLGFSILSASIGSSVVRDRVIGAKRLQHISGLGYRMYWFTNFLYDMLFYLVSVCLCVAVIVAFQLTAFTFRKNLAATALLLSLFGYATLPWMYLMSRIFSSSDVAFISYVSLNFIFGLCTMLITIMPRLLAIISKAKNLQNIYDVLKWVFTIFPQFCLGQGLVELCYNQIKYDLTHNFGIDSYVSPFEMNFLGWIFVQLASQGTVLLLLRVLLHWDLLRWPRGHSTLQGTVKSSKDTDVEKEEKRVFEGRTNGDILVLYNLSKHYRRFFQNIIAVQDISLGIPKGECFGLLGVNGAGKSTTFKMLNGEVSLTSGHAIIRTPMGDAVDLSSAGTAGVLIGYCPQQDALDELLTGWEHLYYYCSLRGIPRQCIPEVAGDLIRRLHLEAHADKPVATYSGGTKRKLSTALALVGKPDILLLDEPSSGMDPCSKRYLWQTIMKEVREGCAAVLTSHSMEECEALCTRLAIMVNGSFKCLGSPQHIKNRFGDGYTVKVWLCKEANQHCTVSDHLKLYFPGIQFKGQHLNLLEYHVPKRWGCLADLFKVIENNKTFLNIKHYSINQTTLEQVFINFASEQQQTLQSTLDPSTDSHHTHHLPI

SEQ ID NO: 19272 - protein, 2323 aa, Homo sapiens [sequence omitted]

SEQ ID NO: 19273 - protein, 2217 aa, Homo sapiens [sequence omitted]

SEQ ID NO: 19274 - protein, 2292 aa, Homo sapiens [sequence omitted]

SEQ ID NO: 19275 - protein, 315 aa, Homo sapiens
MRAGQQLASMLRWTRAWRLPREGLGPHGPSFARVPVAPSSSSGGRGGAEPRPLPLSYRLLDGEAALPAVVFLHGLFGSKTNFNSIAKILAQQTGRRVLTVDARNHGDSPHSPDMSYEIMSQDLQDLLPQLGLVPCVVVGHSMGGKTAMLLALQRPELVERLIAVDISPVESTGVSHFATYVAAMRAINIADELPRSRARKLADEQLSSVIQDMAVRQHLLTNLVEVDGRFVWRVNLDALTQHLDKILAFPQRQESYLGPTLFLLGGNSQFVHPSHHPEIMRLFPRAQMQTVPNAGHWIHADRPQDFIAAIRGFLV

SEQ ID NO: 19276 - protein, 101 aa, Homo sapiens
MRAGQQLASMLRWTRAWRLPREGLGPHGPSFARVPVAPSSSSGGRGGAEPRPLPLSYRLLDGEAALPAVVFLHGLFGSKTNFNSIAKILAQQTGRADGGCS

SEQ ID NO: 19277 - protein, 97 aa, Homo sapiens
MRAGQQLASMLRWTRAWRLPREGLGPHGPSFARVPVAPSSSSGGRGGAEPRPLPLSYRLLDGEAALPAVVFLHGLFGSKTNFNSIAKILAQQTGRRG

SEQ ID NO: 19278 - protein, 308 aa, Homo sapiens
MRAGQQLASMLRWTRAWRLPREGLGPHGPSFARVPVAPSSSSGGRGGAEPRLLDGEAALPAVVFLHGLFGSKTNFNSIAKILAQQTGRRVLTVDARNHGDSPHSPDMSYEIMSQDLQDLLPQLGLVPCVVVGHSMGGKTAMLLALQRPELVERLIAVDISPVESTGVSHFATYVAAMRAINIADELPRSRARKLADEQLSSVIQDMAVRQHLLTNLVEVDGRFVWRVNLDALTQHLDKILAFPQRQESYLGPTLFLLGGNSQFVHPSHHPEIMRLFPRAQMQTVPNAGHWIHADRPQDFIAAIRGFLV

SEQ ID NO: 19279 - protein, 145 aa, Homo sapiens
MRAGQQLASMLRWTRAWRLPREGLGPHGPSFARVPVAPSSSSGGRGGAEPRLLDGEAALPAVVFLHGLFGSKTNFNSIAKILAQQTGRRVLTVDARNHGDSPHSPDMSYEIMSQDLQPAPHLGTEGLRQALCGHEVLQGWSDLRL

SEQ ID NO: 19280 - protein, 258 aa, Homo sapiens
MRAGQQLASMLRWTRAWRLPREGLGPHGPSFARVPVAPSSSSGGRGGAEPRPLPLSYRLLDGEAALPAVVFLHGLFGSKTNFNSIAKILAQQTGRRVLTVDARNHGDSPHSPDMSYEIMSQDLQDLLPQLGLVPCVVVGHSMGGKTAMLLALQRDMAVRQHLLTNLVEVDGRFVWRVNLDALTQHLDKILAFPQRQESYLGPTLFLLGGNSQFVHPSHHPEIMRLFPRAQMQTVPNAGHWIHADRPQDFIAAIRGFLV

SEQ ID NO: 19281 - protein, 2346 aa, Homo sapiens
MDEPSPLAQPLELNQHSRFIIGSVSEDNSEDEISNLVKLDLLEEKEGSLSPASVGSDTLSDLGISSLQDGLALHIRSSMSGLHLVKQGRDRKKIDSQRDFTVASPAEFVTRFGGNKVIEKVLIANNGIAAVKCMRSIRRWSYEMFRNERAIRFVVMVTPEDLKANAEYIKMADHYVPVPGGPNNNNYANVELILDIAKRIPVQAVWAGWGHASENPKLPELLLKNGIAFMGPPSQAMWALGDKIASSIVAQTAGIPTLPWSGSGLRVDWQENDFSKRILNVPQELYEKGYVKDVDDGLQAAEEVGYPVMIKASEGGGGKGIRKVNNADDFPNLFRQVQAEVPGSPIFVMRLAKQSRHLEVQILADQYGNAISLFGRDCSVQRRHQKIIEEAPATIATPAVFEHMEQCAVKLAKMVGYVSAGTVEYLYSQDGSFYFLELNPRLQVEHPCTEMVADVNLPAAQLQIAMGIPLYRIKDIRMMYGVSPWGDSPIDFEDSAHVPCPRGHVIAARITSENPDEGFKPSSGTVQELNFRSNKNVWGYFSVAAAGGLHEFADSQFGHCFSWGENREEAISNMVVALKELSIRGDFRTTVEYLIKLLETESFQMNRIDTGWLDRLIAEKVQAERPDTMLGVVCGALHVADVSLRNSVSNFLHSLERGQVLPAHTLLNTVDVELIYEGVKYVLKVTRQSPNSYVVIMNGSCVEVDVHRLSDGGLLLSYDGSSYTTYMKEEVDRYRITIGNKTCVFEKENDPSVMRSPSAGKLIQYIVEDGGHVFAGQCYAEIEVMKMVMTLTAVESGCIHYVKRPGAALDPGCVLAKMQLDNPSKVQQAELHTGSLPRIQSTALRGEKLHRVFHYVLDNLVNVMNGYCLPDPFFSSKVKDWVERLMKTLRDPSLPLLELQDIMTSVSGRIPPNVEKSIKKEMAQYASNITSVLCQFPSQQIANILDSHAATLNRKSEREVFFMNTQSIVQLVQRYRSGIRGHMKAVVMDLLRQYLRVETQFQNGHYDKCVFALREENKSDMNTVLNYIFSHAQVTKKNLLVTMLIDQLCGRDPTLTDELLNILTELTQLSKTTNAKVALRARQVLIASHLPSYELRHNQVESIFLSAIDMYGHQFCIENLQKLILSETSIFDVLPNFFYHSNQVVRMAALEVYVRRAYIAYELNSVQHRQLKDNTCVVEFQFMLPTSHPNRGNIPTLNRMSFSSNLNHYGMTHVASVSDVLLDNSFTPPCQRMGGMVSFRTFEDFVRIFDEVMGCFSDSPPQSPTFPEAGHTSLYDEDKVPRDEPIHILNVAIKTDCDIEDDRLAAMFREFTQQNKATLVDHGIRRLTFLVAQKDFRKQVNYEVDRRFHREFPKFFTFRARDKFEEDRIYRHLEPALAFQLELNRMRNFDLTAIPCANHKMHLYLGAAKVEVGTEVTDYRFFVRAIIRHSDLVTKEASFEYLQNEGERLLLEAMDELEVAFNNTNVRTDCNHIFLNFVPTVIMDPSKIEESVRSMVMRYGSRLWKLRVLQAELKINIRLTPTGKAIPIRLFLTNESGYYLDISLYKEVTDSRTAQIMFQAYGDKQGPLHGMLINTPYVTKDLLQSKRFQAQSLGTTYIYDIPEMFRQSLIKLWESMSTQAFLPSPPLPSDMLTYTELVLDDQGQLVHMNRLPGGNEIGMVAWKMTFKSPEYPEGRDIIVIGNDITYRIGSFGPQEDLLFLRASELARAEGIPRIYVSANSGARIGLAEEIRHMFHVAWVDPEDPYKGYRYLYLTPQDYKRVSALNSVHCEHVEDEGESRYKITDIIGKEEGIGPENLRGSGMIAGESSLAYNEIITISLVTCRAIGIGAYLVRLGQRTIQVENSHLILTGAGALNKVLGREVYTSNNQLGGIQIMHNNGVTHCTVCDDFEGVFTVLHWLSYMPKSVHSSVPLLNSKDPIDRIIEFVPTKTPYDPRWMLAGRPHPTQKGQWLSGFFDYGSFSEIMQPWAQTVVVGRARLGGIPVGVVAVETRTVELSIPADPANLDSEAKIIQQAGQVWFPDSAFKTYQAIKDFNREGLPLMVFANWRGFSGGMKDMYDQVLKFGAYIVDGLRECCQPVLVYIPPQAELRGGSWVVIDSSINPRHMEMYADRESRGSVLEPEGTVEIKFRRKDLVKTMRRVDPVYIHLAERLGTPELSTAERKELENKLKEREEFLIPIYHQVAVQFADLHDTPGRMQEKGVISDILDWKTSRTFFYWRLRRLLLEDLVKKKIHNANPELTDGQIQAMLRRWFVEVEGTVKAYVWDNNKDLAEWLEKQLTEEDGVHSVIEENIKCISRDYVLKQIRSLVQANPEVAMDSIIHMTQHISPTQRAEVIRILSTMDSPST

SEQ ID NO: 19282 - protein, 2288 aa, Homo sapiens
MEGSPEENKEMRYYMLQRSSMSGLHLVKQGRDRKKIDSQRDFTVASPAEFVTRFGGNKVIEKVLIANNGIAAVKCMRSIRRWSYEMFRNERAIRFVVMVTPEDLKANAEYIKMADHYVPVPGGPNNNNYANVELILDIAKRIPVQAVWAGWGHASENPKLPELLLKNGIAFMGPPSQAMWALGDKIASSIVAQTAGIPTLPWSGSGLRVDWQENDFSKRILNVPQELYEKGYVKDVDDGLQAAEEVGYPVMIKASEGGGGKGIRKVNNADDFPNLFRQVQAEVPGSPIFVMRLAKQSRHLEVQILADQYGNAISLFGRDCSVQRRHQKIIEEAPATIATPAVFEHMEQCAVKLAKMVGYVSAGTVEYLYSQDGSFYFLELNPRLQVEHPCTEMVADVNLPAAQLQIAMGIPLYRIKDIRMMYGVSPWGDSPIDFEDSAHVPCPRGHVIAARITSENPDEGFKPSSGTVQELNFRSNKNVWGYFSVAAAGGLHEFADSQFGHCFSWGENREEAISNMVVALKELSIRGDFRTTVEYLIKLLETESFQMNRIDTGWLDRLIAEKVQAERPDTMLGVVCGALHVADVSLRNSVSNFLHSLERGQVLPAHTLLNTVDVELIYEGVKYVLKVTRQSPNSYVVIMNGSCVEVDVHRLSDGGLLLSYDGSSYTTYMKEEVDRYRITIGNKTCVFEKENDPSVMRSPSAGKLIQYIVEDGGHVFAGQCYAEIEVMKMVMTLTAVESGCIHYVKRPGAALDPGCVLAKMQLDNPSKVQQAELHTGSLPRIQSTALRGEKLHRVFHYVLDNLVNVMNGYCLPDPFFSSKVKDWVERLMKTLRDPSLPLLELQDIMTSVSGRIPPNVEKSIKKEMAQYASNITSVLCQFPSQQIANILDSHAATLNRKSEREVFFMNTQSIVQLVQRYRSGIRGHMKAVVMDLLRQYLRVETQFQNGHYDKCVFALREENKSDMNTVLNYIFSHAQVTKKNLLVTMLIDQLCGRDPTLTDELLNILTELTQLSKTTNAKVALRARQVLIASHLPSYELRHNQVESIFLSAIDMYGHQFCIENLQKLILSETSIFDVLPNFFYHSNQVVRMAALEVYVRRAYIAYELNSVQHRQLKDNTCVVEFQFMLPTSHPNRGNIPTLNRMSFSSNLNHYGMTHVASVSDVLLDNSFTPPCQRMGGMVSFRTFEDFVRIFDEVMGCFSDSPPQSPTFPEAGHTSLYDEDKVPRDEPIHILNVAIKTDCDIEDDRLAAMFREFTQQNKATLVDHGIRRLTFLVAQKDFRKQVNYEVDRRFHREFPKFFTFRARDKFEEDRIYRHLEPALAFQLELNRMRNFDLTAIPCANHKMHLYLGAAKVEVGTEVTDYRFFVRAIIRHSDLVTKEASFEYLQNEGERLLLEAMDELEVAFNNTNVRTDCNHIFLNFVPTVIMDPSKIEESVRSMVMRYGSRLWKLRVLQAELKINIRLTPTGKAIPIRLFLTNESGYYLDISLYKEVTDSRTAQIMFQAYGDKQGPLHGMLINTPYVTKDLLQSKRFQAQSLGTTYIYDIPEMFRQSLIKLWESMSTQAFLPSPPLPSDMLTYTELVLDDQGQLVHMNRLPGGNEIGMVAWKMTFKSPEYPEGRDIIVIGNDITYRIGSFGPQEDLLFLRASELARAEGIPRIYVSANSGARIGLAEEIRHMFHVAWVDPEDPYKGYRYLYLTPQDYKRVSALNSVHCEHVEDEGESRYKITDIIGKEEGIGPENLRGSGMIAGESSLAYNEIITISLVTCRAIGIGAYLVRLGQRTIQVENSHLILTGAGALNKVLGREVYTSNNQLGGIQIMHNNGVTHCTVCDDFEGVFTVLHWLSYMPKSVHSSVPLLNSKDPIDRIIEFVPTKTPYDPRWMLAGRPHPTQKGQWLSGFFDYGSFSEIMQPWAQTVVVGRARLGGIPVGVVAVETRTVELSIPADPANLDSEAKIIQQAGQVWFPDSAFKTYQAIKDFNREGLPLMVFANWRGFSGGMKDMYDQVLKFGAYIVDGLRECCQPVLVYIPPQAELRGGSWVVIDSSINPRHMEMYADRESRGSVLEPEGTVEIKFRRKDLVKTMRRVDPVYIHLAERLGTPELSTAERKELENKLKEREEFLIPIYHQVAVQFADLHDTPGRMQEKGVISDILDWKTSRTFFYWRLRRLLLEDLVKKKIHNANPELTDGQIQAMLRRWFVEVEGTVKAYVWDNNKDLAEWLEKQLTEEDGVHSVIEENIKCISRDYVLKQIRSLVQANPEVAMDSIIHMTQHISPTQRAEVIRILSTMDSPST

SEQ ID NO: 19283 - protein, 2268 aa, Homo sapiens
MSGLHLVKQGRDRKKIDSQRDFTVASPAEFVTRFGGNKVIEKVLIANNGIAAVKCMRSIRRWSYEMFRNERAIRFVVMVTPEDLKANAEYIKMADHYVPVPGGPNNNNYANVELILDIAKRIPVQAVWAGWGHASENPKLPELLLKNGIAFMGPPSQAMWALGDKIASSIVAQTAGIPTLPWSGSGLRVDWQENDFSKRILNVPQELYEKGYVKDVDDGLQAAEEVGYPVMIKASEGGGGKGIRKVNNADDFPNLFRQVQAEVPGSPIFVMRLAKQSRHLEVQILADQYGNAISLFGRDCSVQRRHQKIIEEAPATIATPAVFEHMEQCAVKLAKMVGYVSAGTVEYLYSQDGSFYFLELNPRLQVEHPCTEMVADVNLPAAQLQIAMGIPLYRIKDIRMMYGVSPWGDSPIDFEDSAHVPCPRGHVIAARITSENPDEGFKPSSGTVQELNFRSNKNVWGYFSVAAAGGLHEFADSQFGHCFSWGENREEAISNMVVALKELSIRGDFRTTVEYLIKLLETESFQMNRIDTGWLDRLIAEKVQAERPDTMLGVVCGALHVADVSLRNSVSNFLHSLERGQVLPAHTLLNTVDVELIYEGVKYVLKVTRQSPNSYVVIMNGSCVEVDVHRLSDGGLLLSYDGSSYTTYMKEEVDRYRITIGNKTCVFEKENDPSVMRSPSAGKLIQYIVEDGGHVFAGQCYAEIEVMKMVMTLTAVESGCIHYVKRPGAALDPGCVLAKMQLDNPSKVQQAELHTGSLPRIQSTALRGEKLHRVFHYVLDNLVNVMNGYCLPDPFFSSKVKDWVERLMKTLRDPSLPLLELQDIMTSVSGRIPPNVEKSIKKEMAQYASNITSVLCQFPSQQIANILDSHAATLNRKSEREVFFMNTQSIVQLVQRYRSGIRGHMKAVVMDLLRQYLRVETQFQNGHYDKCVFALREENKSDMNTVLNYIFSHAQVTKKNLLVTMLIDQLCGRDPTLTDELLNILTELTQLSKTTNAKVALRARQVLIASHLPSYELRHNQVESIFLSAIDMYGHQFCIENLQKLILSETSIFDVLPNFFYHSNQVVRMAALEVYVRRAYIAYELNSVQHRQLKDNTCVVEFQFMLPTSHPNRGNIPTLNRMSFSSNLNHYGMTHVASVSDVLLDNSFTPPCQRMGGMVSFRTFEDFVRIFDEVMGCFSDSPPQSPTFPEAGHTSLYDEDKVPRDEPIHILNVAIKTDCDIEDDRLAAMFREFTQQNKATLVDHGIRRLTFLVAQKDFRKQVNYEVDRRFHREFPKFFTFRARDKFEEDRIYRHLEPALAFQLELNRMRNFDLTAIPCANHKMHLYLGAAKVEVGTEVTDYRFFVRAIIRHSDLVTKEASFEYLQNEGERLLLEAMDELEVAFNNTNVRTDCNHIFLNFVPTVIMDPSKIEESVRSMVMRYGSRLWKLRVLQAELKINIRLTPTGKAIPIRLFLTNESGYYLDISLYKEVTDSRTAQIMFQAYGDKQGPLHGMLINTPYVTKDLLQSKRFQAQSLGTTYIYDIPEMFRQSLIKLWESMSTQAFLPSPPLPSDMLTYTELVLDDQGQLVHMNRLPGGNEIGMVAWKMTFKSPEYPEGRDIIVIGNDITYRIGSFGPQEDLLFLRASELARAEGIPRIYVSANSGARIGLAEEIRHMFHVAWVDPEDPYKGYRYLYLTPQDYKRVSALNSVHCEHVEDEGESRYKITDIIGKEEGIGPENLRGSGMIAGESSLAYNEIITISLVTCRAIGIGAYLVRLGQRTIQVENSHLILTGAGALNKVLGREVYTSNNQLGGIQIMHNNGVTHCTVCDDFEGVFTVLHWLSYMPKSVHSSVPLLNSKDPIDRIIEFVPTKTPYDPRWMLAGRPHPTQKGQWLSGFFDYGSFSEIMQPWAQTVVVGRARLGGIPVGVVAVETRTVELSIPADPANLDSEAKIIQQAGQVWFPDSAFKTYQAIKDFNREGLPLMVFANWRGFSGGMKDMYDQVLKFGAYIVDGLRECCQPVLVYIPPQAELRGGSWVVIDSSINPRHMEMYADRESRGSVLEPEGTVEIKFRRKDLVKTMRRVDPVYIHLAERLGTPELSTAERKELENKLKEREEFLIPIYHQVAVQFADLHDTPGRMQEKGVISDILDWKTSRTFFYWRLRRLLLEDLVKKKIHNANPELTDGQIQAMLRRWFVEVEGTVKAYVWDNNKDLAEWLEKQLTEEDGVHSVIEENIKCISRDYVLKQIRSLVQANPEVAMDSIIHMTQHISPTQRAEVIRILSTMDSPST

SEQ ID NO: 19284 - protein, 2383 aa, Homo sapiens
MWWSTLMSILRARSFWKWISTQTVRIIRAVRAHFGGIMDEPSPLAQPLELNQHSRFIIGSVSEDNSEDEISNLVKLDLLEEKEGSLSPASVGSDTLSDLGISSLQDGLALHIRSSMSGLHLVKQGRDRKKIDSQRDFTVASPAEFVTRFGGNKVIEKVLIANNGIAAVKCMRSIRRWSYEMFRNERAIRFVVMVTPEDLKANAEYIKMADHYVPVPGGPNNNNYANVELILDIAKRIPVQAVWAGWGHASENPKLPELLLKNGIAFMGPPSQAMWALGDKIASSIVAQTAGIPTLPWSGSGLRVDWQENDFSKRILNVPQELYEKGYVKDVDDGLQAAEEVGYPVMIKASEGGGGKGIRKVNNADDFPNLFRQVQAEVPGSPIFVMRLAKQSRHLEVQILADQYGNAISLFGRDCSVQRRHQKIIEEAPATIATPAVFEHMEQCAVKLAKMVGYVSAGTVEYLYSQDGSFYFLELNPRLQVEHPCTEMVADVNLPAAQLQIAMGIPLYRIKDIRMMYGVSPWGDSPIDFEDSAHVPCPRGHVIAARITSENPDEGFKPSSGTVQELNFRSNKNVWGYFSVAAAGGLHEFADSQFGHCFSWGENREEAISNMVVALKELSIRGDFRTTVEYLIKLLETESFQMNRIDTGWLDRLIAEKVQAERPDTMLGVVCGALHVADVSLRNSVSNFLHSLERGQVLPAHTLLNTVDVELIYEGVKYVLKVTRQSPNSYVVIMNGSCVEVDVHRLSDGGLLLSYDGSSYTTYMKEEVDRYRITIGNKTCVFEKENDPSVMRSPSAGKLIQYIVEDGGHVFAGQCYAEIEVMKMVMTLTAVESGCIHYVKRPGAALDPGCVLAKMQLDNPSKVQQAELHTGSLPRIQSTALRGEKLHRVFHYVLDNLVNVMNGYCLPDPFFSSKVKDWVERLMKTLRDPSLPLLELQDIMTSVSGRIPPNVEKSIKKEMAQYASNITSVLCQFPSQQIANILDSHAATLNRKSEREVFFMNTQSIVQLVQRYRSGIRGHMKAVVMDLLRQYLRVETQFQNGHYDKCVFALREENKSDMNTVLNYIFSHAQVTKKNLLVTMLIDQLCGRDPTLTDELLNILTELTQLSKTTNAKVALRARQVLIASHLPSYELRHNQVESIFLSAIDMYGHQFCIENLQKLILSETSIFDVLPNFFYHSNQVVRMAALEVYVRRAYIAYELNSVQHRQLKDNTCVVEFQFMLPTSHPNRGNIPTLNRMSFSSNLNHYGMTHVASVSDVLLDNSFTPPCQRMGGMVSFRTFEDFVRIFDEVMGCFSDSPPQSPTFPEAGHTSLYDEDKVPRDEPIHILNVAIKTDCDIEDDRLAAMFREFTQQNKATLVDHGIRRLTFLVAQKDFRKQVNYEVDRRFHREFPKFFTFRARDKFEEDRIYRHLEPALAFQLELNRMRNFDLTAIPCANHKMHLYLGAAKVEVGTEVTDYRFFVRAIIRHSDLVTKEASFEYLQNEGERLLLEAMDELEVAFNNTNVRTDCNHIFLNFVPTVIMDPSKIEESVRSMVMRYGSRLWKLRVLQAELKINIRLTPTGKAIPIRLFLTNESGYYLDISLYKEVTDSRTAQIMFQAYGDKQGPLHGMLINTPYVTKDLLQSKRFQAQSLGTTYIYDIPEMFRQSLIKLWESMSTQAFLPSPPLPSDMLTYTELVLDDQGQLVHMNRLPGGNEIGMVAWKMTFKSPEYPEGRDIIVIGNDITYRIGSFGPQEDLLFLRASELARAEGIPRIYVSANSGARIGLAEEIRHMFHVAWVDPEDPYKGYRYLYLTPQDYKRVSALNSVHCEHVEDEGESRYKITDIIGKEEGIGPENLRGSGMIAGESSLAYNEIITISLVTCRAIGIGAYLVRLGQRTIQVENSHLILTGAGALNKVLGREVYTSNNQLGGIQIMHNNGVTHCTVCDDFEGVFTVLHWLSYMPKSVHSSVPLLNSKDPIDRIIEFVPTKTPYDPRWMLAGRPHPTQKGQWLSGFFDYGSFSEIMQPWAQTVVVGRARLGGIPVGVVAVETRTVELSIPADPANLDSEAKIIQQAGQVWFPDSAFKTYQAIKDFNREGLPLMVFANWRGFSGGMKDMYDQVLKFGAYIVDGLRECCQPVLVYIPPQAELRGGSWVVIDSSINPRHMEMYADRESRGSVLEPEGTVEIKFRRKDLVKTMRRVDPVYIHLAERLGTPELSTAERKELENKLKEREEFLIPIYHQVAVQFADLHDTPGRMQEKGVISDILDWKTSRTFFYWRLRRLLLEDLVKKKIHNANPELTDGQIQAMLRRWFVEVEGTVKAYVWDNNKDLAEWLEKQLTEEDGVHSVIEENIKCISRDYVLKQIRSLVQANPEVAMDSIIHMTQHISPTQRAEVIRILSTMDSPST

SEQ ID NO: 19285 - protein, 2458 aa, Homo sapiens
MVLLLCLSCLIFSCLTFSWLKIWGKMTDSKPITKSKSEANLIPSQEPFPASDNSGETPQRNGEGHTLPKTPSQAEPASHKGPKDAGRRRNSLPPSHQKPPRNPLSSSDAAPSPELQANGTGTQGLEATDTNGLSSSARPQGQQAGSPSKEDKKQANIKRQLMTNFILGSFDDYSSDEDSVAGSSRESTRKGSRASLGALSLEAYLTTGEAETRVPTMRPSMSGLHLVKRGREHKKLDLHRDFTVASPAEFVTRFGGDRVIEKVLIANNGIAAVKCMRSIRRWAYEMFRNERAIRFVVMVTPEDLKANAEYIKMADHYVPVPGGPNNNNYANVELIVDIAKRIPVQAVWAGWGHASENPKLPELLCKNGVAFLGPPSEAMWALGDKIASTVVAQTLQVPTLPWSGSGLTVEWTEDDLQQGKRISVPEDVYDKGCVKDVDEGLEAAERIGFPLMIKASEGGGGKGIRKAESAEDFPILFRQVQSEIPGSPIFLMKLAQHARHLEVQILADQYGNAVSLFGRDCSIQRRHQKIVEEAPATIAPLAIFEFMEQCAIRLAKTVGYVSAGTVEYLYSQDGSFHFLELNPRLQVEHPCTEMIADVNLPAAQLQIAMGVPLHRLKDIRLLYGESPWGVTPISFETPSNPPLARGHVIAARITSENPDEGFKPSSGTVQELNFRSSKNVWGYFSVAATGGLHEFADSQFGHCFSWGENREEAISNMVVALKELSIRGDFRTTVEYLINLLETESFQNNDIDTGWLDYLIAEKVQAEKPDIMLGVVCGALNVADAMFRTCMTDFLHSLERGQVLPADSLLNLVDVELIYGGVKYILKVARQSLTMFVLIMNGCHIEIDAHRLNDGGLLLSYNGNSYTTYMKEEVDSYRITIGNKTCVFEKENDPTVLRSPSAGKLTQYTVEDGGHVEAGSSYAEMEVMKMIMTLNVQERGRVKYIKRPGAVLEAGCVVARLELDDPSKVHPAEPFTGELPAQQTLPILGEKLHQVFHSVLENLTNVMSGFCLPEPVFSIKLKEWVQKLMMTLRHPSLPLLELQEIMTSVAGRIPAPVEKSVRRVMAQYASNITSVLCQFPSQQIATILDCHAATLQRKADREVFFINTQSIVQLVQRYRSGIRGYMKTVVLDLLRRYLRVEHHFQQAHYDKCVINLREQFKPDMSQVLDCIFSHAQVAKKNQLVIMLIDELCGPDPSLSDELISILNELTQLSKSEHCKVALRARQILIASHLPSYELRHNQVESIFLSAIDMYGHQFCPENLKKLILSETTIFDVLPTFFYHANKVVCMASLEVYVRRGYIAYELNSLQHRQLPDGTCVVEFQFMLPSSHPNRMTVPISITNPDLLRHSTELFMDSGFSPLCQRMGAMVAFRRFEDFTRNFDEVISCFANVPKDTPLFSEARTSLYSEDDCKSLREEPIHILNVSIQCADHLEDEALVPILRTFVQSKKNILVDYGLRRITFLIAQEKEFPKFFTFRARDEFAEDRIYRHLEPALAFQLELNRMRNFDLTAVPCANHKMHLYLGAAKVKEGVEVTDHRFFIRAIIRHSDLITKEASFEYLQNEGERLLLEAMDELEVAFNNTSVRTDCNHIFLNFVPTVIMDPFKIEESVRYMVMRYGSRLWKLRVLQAEVKINIRQTTTGSAVPIRLFITNESGYYLDISLYKEVTDSRSGNIMFHSFGNKQGPQHGMLINTPYVTKDLLQAKRFQAQTLGTTYIYDFPEMFRQALFKLWGSPDKYPKDILTYTELVLDSQGQLVEMNRLPGGNEVGMVAFKMRFKTQEYPEGRDVIVIGNDITFRIGSFGPGEDLLYLRASEMARAEGIPKIYVAANSGARIGMAEEIKHMFHVAWVDPEDPHKGFKYLYLTPQDYTRISSLNSVHCKHIEEGGESRYMITDIIGKDDGLGVENLRGSGMIAGESSLAYEEIVTISLVTCRAIGIGAYLVRLGQRVIQVENSHIILTGASALNKVLGREVYTSNNQLGGVQIMHYNGVSHITVPDDFEGVYTILEWLSYMPKDNHSPVPIITPTDPIDREIEFLPSRAPYDPRWMLAGRPHPTLKGTWQSGFFDHGSFKEIMAPWAQTVVTGRARLGGIPVGVIAVETRTVEVAVPADPANLDSEAKIIQQAGQVWFPDSAYKTAQAVKDFNREKLPLMIFANWRGFSGGMKDMYDQVLKFGAYIVDGLRQYKQPILIYIPPYAELRGGSWVVIDATINPLCIEMYADKESRGGVLEPEGTVEIKFRKKDLIKSMRRIDPAYKKLMEQLGEPDLSDKDRKDLEGRLKAREDLLLPIYHQVAVQFADFHDTPGRMLEKGVISDILEWKTARTFLYWRLRRLLLEDQVKQEILQASGELSHVHIQSMLRRWFVETEGAVKAYLWDNNQVVVQWLEQHWQAGDGPRSTIRENITYLKHDSVLKTIRGLVEENPEVAVDCVIYLSQHISPAERAQVVHLLSTMDSPAST

SEQ ID NO: 19286 - protein, 2388 aa, Homo sapiens
MVLLLCLSCLIFSCLTFSWLKIWGKMTDSKPITKSKSEANLIPSQEPFPASDNSGETPQRNGEGHTLPKTPSQAEPASHKGPKDAGRRRNSLPPSHQKPPRNPLSSSDAAPSPELQANGTGTQGLEATDTNGLSSSARPQGQQAGSPSKEDKKQANIKRQLMTNFILGSFDDYSSDEDSVAGSSRESTRKGSRASLGALSLEAYLTTGEAETRVPTMRPSMSGLHLVKRGREHKKLDLHRDFTVASPAEFVTRFGGDRVIEKVLIANNGIAAVKCMRSIRRWAYEMFRNERAIRFVVMVTPEDLKANAEYIKMADHYVPVPGGPNNNNYANVELIVDIAKRIPVQAVWAGWGHASENPKLPELLCKNGVAFLGPPSEAMWALGDKIASTVVAQTLQVPTLPWSGSGLTVEWTEDDLQQGKRISVPEDVYDKGCVKDVDEGLEAAERIGFPLMIKASEGGGGKGIRKAESAEDFPILFRQVQSEIPGSPIFLMKLAQHARHLEVQILADQYGNAVSLFGRDCSIQRRHQKIVEEAPATIAPLAIFEFMEQCAIRLAKTVGYVSAGTVEYLYSQDGSFHFLELNPRLQVEHPCTEMIADVNLPAAQLQIAMGVPLHRLKDIRLLYGESPWGVTPISFETPSNPPLARGHVIAARITSENPDEGFKPSSGTVQELNFRSSKNVWGYFSVAATGGLHEFADSQFGHCFSWGENREEAISNMVVALKELSIRGDFRTTVEYLINLLETESFQNNDIDTGWLDYLIAEKVQAEKPDIMLGVVCGALNVADAMFRTCMTDFLHSLERGQVLPADSLLNLVDVELIYGGVKYILKVARQSLTMFVLIMNGCHIEIDAHRLNDGGLLLSYNGNSYTTYMKEEVDSYRITIGNKTCVFEKENDPTVLRSPSAGKLTQYTVEDGGHVEAGSSYAEMEVMKMIMTLNVQERGRVKYIKRPGAVLEAGCVVARLELDDPSKVHPAEPFTGELPAQQTLPILGEKLHQVFHSVLENLTNVMSGFCLPEPVFSIKLKEWVQKLMMTLRHPSLPLLELQEIMTSVAGRIPAPVEKSVRRVMAQYASNITSVLCQFPSQQIATILDCHAATLQRKADREVFFINTQSIVQLVQRIDELCGPDPSLSDELISILNELTQLSKSEHCKVALRARQILIASHLPSYELRHNQVESIFLSAIDMYGHQFCPENLKKLILSETTIFDVLPTFFYHANKVVCMASLEVYVRRGYIAYELNSLQHRQLPDGTCVVEFQFMLPSSHPNRMTVPISITNPDLLRHSTELFMDSGFSPLCQRMGAMVAFRRFEDFTRNFDEVISCFANVPKDTPLFSEARTSLYSEDDCKSLREEPIHILNVSIQCADHLEDEALVPILRTFVQSKKNILVDYGLRRITFLIAQEKEFPKFFTFRARDEFAEDRIYRHLEPALAFQLELNRMRNFDLTAVPCANHKMHLYLGAAKVKEGVEVTDHRFFIRAIIRHSDLITKEASFEYLQNEGERLLLEAMDELEVAFNNTSVRTDCNHIFLNFVPTVIMDPFKIEESVRYMVMRYGSRLWKLRVLQAEVKINIRQTTTGSAVPIRLFITNESGYYLDISLYKEVTDSRSGNIMFHSFGNKQGPQHGMLINTPYVTKDLLQAKRFQAQTLGTTYIYDFPEMFRQALFKLWGSPDKYPKDILTYTELVLDSQGQLVEMNRLPGGNEVGMVAFKMRFKTQEYPEGRDVIVIGNDITFRIGSFGPGEDLLYLRASEMARAEGIPKIYVAANSGARIGMAEEIKHMFHVAWVDPEDPHKGFKYLYLTPQDYTRISSLNSVHCKHIEEGGESRYMITDIIGKDDGLGVENLRGSGMIAGESSLAYEEIVTISLVTCRAIGIGAYLVRLGQRVIQVENSHIILTGASALNKVLGREVYTSNNQLGGVQIMHYNGVSHITVPDDFEGVYTILEWLSYMPKDNHSPVPIITPTDPIDREIEFLPSRAPYDPRWMLAGRPHPTLKGTWQSGFFDHGSFKEIMAPWAQTVVTGRARLGGIPVGVIAVETRTVEVAVPADPANLDSEAKIIQQAGQVWFPDSAYKTAQAVKDFNREKLPLMIFANWRGFSGGMKDMYDQVLKFGAYIVDGLRQYKQPILIYIPPYAELRGGSWVVIDATINPLCIEMYADKESRGGVLEPEGTVEIKFRKKDLIKSMRRIDPAYKKLMEQLGEPDLSDKDRKDLEGRLKAREDLLLPIYHQVAVQFADFHDTPGRMLEKGVISDILEWKTARTFLYWRLRRLLLEDQVKQEILQASGELSHVHIQSMLRRWFVETEGAVKAYLWDNNQVVVQWLEQHWQAGDGPRSTIRENITYLKHDSVLKTIRGLVEENPEVAVDCVIYLSQHISPAERAQVVHLLSTMDSPAST

SEQ ID NO: 19287 - protein, 2256 aa, Homo sapiens
MSPAKCKICFPDREVKPSMSGLHLVKRGREHKKLDLHRDFTVASPAEFVTRFGGDRVIEKVLIANNGIAAVKCMRSIRRWAYEMFRNERAIRFVVMVTPEDLKANAEYIKMADHYVPVPGGPNNNNYANVELIVDIAKRIPVQAVWAGWGHASENPKLPELLCKNGVAFLGPPSEAMWALGDKIASTVVAQTLQVPTLPWSGSGLTVEWTEDDLQQGKRISVPEDVYDKGCVKDVDEGLEAAERIGFPLMIKASEGGGGKGIRKAESAEDFPILFRQVQSEIPGSPIFLMKLAQHARHLEVQILADQYGNAVSLFGRDCSIQRRHQKIVEEAPATIAPLAIFEFMEQCAIRLAKTVGYVSAGTVEYLYSQDGSFHFLELNPRLQVEHPCTEMIADVNLPAAQLQIAMGVPLHRLKDIRLLYGESPWGVTPISFETPSNPPLARGHVIAARITSENPDEGFKPSSGTVQELNFRSSKNVWGYFSVAATGGLHEFADSQFGHCFSWGENREEAISNMVVALKELSIRGDFRTTVEYLINLLETESFQNNDIDTGWLDYLIAEKVQAEKPDIMLGVVCGALNVADAMFRTCMTDFLHSLERGQVLPADSLLNLVDVELIYGGVKYILKVARQSLTMFVLIMNGCHIEIDAHRLNDGGLLLSYNGNSYTTYMKEEVDSYRITIGNKTCVFEKENDPTVLRSPSAGKLTQYTVEDGGHVEAGSSYAEMEVMKMIMTLNVQERGRVKYIKRPGAVLEAGCVVARLELDDPSKVHPAEPFTGELPAQQTLPILGEKLHQVFHSVLENLTNVMSGFCLPEPVFSIKLKEWVQKLMMTLRHPSLPLLELQEIMTSVAGRIPAPVEKSVRRVMAQYASNITSVLCQFPSQQIATILDCHAATLQRKADREVFFINTQSIVQLVQRYRSGIRGYMKTVVLDLLRRYLRVEHHFQQAHYDKCVINLREQFKPDMSQVLDCIFSHAQVAKKNQLVIMLIDELCGPDPSLSDELISILNELTQLSKSEHCKVALRARQILIASHLPSYELRHNQVESIFLSAIDMYGHQFCPENLKKLILSETTIFDVLPTFFYHANKVVCMASLEVYVRRGYIAYELNSLQHRQLPDGTCVVEFQFMLPSSHPNRMTVPISITNPDLLRHSTELFMDSGFSPLCQRMGAMVAFRRFEDFTRNFDEVISCFANVPKDTPLFSEARTSLYSEDDCKSLREEPIHILNVSIQCADHLEDEALVPILRTFVQSKKNILVDYGLRRITFLIAQEKEFPKFFTFRARDEFAEDRIYRHLEPALAFQLELNRMRNFDLTAVPCANHKMHLYLGAAKVKEGVEVTDHRFFIRAIIRHSDLITKEASFEYLQNEGERLLLEAMDELEVAFNNTSVRTDCNHIFLNFVPTVIMDPFKIEESVRYMVMRYGSRLWKLRVLQAEVKINIRQTTTGSAVPIRLFITNESGYYLDISLYKEVTDSRSGNIMFHSFGNKQGPQHGMLINTPYVTKDLLQAKRFQAQTLGTTYIYDFPEMFRQALFKLWGSPDKYPKDILTYTELVLDSQGQLVEMNRLPGGNEVGMVAFKMRFKTQEYPEGRDVIVIGNDITFRIGSFGPGEDLLYLRASEMARAEGIPKIYVAANSGARIGMAEEIKHMFHVAWVDPEDPHKGFKYLYLTPQDYTRISSLNSVHCKHIEEGGESRYMITDIIGKDDGLGVENLRGSGMIAGESSLAYEEIVTISLVTCRAIGIGAYLVRLGQRVIQVENSHIILTGASALNKVLGREVYTSNNQLGGVQIMHYNGVSHITVPDDFEGVYTILEWLSYMPKDNHSPVPIITPTDPIDREIEFLPSRAPYDPRWMLAGRPHPTLKGTWQSGFFDHGSFKEIMAPWAQTVVTGRARLGGIPVGVIAVETRTVEVAVPADPANLDSEAKIIQQAGQVWFPDSAYKTAQAVKDFNREKLPLMIFANWRGFSGGMKDMYDQVLKFGAYIVDGLRQYKQPILIYIPPYAELRGGSWVVIDATINPLCIEMYADKESRGGVLEPEGTVEIKFRKKDLIKSMRRIDPAYKKLMEQLGEPDLSDKDRKDLEGRLKAREDLLLPIYHQVAVQFADFHDTPGRMLEKGVISDILEWKTARTFLYWRLRRLLLEDQVKQEILQASGELSHVHIQSMLRRWFVETEGAVKAYLWDNNQVVVQWLEQHWQAGDGPRSTIRENITYLKHDSVLKTIRGLVEENPEVAVDCVIYLSQHISPAERAQVVHLLSTMDSPAST

SEQ ID NO: 19288 - protein, 766 aa, Homo sapiens
MRLWKAVVVTLAFMSVDICVTTAIYVFSHLDRSLLEDIRHFNIFDSVLDLWAACLYRSCLLLGATIGVAKNSALGPRRLRASWLVITLVCLFVGIYAMVKLLLFSEVRRPIRDPWFWALFVWTYISLGASFLLWWLLSTVRPGTQALEPGAATEAEGFPGSGRPPPEQASGATLQKLLSYTKPDVAFLVAASFFLIVAALGETFLPYYTGRAIDGIVIQKSMDQFSTAVVIVCLLAIGSSFAAGIRGGIFTLIFARLNIRLRNCLFRSLVSQETSFFDENRTGDLISRLTSDTTMVSDLVSQNINVFLRNTVKVTGVVVFMFSLSWQLSLVTFMGFPIIMMVSNIYGKYYKRLSKEVQNALARASNTAEETISAMKTVRSFANEEEEAEVYLRKLQQVYKLNRKEAAAYMYYVWGSGLTLLVVQVSILYYGGHLVISGQMTSGNLIAFIIYEFVLGDCMESVGSVYSGLMQGVGAAEKVFEFIDRQPTMVHDGSLAPDHLEGRVDFENVTFTYRTRPHTQVLQNVSFSLSPGKVTALVGPSGSGKSSCVNILENFYPLEGGRVLLDGKPISAYDHKYLHRVISLVSQEPVLFARSITDNISYGLPTVPFEMVVEAAQKANAHGFIMELQDGYSTETGEKGAQLSGGQKQRVAMARALVRNPPVLILDEATSALDAESEYLIQQAIHGNLQKHTVLIIAHRLSTVEHAHLIVVLDKGRVVQQGTHQQLLAQGGLYAKLVQRQMLGLQPAADFTAGHNEPVANGSHKA

SEQ ID NO: 19289 - protein, 723 aa, Homo sapiens
MRLWKAVVVTLAFMSVDICVTTAIYVFSHLDRSLLEDIRHFNIFDSVLDLWAACLYRSCLLLGATIGVAKNSALGPRRLRASWLVITLVCLFVGIYAMVKLLLFSEVRRPIRDPWFWALFVWTYISLGASFLLWWLLSTVRPGTQALEPGAATEAEGFPGSGRPPPEQASGATLQKLLSYTKPDVAFLVAASFFLIVAALGETFLPYYTGRAIDGIVIQKSMDQFSTAVVIVCLLAIGSSFAAGIRGGIFTLIFARLNIRLRNCLFRSLVSQETSFFDENRTGDLISRLTSDTTMVSDLVSQNINVFLRNTVKVTGVVVFMFSLSWQLSLVTFMGFPIIMMVSNIYGKYYKRLSKEVQNALARASNTAEETISAMKTVRSFANEEEEAEVYLRKLQQVYKLNRKEAAAYMYYVWGSGSVGSVYSGLMQGVGAAEKVFEFIDRQPTMVHDGSLAPDHLEGRVDFENVTFTYRTRPHTQVLQNVSFSLSPGKVTALVGPSGSGKSSCVNILENFYPLEGGRVLLDGKPISAYDHKYLHRVISLVSQEPVLFARSITDNISYGLPTVPFEMVVEAAQKANAHGFIMELQDGYSTETGEKGAQLSGGQKQRVAMARALVRNPPVLILDEATSALDAESEYLIQQAIHGNLQKHTVLIIAHRLSTVEHAHLIVVLDKGRVVQQGTHQQLLAQGGLYAKLVQRQMLGLQPAADFTAGHNEPVANGSHKA

SEQ ID NO: 19290 - protein, 596 aa, Homo sapiens
MRLWKAVVVTLAFMSVDICVTTAIYVFSHLDRSLLEDIRHFNIFDSVLDLWAACLYRSCLLLGATIGVAKNSALGPRRLRASWLVITLVCLFVGIYAMVKLLLFSEVRRPIRDPWFWALFVWTYISLGASFLLWWLLSTVRPGTQALEPGAATEAEGFPGSGRPPPEQASGATLQKLLSYTKPDVAFLVAASFFLIVAALGETFLPYYTGRAIDGIVIQKSMDQFSTAVVIVCLLAIGSSFAAGIRGGIFTLIFARLNIRLRNCLFRSLVSQETSFFDENRTGDLISRLTSDTTMVSDLVSQNINVFLRNTVKVTGVVVFMFSLSWQLSLVTFMGFPIIMMVSNIYGKYYKRLSKEVQNALARASNTAEETISAMKTVRSFANEEEEAEVYLRKLQQVYKLNRKEAAAYMYYVWGSGLTLLVVQVSILYYGGHLVISGQMTSGNLIAFIIYEFVLGDCMESVGSVYSGLMQGVGAAEKVFEFIDRQPTMVHDGSLAPDHLEGRVDFENVTFTYRTRPHTQVLQNVSFSLSPGKVTALVGPSGSGKSSCVNILENFYPLEGGRVLLDGKPISAYDHKYLHRVVCARAWATLLRPFCI

SEQ ID NO: 19291 - protein, 683 aa, Homo sapiens
MRLWKAVVVTLAFMSVDICVTTAIYVFSHLDRSLLEDIRHFNIFDSVLDLWAACLYRSCLLLGATIGVAKNSALGPRRLRASWLVITLVCLFVGIYAMVKLLLFSEVRRPIRDPWFWALFVWTYISLGASFLLWWLLSTVRPGTQALEPGAATEAEGFPGSGRPPPEQASGATLQKLLSYTKPDVAFLVAASFFLIVAALGETFLPYYTGRAIDGIVIQKSMDQFSTAVVIVCLLAIGSSFAAGIRGGIFTLIFARLNIRLRNCLFRSLVSQETSFFDENRTGDLISRLTSDTTMVSDLVSQNINVFLRNTVKVTGVVVFMFSLSWQLSLVTFMGFPIIMMVSNIYGKYYKRLSKEVQNALARASNTAEETISAMKTVRSFANEEEEAEVYLRKLQQVYKLNRKEAAAYMYYVWGSGLTLLVVQVSILYYGGHLVISGQMTSGNLIAFIIYEFVLGDCMESVGSVYSGLMQGVGAAEKVFEFIDRQPTMVHDGSLAPDHLEGRVDFENVTFTYRTRPHTQVLQNVSFSLSPGKVTALVGPSGSGKSSCVNILENFYPLEGGRVLLDGKPISAYDHKYLHRVISLVSQEPVLFARSITDNISYGLPTVPFEMVVEAAQKANAHGFIMELQDGYSTETGEKGAQLSGGQKQRVAMARALVRNPPVLILDEATSALDAESEYLCAG

SEQ ID NO: 19292 - protein, 681 aa, Homo sapiens
MRLWKAVVVTLAFMSVDICVTTAIYVFSHLDRSLLEDIRHFNIFDSVLDLWAACLYRSCLLLGATIGVAKNSALGPRRLRASWLVITLVCLFVGIYAMVKLLLFSEVRRPIRDPWFWALFVWTYISLGASFLLWWLLSTVRPGTQALEPGAATEAEGFPGSGRPPPEQASGATLQKLLSYTKPDVAFLVAASFFLIVAALGETFLPYYTGRAIDGIVIQKSMDQFSTAVVIVCLLAIGSSFAAGIRGGIFTLIFARLNIRLRNCLFRSLVSQETSFFDENRTGDLISRLTSDTTMVSDLVSQNINVFLRNTVKVTGVVVFMFSLSWQLSLVTFMGFPIIMMVSNIYGKYYKRLSKEVQNALARASNTAEETISAMKTVRSFANEEEEAEVYLRKLQQVYKLNRKEAAAYMYYVWGSGLTLLVVQVSILYYGGHLVISGQMTSGNLIAFIIYEFVLGDCMESVGSVYSGLMQGVGAAEKVFEFIDRQPTMVHDGSLAPDHLEGRVDFENVTFTYRTRPHTQVLQNVSFSLSPGKVTALVGPSGSGKSSCVNILENFYPLEGGRVLLDGKPISAYDHKYLHRVISLVSQEPVLFARSITDNISYGLPTVPFEMVVEAAQKANAHGFIMELQDGYSTETGEKGAQLSGGQKQRVAMARALVRNPPVLILDEATSALDAESEYLI

SEQ ID NO: 19293 - protein, 703 aa, Homo sapiens
MRLWKAVVVTLAFMSVDICVTTAIYVFSHLDRSLLEDIRHFNIFDSVLDLWAACLYRSCLLLGATIGVAKNSALGPRRLRASWLVITLVCLFVGIYAMVKLLLFSEVRRPIRDPWFWALFVWTYISLGASFLLWWLLSTVRPGTQALEPGAATEAEGFPGSGRPPPEQASGATLQKLLSYTKPDVAFLVAASFFLIVAALGETFLPYYTGRAIDGIVIQKSMDQFSTAVVIVCLLAIGSSFAAGIRGGIFTLIFARLNIRLRNCLFRSLVSQETSFFDENRTGDLISRLTSDTTMVSDLVSQNINVFLRNTVKVTGVVVFMFSLSWQLSLVTFMGFPIIMMVSNIYGKYYKRLSKEVQNALARASNTAEETISAMKTVRSFANEEEEAEVYLRKLQQVYKLNRKEAAAYMYYVWGSGLTLLVVQVSILYYGGHLVISGQMTSGNLIAFIIYEFVLGDCMENVSFSLSPGKVTALVGPSGSGKSSCVNILENFYPLEGGRVLLDGKPISAYDHKYLHRVISLVSQEPVLFARSITDNISYGLPTVPFEMVVEAAQKANAHGFIMELQDGYSTETGEKGAQLSGGQKQRVAMARALVRNPPVLILDEATSALDAESEYLIQQAIHGNLQKHTVLIIAHRLSTVEHAHLIVVLDKGRVVQQGTHQQLLAQGGLYAKLVQRQMLGLQPAADFTAGHNEPVANGSHKA

SEQ ID NO: 19294 - protein, 469 aa, Homo sapiens
MCVICFVKALVRVFKIYLTASYTYPFRGWPVAFRWDDVRAVGRSSSHRALTCAAAAAGVWLLRDETLGGDALGRPPRGARSQAQCLLQQLRELPGQLASYALAHSLGRWLVYPGSVSLMTRALLPLLQQGQERLVERYHGRRAKLVACDGNEIDTMFMDRRQHPGSHVHGPRLVICCEGNAGFYEMGCLSAPLEAGYSVLGWNHPGFGSSTGVPFPQHDANAMDVVVEYALHRLHFPPAHLVVYGWSVGGFTATWATMTYPELGALVLDATFDDLVPLALKVMPHSWKGLVVRTVREHFNLNVAEQLCCYPGPVLLLRRTQDDVVSTSGRLRPLSPGDVEGNRGNELLLRLLEHRYPVVMAREGRAVVTRWLRAGSLAQEAAFYARYRVDEDWCLALLRSYRARCEEELEGEEALGPHGPAFPWLVGQGLSSRRRRRLALFLARKHLKNVEATHFSPLEPEEFQLPWRL

SEQ ID NO: 19295 - protein, 752 aa, Homo sapiens
MALLAMHSWRWAAAAAAFEKRRHSAILIRPLVSVSGSGPQWRPHQLGALGTARAYQIPESLKSITWQRLGKGNSGQFLDAAKALQVWPLIEKRTCWHGHAGGGLHTDPKEGLKDVDTRKIIKAMLSYVWPKDRPDLRARVAISLGFLGGAKAMNIVVPFMFKYAVDSLNQMSGNMLNLSDAPNTVATMATAVLIGYGVSRAGAAFFNEVRNAVFGKVAQNSIRRIAKNVFLHLHNLDLGFHLSRQTGALSKAIDRGTRGISFVLSALVFNLLPIMFEVMLVSGVLYYKCGAQFALVTLGTLGTYTAFTVAVTRWRTRFRIEMNKADNDAGNAAIDSLLNYETVKYFNNERYEAQRYDGFLKTYETASLKSTSTLAMLNFGQSAIFSVGLTAIMVLASQGIVAGTLTVGDLVMVNGLLFQLSLPLNFLGTVYRETRQALIDMNTLFTLLKVDTQIKDKVMASPLQITPQTATVAFDNVHFEYIEGQKVLSGISFEVPAGKKVAIVGGSGSGKSTIVRLLFRFYEPQKGSIYLAGQNIQDVSLESLRRAVGVVPQDAVLFHNTIYYNLLYGNISASPEEVYAVAKLAGLHDAILRMPHGYDTQVGERGLKLSGGEKQRVAIARAILKDPPVILYDEATSSLDSITEETILGAMKDVVKHRTSIFIAHRLSTVVDADEIIVLDQGKVAERGTHHGLLANPHSIYSEMWHTQSSRVQNHDNPKWEAKKENISKEEERKKLQEEIVNSVKGCGNCSC

SEQ ID NO: 19296 - protein, 753 aa, Homo sapiens
MALLAMHSWRWAAAAAAFEKRRHSAILIRPLVSVSGSGPQWRPHQLGALGTARAYQQIPESLKSITWQRLGKGNSGQFLDAAKALQVWPLIEKRTCWHGHAGGGLHTDPKEGLKDVDTRKIIKAMLSYVWPKDRPDLRARVAISLGFLGGAKAMNIVVPFMFKYAVDSLNQMSGNMLNLSDAPNTVATMATAVLIGYGVSRAGAAFFNEVRNAVFGKVAQNSIRRIAKNVFLHLHNLDLGFHLSRQTGALSKAIDRGTRGISFVLSALVFNLLPIMFEVMLVSGVLYYKCGAQFALVTLGTLGTYTAFTVAVTRWRTRFRIEMNKADNDAGNAAIDSLLNYETVKYFNNERYEAQRYDGFLKTYETASLKSTSTLAMLNFGQSAIFSVGLTAIMVLASQGIVAGTLTVGDLVMVNGLLFQLSLPLNFLGTVYRETRQALIDMNTLFTLLKVDTQIKDKVMASPLQITPQTATVAFDNVHFEYIEGQKVLSGISFEVPAGKKVAIVGGSGSGKSTIVRLLFRFYEPQKGSIYLAGQNIQDVSLESLRRAVGVVPQDAVLFHNTIYYNLLYGNISASPEEVYAVAKLAGLHDAILRMPHGYDTQVGERGLKLSGGEKQRVAIARAILKDPPVILYDEATSSLDSITEETILGAMKDVVKHRTSIFIAHRLSTVVDADEIIVLDQGKVAERGTHHGLLANPHSIYSEMWHTQSSRVQNHDNPKWEAKKENISKEEERKKLQEEIVNSVKGCGNCSC

SEQ ID NO: 19297 - protein, 712 aa, Homo sapiens
MALLAMHSWRWAAAAAAFEKRRHSAILIRPLVSVSGSGPQWRPHQLGALGTARAYQIPESLKSITWQRLGKGNSGQFLDAAKALQVWPLIEKRTCWHGHAGGGLHTDPKEGAMNIVVPFMFKYAVDSLNQMSGNMLNLSDAPNTVATMATAVLIGYGVSRAGAAFFNEVRNAVFGKVAQNSIRRIAKNVFLHLHNLDLGFHLSRQTGALSKAIDRGTRGISFVLSALVFNLLPIMFEVMLVSGVLYYKCGAQFALVTLGTLGTYTAFTVAVTRWRTRFRIEMNKADNDAGNAAIDSLLNYETVKYFNNERYEAQRYDGFLKTYETASLKSTSTLAMLNFGQSAIFSVGLTAIMVLASQGIVAGTLTVGDLVMVNGLLFQLSLPLNFLGTVYRETRQALIDMNTLFTLLKVDTQIKDKVMASPLQITPQTATVAFDNVHFEYIEGQKVLSGISFEVPAGKKVAIVGGSGSGKSTIVRLLFRFYEPQKGSIYLAGQNIQDVSLESLRRAVGVVPQDAVLFHNTIYYNLLYGNISASPEEVYAVAKLAGLHDAILRMPHGYDTQVGERGLKLSGGEKQRVAIARAILKDPPVILYDEATSSLDSITEETILGAMKDVVKHRTSIFIAHRLSTVVDADEIIVLDQGKVAERGTHHGLLANPHSIYSEMWHTQSSRVQNHDNPKWEAKKENISKEEERKKLQEEIVNSVKGCGNCSC

SEQ ID NO: 19298 - protein, 526 aa, Homo sapiens
MAVFPSSGLPRCLLTLILLQLPKLDSAPFDVIGPPEPILAVVGEDAELPCRLSPNASAEHLELRWFRKKVSPAVLVHRDGREQEAEQMPEYRGRATLVQDGIAKGRVALRIRGVRVSDDGEYTCFFREDGSYEEALVHLKVAALGSDPHISMQVQENGEICLECTSVGWYPEPQVQWRTSKGEKFPSTSESRNPDEEGLFTVAASVIIRDTSAKNVSCYIQNLLLGQEKKVEISIPASSLPRLTPWIVAVAVILMVLGLLTIGSIFFTWRLYNERPRERRNEFSSKERLLEELKWKKATLHAVDVTLDPDTAHPHLFLYEDSKSVRLEDSRQKLPEKTERFDSWPCVLGRETFTSGRHYWEVEVGDRTDWAIGVCRENVMKKGFDPMTPENGFWAVELYGNGYWALTPLRTPLPLAGPPRRVGIFLDYESGDISFYNMNDGSDIYTFSNVTFSGPLRPFFCLWSSGKKPLTICPIADGPERVTVIANAQDLSKEIPLSPMGEDSAPRDADTLHSKLIPTQPSQGAP

SEQ ID NO: 19299 - protein, 479 aa, Homo sapiens
MANFTPVNGSSGNQSVRLVTSSSHNRYETVEMVFIATVTGSLSLVTVVGNILVMLSIKVNRQLQTVNNYFLFSLACADLIIGAFSMNLYTVYIIKGYWPLGAVVCDLWLALDYVVSNASVMNLLIISFDRYFCVTKPLTYPARRTTKMAGLMIAAAWVLSFVLWAPAILFWQFVVGKRTVPDNQCFIQFLSNPAVTFGTAIAAFYLPVVIMTVLYIHISLASRSRVHKHRPEGPKEKKAKTLAFLKSPLMKQSVKKPPPGEAAREELRNGKLEEAPPPALPPPPRPVADKDTSNESSSGSATQNTKERPATELSTTEATTPAMPAPPLQPRALNPASRWSKIQIVTKQTGNECVTAIEIVPATPAGMRPAANVARKFASIARNQVRKKRQMAARERKVTRTIFAILLAFILTWTPYNVMVLVNTFCQSCIPDTVWSIGYWLCYVNSTINPACYALCNATFKKTFRHLLLCQYRNIGTAR

SEQ ID NO: 19300 - protein, 415 aa, Homo sapiens
MLWSGCRRFGARLGCLPGGLRVLVQTGHRSLTSCIDPSMGLNEEQKEFQKVAFDFAAREMAPNMAEWDQKELFPVDVMRKAAQLGFGGVYIQTDVGGSGLSRLDTSVIFEALATGCTSTTAYISIHNMCAWMIDSFGNEEQRHKFCPPLCTMEKFASYCLTEPGSGSDAASLLTSAKKQGDHYILNGSKAFISGAGESDIYVVMCRTGGPGPKGISCIVVEKGTPGLSFGKKEKKVGWNSQPTRAVIFEDCAVPVANRIGSEGQGFLIAVRGLNGGRINIASCSLGAAHASVILTRDHLNVRKQFGEPLASNQYLQFTLADMATRLVAARLMVRNAAVALQEERKDAVALCSMAKLFATDECFAICNQALQMHGGYGYLKDYAVQQYVRDSRVHQILEGSNEVMRILISRSLLQE

SEQ ID NO: 19301 - protein, 288 aa, Homo sapiens
MLWSGCRRFGARLGCLPGGLRVLVQTGHRSLTSCIDRSGSDAASLLTSAKKQGDHYILNGSKAFISGAGESDIYVVMCRTGGPGPKGISCIVVEKGTPGLSFGKKEKKVGWNSQPTRAVIFEDCAVPVANRIGSEGQGFLIAVRGLNGGRINIASCSLGAAHASVILTRDHLNVRKQFGEPLASNQYLQFTLADMATRLVAARLMVRNAAVALQEERKDAVALCSMAKLFATDECFAICNQALQMHGGYGYLKDYAVQQYVRDSRVHQILEGSNEVMRILISRSLLQE

SEQ ID NO: 19302 - protein, 357 aa, Homo sapiens
MRKAAQLGFGGVYIQTDVGGSGLSRLDTSVIFEALATGCTSTTAYISIHNMCAWMIDSFGNEEQRHKFCPPLCTMEKFASYCLTEPGSGSDAASLLTSAKKQGDHYILNGSKAFISGAGESDIYVVMCRTGGPGPKGISCIVVEKGTPGLSFGKKEKKVGWNSQPTRAVIFEDCAVPVANRIGSEGQGFLIAVRGLNGGRINIASCSLGAAHASVILTRDHLNVRKQFGEPLASNQYLQFTLADMATRLVAARLMVRNAAVALQEERKDAVALCSMAKLFATDECFAICNQALQMHGGYGYLKDYAVQQYVRDSRVHQILEELFWQGPGVQSRSFVPFGGPQIALLLPFSSGDLREG

SEQ ID NO: 19303 - protein, 532 aa, Homo sapiens
MEGDSYHNATTVNGTPVNHQPLERHRLWEVITIAAVTAVVSLITIVGNVLVMISFKVNSQLKTVNNYYLLSLACADLIIGIFSMNLYTTYILMGRWALGSLACDLWLALDYVASNASVMNLLVISFDRYFSITRPLTYRAKRTPKRAGIMIGLAWLISFILWAPAILCWQYLVGKRTVPLDECQIQFLSEPTITFGTAIAAFYIPVSVMTILYCRIYRETEKRTKDLADLQGSDSVTKAEKRKPAHRALFRSCLRCPRPTLAQRERNQASWSSSRRSTSTTGKPSQATGPSANWAKAEQLTTCSSYPSSEDEDKPATDPVLQVVYKSQGKESPGEEFSAEETEETFVKAETEKSDYDTPNYLLSPAAAHRPKSQKCVAYKFRLVVKADGNQETNNGCHKVKIMPCPFPVAKEPSTKGLNPNPSHQMTKRKRVVLVKERKAAQTLSAILLAFIITWTPYNIMVLVSTFCDKCVPVTLWHLGYWLCYVNSTVNPICYALCNRTFRKTFKMLLLCRWKKKKVEEKLYWQGNSKLP

SEQ ID NO: 19304 - protein, 513 aa, Homo sapiens
MKMASFLAFLLLNFRVCLLLLQLLMPHSAQFSVLGPSGPILAMVGEDADLPCHLFPTMSAETMELKWVSSSLRQVVNVYADGKEVEDRQSAPYRGRTSILRDGITAGKAALRIHNVTASDSGKYLCYFQDGDFYEKALVELKVAALGSDLHVDVKGYKDGGIHLECRSTGWYPQPQIQWSNNKGENIPTVEAPVVADGVGLYAVAASVIMRGSSGEGVSCTIRSSLLGLEKTASISIADPFFRSAQRWIAALAGTLPVLLLLLGGAGYFLWQQQEEKKTQFRKKKREQELREMAWSTMKQEQSTRVKLLEELRWRSIQYASRGERHSAYNEWKKALFKPADVILDPKTANPILLVSEDQRSVQRAKEPQDLPDNPERFNWHYCVLGCESFISGRHYWEVEVGDRKEWHIGVCSKNVQRKGWVKMTPENGFWTMGLTDGNKYRTLTEPRTNLKLPKPPKKVGVFLDYETGDISFYNAVDGSHIHTFLDVSFSEALYPVFRILTLEPTALTICPA

SEQ ID NO: 19305 - protein, 352 aa, Homo sapiens
MKMASFLAFLLLNFRVCLLLLQLLMPHSAQFSVLGPSGPILAMVGEDADLPCHLFPTMSAETMELKWVSSSLRQVVNVYADGKEVEDRQSAPYRGRTSILRDGITAGKAALRIHNVTASDSGKYLCYFQDGDFYEKALVELKVAALGSDLHVDVKGYKDGGIHLECRSTGWYPQPQIQWSNNKGENIPTVEAPVVADGVGLYAVAASVIMRGSSGEGVSCTIRSSLLGLEKTASISIADPFFRSAQRWIAALAGTLPVLLLLLGGAGYFLWQQQEEKKTQFRKKKREQELREMAWSTMKQEQSTRVKLLEELRWRSIQYASRGERHSAYNEWKKALFKPGEEMLQMRLHFVK

SEQ ID NO: 19306 - protein, 378 aa, Homo sapiens
MKMASFLAFLLLNFRVCLLLLQLLMPHSAQFSVLGPSGPILAMVGEDADLPCHLFPTMSAETMELKWVSSSLRQVVNVYADGKEVEDRQSAPYRGRTSILRDGITAGKAALRIHNVTASDSGKYLCYFQDGDFYEKALVELKVAALGSDLHVDVKGYKDGGIHLECRSTGWYPQPQIQWSNNKGENIPTVEAPVVADGVGLYAVAASVIMRGSSGEGVSCTIRSSLLGLEKTASISIADPFFRSAQRWIAALAGTLPVLLLLLGGAGYFLWQQQEEKKTQFRKKKREQELREMAWSTMKQEQSTRVKLLEELRWRSIQYASRGERHSAYNEWKKALFKPGPPIGQTQQQTRGQGSPVALSQESAQRTDSWGPEEGGES

SEQ ID NO: 19307 - protein, 461 aa, Homo sapiens
MKMASFLAFLLLNFRVCLLLLQLLMPHSAQFSVLGPSGPILAMVGEDADLPCHLFPTMSAETMELKWVSSSLRQVVNVYADGKEVEDRQSAPYRGRTSILRDGITAGKAALRIHNVTASDSGKYLCYFQDGDFYEKALVELKVADGVGLYAVAASVIMRGSSGEGVSCTIRSSLLGLEKTASISIADPFFRSAQRWIAALAGTLPVLLLLLGGAGYFLWQQQEEKKTQFRKKKREQELREMAWSTMKQEQSTRVKLLEELRWRSIQYASRGERHSAYNEWKKALFKPADVILDPKTANPILLVSEDQRSVQRAKEPQDLPDNPERFNWHYCVLGCESFISGRHYWEVEVGDRKEWHIGVCSKNVQRKGWVKMTPENGFWTMGLTDGNKYRTLTEPRTNLKLPKPPKKVGVFLDYETGDISFYNAVDGSHIHTFLDVSFSEALYPVFRILTLEPTALTICPA

SEQ ID NO: 19308 - protein, 1321 aa, Homo sapiens
MSDSVILRSIKKFGEENDGFESDKSYNNDKKSRLQDEKKGDGVRVGFFQLFRFSSSTDIWLMFVGSLCAFLHGIAQPGVLLIFGTMTDVFIDYDVELQELQIPGKACVNNTIVWTNSSLNQNMTNGTRCGLLNIESEMIKFASYYAGIAVAVLITGYIQICFWVIAAARQIQKMRKFYFRRIMRMEIGWFDCNSVGELNTRFSDDINKINDAIADQMALFIQRMTSTICGFLLGFFRGWKLTLVIISVSPLIGIGAATIGLSVSKFTDYELKAYAKAGVVADEVISSMRTVAAFGGEKREVERYEKNLVFAQRWGIRKGIVMGFFTGFVWCLIFLCYALAFWYGSTLVLDEGEYTPGTLVQIFLSVIVGALNLGNASPCLEAFATGRAAATSIFETIDRKPIIDCMSEDGYKLDRIKGEIEFHNVTFHYPSRPEVKILNDLNMVIKPGEMTALVGPSGAGKSTALQLIQRFYDPCEGMVTVDGHDIRSLNIQWLRDQIGIVEQEPVLFSTTIAENIRYGREDATMEDIVQAAKEANAYNFIMDLPQQFDTLVGEGGGQMSGGQKQRVAIARALIRNPKILLLDMATSALDNESEAMVQEVLSKIQHGHTIISVAHRLSTVRAADTIIGFEHGTAVERGTHEELLERKGVYFTLVTLQSQGNQALNEEDIKDATEDDMLARTFSRGSYQDSLRASIRQRSKSQLSYLVHEPPLAVVDHKSTYEEDRKDKDIPVQEEVEPAPVRRILKFSAPEWPYMLVGSVGAAVNGTVTPLYAFLFSQILGTFSIPDKEEQRSQINGVCLLFVAMGCVSLFTQFLQGYAFAKSGELLTKRLRKFGFRAMLGQDIAWFDDLRNSPGALTTRLATDASQVQGAAGSQIGMIVNSFTNVTVAMIIAFSFSWKLSLVILCFFPFLALSGATQTRMLTGFASRDKQALEMVGQITNEALSNIRTVAGIGKERRFIEALETELEKPFKTAIQKANIYGFCFAFAQCIMFIANSASYRYGGYLISNEGLHFSYVFRVISAVVLSATALGRAFSYTPSYAKAKISAARFFQLLDRQPPISVYNTAGEKWDNFQGKIDFVDCKFTYPSRPDSQVLNGLSVSISPGQTLAFVGSSGCGKSTSIQLLERFYDPDQGKVMIDGHDSKKVNVQFLRSNIGIVSQEPVLFACSIMDNIKYGDNTKEIPMERVIAAAKQAQLHDFVMSLPEKYETNVGSQGSQLSRGEKQRIAIARAIVRDPKILLLDEATSALDTESEKTVQVALDKAREGRTCIVIAHRLSTIQNADIIAVMAQGVVIEKGTHEELMAQKGAYYKLVTTGSPIS

SEQ ID NO: 19309 - protein, 336 aa, Homo sapiens
MKIDIHSHILPKEWPDLKKRFGYGGWVQLQHHSKGEAKLLKDGKVFRVVRENCWDPEVRIREMDQKGVTVQALSTVPVMFSYWAKPEDTLNLCQLLNNDLASTVVSYPRRFVGLGTLPMQAPELAVKEMERCVKELGFPGVQIGTHVNEWDLNAQELFPVYAAAERLKCSLFVHPWDMQMDGRMAKYWLPWLVGMPAETTIAICSMIMGGVFEKFPKLKVCFAHGGGAFPFTVGRISHGFSMRPDLCAQDNPMNPKKYLGSFYTDALVHDPLSLKLLTDVIGKDKVILGTDYPFPLGELEPGKLIESMEEFDEETKNKLKAGNALAFLGLERKQFE

SEQ ID NO: 19310 - protein, 278 aa, Homo sapiens
MGKSSEWCERIAGIQKFVLEKWTKKAKPEDTLNLCQLLNNDLASTVVSYPRRFVGLGTLPMQAPELAVKEMERCVKELGFPGVQIGTHVNEWDLNAQELFPVYAAAERLKCSLFVHPWDMQMDGRMAKYWLPWLVGMPAETTIAICSMIMGGVFEKFPKLKVCFAHGGGAFPFTVGRISHGFSMRPDLCAQDNPMNPKKYLGSFYTDALVHDPLSLKLLTDVIGKDKVILGTDYPFPLGELEPGKLIESMEEFDEETKNKLKAGNALAFLGLERKQFE

SEQ ID NO: 19311 - protein, 1863 aa, Homo sapiens
MDLSALRVEEVQNVINAMQKILECPICLELIKEPVSTKCDHIFCKFCMLKLLNQKKGPSQCPLCKNDITKRSLQESTRFSQLVEELLKIICAFQLDTGLEYANSYNFAKKENNSPEHLKDEVSIIQSMGYRNRAKRLLQSEPENPSLQETSLSVQLSNLGTVRTLRTKQRIQPQKTSVYIELGSDSSEDTVNKATYCSVGDQELLQITPQGTRDEISLDSAKKAACEFSETDVTNTEHHQPSNNDLNTTEKRAAERHPEKYQGSSVSNLHVEPCGTNTHASSLQHENSSLLLTKDRMNVEKAEFCNKSKQPGLARSQHNRWAGSKETCNDRRTPSTEKKVDLNADPLCERKEWNKQKLPCSENPRDTEDVPWITLNSSIQKVNEWFSRSDELLGSDDSHDGESESNAKVADVLDVLNEVDEYSGSSEKIDLLASDPHEALICKSERVHSKSVESNIEDKIFGKTYRKKASLPNLSHVTENLIIGAFVTEPQIIQERPLTNKLKRKRRPTSGLHPEDFIKKADLAVQKTPEMINQGTNQTEQNGQVMNITNSGHENKTKGDSIQNEKNPNPIESLEKESAFKTKAEPISSSISNMELELNIHNSKAPKKNRLRRKSSTRHIHALELVVSRNLSPPNCTELQIDSCSSSEEIKKKKYNQMPVRHSRNLQLMEGKEPATGAKKSNKPNEQTSKRHDSDTFPELKLTNAPGSFTKCSNTSELKEFVNPSLPREEKEEKLETVKVSNNAEDPKDLMLSGERVLQTERSVESSSISLVPGTDYGTQESISLLEVSTLGKAKTEPNKCVSQCAAFENPKGLIHGCSKDNRNDTEGFKYPLGHEVNHSRETSIEMEESELDAQYLQNTFKVSKRQSFAPFSNPGNAEEECATFSAHSGSLKKQSPKVTFECEQKEENQGKNESNIKPVQTVNITAGFPVVGQKDKPVDNAKCSIKGGSRFCLSSQFRGNETGLITPNKHGLLQNPYRIPPLFPIKSFVKTKCKKNLLEENFEEHSMSPEREMGNENIPSTVSTISRNNIRENVFKEASSSNINEVGSSTNEVGSSINEIGSSDENIQAELGRNRGPKLNAMLRLGVLQPEVYKQSLPGSNCKHPEIKKQEYEEVVQTVNTDFSPYLISDNLEQPMGSSHASQVCSETPDDLLDDGEIKEDTSFAENDIKESSAVFSKSVQKGELSRSPSPFTHTHLAQGYRRGAKKLESSEENLSSEDEELPCFQHLLFGKVNNIPSQSTRHSTVATECLSKNTEENLLSLKNSLNDCSNQVILAKASQEHHLSEETKCSASLFSSQCSELEDLTANTNTQDPFLIGSSKQMRHQSESQGVGLSDKELVSDDEERGTGLEENNQEEQSMDSNLGEAASGCESETSVSEDCSGLSSQSDILTTQQRDTMQHNLIKLQQEMAELEAVLEQHGSQPSNSYPSIISDSSALEDLRNPEQSTSEKAVLTSQKSSEYPISQNPEGLSADKFEVSADSSTSKNKEPGVERSSPSKCPSLDDRWYMHSCSGSLQNRNYPSQEELIKVVDVEEQQLEESGPHDLTETSYLPRQDLEGTPYLESGISLFSDDPESDPSEDRAPESARVGNIPSSTSALKVPQLKVAESAQSPAAAHTTDTAGYNAMEESVSREKPELTASTERVNKRMSMVVSGLTPEEFMLVYKFARKHHITLTNLITEETTHVVMKTDAEFVCERTLKYFLGIAGGKWVVSYFWVTQSIKERKMLNEHDFEVRGDVVNGRNHQGPKRARESQDRKIFRGLEICCYGPFTNMPTDQLEWMVQLCGASVVKELSSFTLGTGVHPIVVVQPDAWTEDNGFHAIGQMCEAPVVTREWVLDSVALYQCQELDTYLIPQIPHSHY

SEQ ID NO: 19312 - protein, 63 aa, Homo sapiens
MDLSALRVEEVQNVINAMQKILECPICLELIKEPVSTKCDHIFCKFCMLKLLNQKKGPSQCPL

SEQ ID NO: 19313 - protein, 759 aa, Homo sapiens
MDLSALRVEEVQNVINAMQKILECPICLELIKEPVSTKCDHIFCKFCMLKLLNQKKGPSQCPLCKNDITKRSLQESTRFSQLVEELLKIICAFQLDTGLEYANSYNFAKKENNSPEHLKDEVSIIQSMGYRNRAKRLLQSEPENPSLQETSLSVQLSNLGTVRTLRTKQRIQPQKTSVYIELGSDSSEDTVNKATYCSVGDQELLQITPQGTRDEISLDSAKKAACEFSETDVTNTEHHQPSNNDLNTTEKRAAERHPEKYQGEAASGCESETSVSEDCSGLSSQSDILTTQQRDTMQHNLIKLQQEMAELEAVLEQHGSQPSNSYPSIISDSSALEDLRNPEQSTSEKVLTSQKSSEYPISQNPEGLSADKFEVSADSSTSKNKEPGVERSSPSKCPSLDDRWYMHSCSGSLQNRNYPSQEELIKVVDVEEQQLEESGPHDLTETSYLPRQDLEGTPYLESGISLFSDDPESDPSEDRAPESARVGNIPSSTSALKVPQLKVAESAQSPAAAHTTDTAGYNAMEESVSREKPELTASTERVNKRMSMVVSGLTPEEFMLVYKFARKHHITLTNLITEETTHVVMKTDAEFVCERTLKYFLGIAGGKWVVSYFWVTQSIKERKMLNEHDFEVRGDVVNGRNHQGPKRARESQDRKIFRGLEICCYGPFTNMPTDQLEWMVQLCGASVVKELSSFTLGTGVHPIVVVQPDAWTEDNGFHAIGQMCEAPVVTREWVLDSVALYQCQELDTYLIPQIPHSHY

SEQ ID NO: 19314 - protein, 1846 aa, Homo sapiens
MQKILECPICLELIKEPVSTKCDHIFCKFCMLKLLNQKKGPSQCPLCKNDITKRSLQESTRFSQLVEELLKIICAFQLDTGLEYANSYNFAKKENNSPEHLKDEVSIIQSMGYRNRAKRLLQSEPENPSLQETSLSVQLSNLGTVRTLRTKQRIQPQKTSVYIELGSDSSEDTVNKATYCSVGDQELLQITPQGTRDEISLDSAKKAACEFSETDVTNTEHHQPSNNDLNTTEKRAAERHPEKYQGSSVSNLHVEPCGTNTHASSLQHENSSLLLTKDRMNVEKAEFCNKSKQPGLARSQHNRWAGSKETCNDRRTPSTEKKVDLNADPLCERKEWNKQKLPCSENPRDTEDVPWITLNSSIQKVNEWFSRSDELLGSDDSHDGESESNAKVADVLDVLNEVDEYSGSSEKIDLLASDPHEALICKSERVHSKSVESNIEDKIFGKTYRKKASLPNLSHVTENLIIGAFVTEPQIIQERPLTNKLKRKRRPTSGLHPEDFIKKADLAVQKTPEMINQGTNQTEQNGQVMNITNSGHENKTKGDSIQNEKNPNPIESLEKESAFKTKAEPISSSISNMELELNIHNSKAPKKNRLRRKSSTRHIHALELVVSRNLSPPNCTELQIDSCSSSEEIKKKKYNQMPVRHSRNLQLMEGKEPATGAKKSNKPNEQTSKRHDSDTFPELKLTNAPGSFTKCSNTSELKEFVNPSLPREEKEEKLETVKVSNNAEDPKDLMLSGERVLQTERSVESSSISLVPGTDYGTQESISLLEVSTLGKAKTEPNKCVSQCAAFENPKGLIHGCSKDNRNDTEGFKYPLGHEVNHSRETSIEMEESELDAQYLQNTFKVSKRQSFAPFSNPGNAEEECATFSAHSGSLKKQSPKVTFECEQKEENQGKNESNIKPVQTVNITAGFPVVGQKDKPVDNAKCSIKGGSRFCLSSQFRGNETGLITPNKHGLLQNPYRIPPLFPIKSFVKTKCKKNLLEENFEEHSMSPEREMGNENIPSTVSTISRNNIRENVFKEASSSNINEVGSSTNEVGSSINEIGSSDENIQAELGRNRGPKLNAMLRLGVLQPEVYKQSLPGSNCKHPEIKKQEYEEVVQTVNTDFSPYLISDNLEQPMGSSHASQVCSETPDDLLDDGEIKEDTSFAENDIKESSAVFSKSVQKGELSRSPSPFTHTHLAQGYRRGAKKLESSEENLSSEDEELPCFQHLLFGKVNNIPSQSTRHSTVATECLSKNTEENLLSLKNSLNDCSNQVILAKASQEHHLSEETKCSASLFSSQCSELEDLTANTNTQDPFLIGSSKQMRHQSESQGVGLSDKELVSDDEERGTGLEENNQEEQSMDSNLGEAASGCESETSVSEDCSGLSSQSDILTTQQRDTMQHNLIKLQQEMAELEAVLEQHGSQPSNSYPSIISDSSALEDLRNPEQSTSEKAVLTSQKSSEYPISQNPEGLSADKFEVSADSSTSKNKEPGVERSSPSKCPSLDDRWYMHSCSGSLQNRNYPSQEELIKVVDVEEQQLEESGPHDLTETSYLPRQDLEGTPYLESGISLFSDDPESDPSEDRAPESARVGNIPSSTSALKVPQLKVAESAQSPAAAHTTDTAGYNAMEESVSREKPELTASTERVNKRMSMVVSGLTPEEFMLVYKFARKHHITLTNLITEETTHVVMKTDAEFVCERTLKYFLGIAGGKWVVSYFWVTQSIKERKMLNEHDFEVRGDVVNGRNHQGPKRARESQDRKIFRGLEICCYGPFTNMPTDQLEWMVQLCGASVVKELSSFTLGTGVHPIVVVQPDAWTEDNGFHAIGQMCEAPVVTREWVLDSVALYQCQELDTYLIPQIPHSHY

SEQ ID NO: 19315 - protein, 721 aa, Homo sapiens
MDLSALRVEEVQNVINAMQKILECPICLELIKEPVSTKCDHIFCKFCMLKLLNQKKGPSQCPLCKNDITKRSLQESTRFSQLVEELLKIICAFQLDTGLEYANSYNFAKKENNSPEHLKDEVSIIQSMGYRNRAKRLLQSEPENPSLQETSLSVQLSNLGTVRTLRTKQRIQPQKTSVYIELGSDSSEDTVNKATYCSVGDQELLQITPQGTRDEISLDSAKKGEAASGCESETSVSEDCSGLSSQSDILTTQQRDTMQHNLIKLQQEMAELEAVLEQHGSQPSNSYPSIISDSSALEDLRNPEQSTSEKAVLTSQKSSEYPISQNPEGLSADKFEVSADSSTSKNKEPGVERSSPSKCPSLDDRWYMHSCSGSLQNRNYPSQEELIKVVDVEEQQLEESGPHDLTETSYLPRQDLEGTPYLESGISLFSDDPESDPSEDRAPESARVGNIPSSTSALKVPQLKVAESAQSPAAAHTTDTAGYNAMEESVSREKPELTASTERVNKRMSMVVSGLTPEEFMLVYKFARKHHITLTNLITEETTHVVMKTDAEFVCERTLKYFLGIAGGKWVVSYFWVTQSIKERKMLNEHDFEVRGDVVNGRNHQGPKRARESQDRKIFRGLEICCYGPFTNMPTDQLEWMVQLCGASVVKELSSFTLGTGVHPIVVVQPDAWTEDNGFHAIGQMCEAPVVTREWVLDSVALYQCQELDTYLIPQIPHSHY

SEQ ID NO: 19316 - protein, 699 aa, Homo sapiens
MDLSALRVEEVQNVINAMQKILECPICLELIKEPVSTKCDHIFCKFCMLKLLNQKKGPSQCPLCKNDITKRSLQESTRFSQLVEELLKIICAFQLDTGLEYANSYNFAKKENNSPEHLKDEVSIIQSMGYRNRAKRLLQSEPENPSLQETSLSVQLSNLGTVRTLRTKQRIQPQKTSVYIELGSDSSEDTVNKATYCSVGDQELLQITPQGTRDEISLDSAKKAACEFSETDVTNTEHHQPSNNDLNTTEKRAAERHPEKYQGEAASGCESETSVSEDCSGLSSQSDILTTQQRDTMQHNLIKLQQEMAELEAVLEQHGSQPSNSYPSIISDSSALEDLRNPEQSTSEKVLTSQKSSEYPISQNPEGLSADKFEVSADSSTSKNKEPGVERSSPSKCPSLDDRWYMHSCSGSLQNRNYPSQEELIKVVDVEEQQLEESGPHDLTETSYLPRQDLEGTPYLESGISLFSDDPESDPSEDRAPESARVGNIPSSTSALKVPQLKVAESAQSPAAAHTTDTAGYNAMEESVSREKPELTASTERVNKRMSMVVSGLTPEEFMLVYKFARKHHITLTNLITEETTHVVMKTDAEFVCERTLKYFLGIAGGKWVVSYFWVTQSIKERKMLNEHDFEVRGDVVNGRNHQGPKRARESQDRKIFRGLEICCYGPFTNMPTGCPPNCGCAARCLDRGQWLPCNWADV

SEQ ID NO: 19317 - protein, 1884 aa, Homo sapiens
MDLSALRVEEVQNVINAMQKILECPICLELIKEPVSTKCDHIFCKFCMLKLLNQKKGPSQCPLCKNDITKRSLQESTRFSQLVEELLKIICAFQLDTGLEYANSYNFAKKENNSPEHLKDEVSIIQSMGYRNRAKRLLQSEPENPSLQETSLSVQLSNLGTVRTLRTKQRIQPQKTSVYIELGSDSSEDTVNKATYCSVGDQELLQITPQGTRDEISLDSAKKAACEFSETDVTNTEHHQPSNNDLNTTEKRAAERHPEKYQGSSVSNLHVEPCGTNTHASSLQHENSSLLLTKDRMNVEKAEFCNKSKQPGLARSQHNRWAGSKETCNDRRTPSTEKKVDLNADPLCERKEWNKQKLPCSENPRDTEDVPWITLNSSIQKVNEWFSRSDELLGSDDSHDGESESNAKVADVLDVLNEVDEYSGSSEKIDLLASDPHEALICKSERVHSKSVESNIEDKIFGKTYRKKASLPNLSHVTENLIIGAFVTEPQIIQERPLTNKLKRKRRPTSGLHPEDFIKKADLAVQKTPEMINQGTNQTEQNGQVMNITNSGHENKTKGDSIQNEKNPNPIESLEKESAFKTKAEPISSSISNMELELNIHNSKAPKKNRLRRKSSTRHIHALELVVSRNLSPPNCTELQIDSCSSSEEIKKKKYNQMPVRHSRNLQLMEGKEPATGAKKSNKPNEQTSKRHDSDTFPELKLTNAPGSFTKCSNTSELKEFVNPSLPREEKEEKLETVKVSNNAEDPKDLMLSGERVLQTERSVESSSISLVPGTDYGTQESISLLEVSTLGKAKTEPNKCVSQCAAFENPKGLIHGCSKDNRNDTEGFKYPLGHEVNHSRETSIEMEESELDAQYLQNTFKVSKRQSFAPFSNPGNAEEECATFSAHSGSLKKQSPKVTFECEQKEENQGKNESNIKPVQTVNITAGFPVVGQKDKPVDNAKCSIKGGSRFCLSSQFRGNETGLITPNKHGLLQNPYRIPPLFPIKSFVKTKCKKNLLEENFEEHSMSPEREMGNENIPSTVSTISRNNIRENVFKEASSSNINEVGSSTNEVGSSINEIGSSDENIQAELGRNRGPKLNAMLRLGVLQPEVYKQSLPGSNCKHPEIKKQEYEEVVQTVNTDFSPYLISDNLEQPMGSSHASQVCSETPDDLLDDGEIKEDTSFAENDIKESSAVFSKSVQKGELSRSPSPFTHTHLAQGYRRGAKKLESSEENLSSEDEELPCFQHLLFGKVNNIPSQSTRHSTVATECLSKNTEENLLSLKNSLNDCSNQVILAKASQEHHLSEETKCSASLFSSQCSELEDLTANTNTQDPFLIGSSKQMRHQSESQGVGLSDKELVSDDEERGTGLEENNQEEQSMDSNLGEAASGCESETSVSEDCSGLSSQSDILTTQQRDTMQHNLIKLQQEMAELEAVLEQHGSQPSNSYPSIISDSSALEDLRNPEQSTSEKDSHIHGQRNNSMFSKRPREHISVLTSQKSSEYPISQNPEGLSADKFEVSADSSTSKNKEPGVERSSPSKCPSLDDRWYMHSCSGSLQNRNYPSQEELIKVVDVEEQQLEESGPHDLTETSYLPRQDLEGTPYLESGISLFSDDPESDPSEDRAPESARVGNIPSSTSALKVPQLKVAESAQSPAAAHTTDTAGYNAMEESVSREKPELTASTERVNKRMSMVVSGLTPEEFMLVYKFARKHHITLTNLITEETTHVVMKTDAEFVCERTLKYFLGIAGGKWVVSYFWVTQSIKERKMLNEHDFEVRGDVVNGRNHQGPKRARESQDRKIFRGLEICCYGPFTNMPTDQLEWMVQLCGASVVKELSSFTLGTGVHPIVVVQPDAWTEDNGFHAIGQMCEAPVVTREWVLDSVALYQCQELDTYLIPQIPHSHY

SEQ ID NO: 19318 - protein, 1816 aa, Homo sapiens
MLKLLNQKKGPSQCPLCKNDITKRSLQESTRFSQLVEELLKIICAFQLDTGLEYANSYNFAKKENNSPEHLKDEVSIIQSMGYRNRAKRLLQSEPENPSLQETSLSVQLSNLGTVRTLRTKQRIQPQKTSVYIELGSDSSEDTVNKATYCSVGDQELLQITPQGTRDEISLDSAKKAACEFSETDVTNTEHHQPSNNDLNTTEKRAAERHPEKYQGSSVSNLHVEPCGTNTHASSLQHENSSLLLTKDRMNVEKAEFCNKSKQPGLARSQHNRWAGSKETCNDRRTPSTEKKVDLNADPLCERKEWNKQKLPCSENPRDTEDVPWITLNSSIQKVNEWFSRSDELLGSDDSHDGESESNAKVADVLDVLNEVDEYSGSSEKIDLLASDPHEALICKSERVHSKSVESNIEDKIFGKTYRKKASLPNLSHVTENLIIGAFVTEPQIIQERPLTNKLKRKRRPTSGLHPEDFIKKADLAVQKTPEMINQGTNQTEQNGQVMNITNSGHENKTKGDSIQNEKNPNPIESLEKESAFKTKAEPISSSISNMELELNIHNSKAPKKNRLRRKSSTRHIHALELVVSRNLSPPNCTELQIDSCSSSEEIKKKKYNQMPVRHSRNLQLMEGKEPATGAKKSNKPNEQTSKRHDSDTFPELKLTNAPGSFTKCSNTSELKEFVNPSLPREEKEEKLETVKVSNNAEDPKDLMLSGERVLQTERSVESSSISLVPGTDYGTQESISLLEVSTLGKAKTEPNKCVSQCAAFENPKGLIHGCSKDNRNDTEGFKYPLGHEVNHSRETSIEMEESELDAQYLQNTFKVSKRQSFAPFSNPGNAEEECATFSAHSGSLKKQSPKVTFECEQKEENQGKNESNIKPVQTVNITAGFPVVGQKDKPVDNAKCSIKGGSRFCLSSQFRGNETGLITPNKHGLLQNPYRIPPLFPIKSFVKTKCKKNLLEENFEEHSMSPEREMGNENIPSTVSTISRNNIRENVFKEASSSNINEVGSSTNEVGSSINEIGSSDENIQAELGRNRGPKLNAMLRLGVLQPEVYKQSLPGSNCKHPEIKKQEYEEVVQTVNTDFSPYLISDNLEQPMGSSHASQVCSETPDDLLDDGEIKEDTSFAENDIKESSAVFSKSVQKGELSRSPSPFTHTHLAQGYRRGAKKLESSEENLSSEDEELPCFQHLLFGKVNNIPSQSTRHSTVATECLSKNTEENLLSLKNSLNDCSNQVILAKASQEHHLSEETKCSASLFSSQCSELEDLTANTNTQDPFLIGSSKQMRHQSESQGVGLSDKELVSDDEERGTGLEENNQEEQSMDSNLGEAASGCESETSVSEDCSGLSSQSDILTTQQRDTMQHNLIKLQQEMAELEAVLEQHGSQPSNSYPSIISDSSALEDLRNPEQSTSEKAVLTSQKSSEYPISQNPEGLSADKFEVSADSSTSKNKEPGVERSSPSKCPSLDDRWYMHSCSGSLQNRNYPSQEELIKVVDVEEQQLEESGPHDLTETSYLPRQDLEGTPYLESGISLFSDDPESDPSEDRAPESARVGNIPSSTSALKVPQLKVAESAQSPAAAHTTDTAGYNAMEESVSREKPELTASTERVNKRMSMVVSGLTPEEFMLVYKFARKHHITLTNLITEETTHVVMKTDAEFVCERTLKYFLGIAGGKWVVSYFWVTQSIKERKMLNEHDFEVRGDVVNGRNHQGPKRARESQDRKIFRGLEICCYGPFTNMPTDQLEWMVQLCGASVVKELSSFTLGTGVHPIVVVQPDAWTEDNGFHAIGQMCEAPVVTREWVLDSVALYQCQELDTYLIPQIPHSHY

SEQ ID NO: 19319 - protein, 158 aa, Homo sapiens
MNQEKLAKLQAQVRIGGKGTARRKKKVVHRTATADDKKLQSSLKKLAVNNIAGIEEVNMIKDDGTVIHFNNPKVQASLSANTFAITGHAEAKPITEMLPGILSQLGADSLTSLRKLAEQFPRQVLDSKAPKPEDIDEEDDDVPDLVENFDEASKNEAN

SEQ ID NO: 19320 - protein, 100 aa, Homo sapiens
MIKDDGTVIHFNNPKVQASLSANTFAITGHAEAKPITEMLPGILSQLGADSLTSLRKLAEQFPRQVLDSKAPKPEDIDEEDDDVPDLVENFDEASKNEAN

SEQ ID NO: 19321 - protein, 78 aa, Homo sapiens
MNQEKLAKLQAQVRIGGKGTARRKKKVVHRTATADDKKLQSSLKKLAVNNIAGIEESWTVKHQNQKTLMRKMMMFQIL

SEQ ID NO: 19322 - protein, 279 aa, Homo sapiens
MHCHAELRLSSPGQLKAARRRYKTFMIDEILSKETCDYFEKLSLYSVCPSLVVRPKPLHSCTGSPSLRAYPLLSVITRQPTVISHLVPATPGIAQALSCHQVTEAVSAEAPGGEALASSESETEQPTPRQKKPRRSRTIFTELQLMGLEKKFQKQKYLSTPDRLDLAQSLGLTQLQVKTWYQNRRMKWKKMVLKGGQEAPTKPKGRPKKNSIPTSEEIEAEEKMNSQAQGQEQLEPSQGQEELCEAQEPKARDVPLEMAEPPDPPQELPIPSSEPPPLS

SEQ ID NO: 19323 - protein, 87 aa, Homo sapiens
MYCLQWLLPVLLIPKPLNPALWFSHSMFMGFYLLSFLLERKPCTICALVFLAALFLICYSCWGNCFLYHCSDSPLPESAHDPGVVGT

SEQ ID NO: 19324 - protein, 485 aa, Homo sapiens
MAAELYAPASAAAADLANSNAGAAVGRKAGPRSPPSAPAPAPPPPAPAPPTLGNNHQESPGWRCCRPTLRERNALMFNNELMADVHFVVGPPGATRTVPAHKYVLAVGSSVFYAMFYGDLAEVKSEIHIPDVEPAAFLILLKYMYSDEIDLEADTVLATLYAAKKYIVPALAKACVNFLETSLEAKNACVLLSQSRLFEEPELTQRCWEVIDAQAEMALRSEGFCEIDRQTLEIIVTREALNTKEAVVFEAVLNWAEAECKRQGLPITPRNKRHVLGRALYLVRIPTMTLEEFANGAAQSDILTLEETHSIFLWYTATNKPRLDFPLTKRKGLAPQRCHRFQSSAYRSNQWRYRGRCDSIQFAVDRRVFIAGLGLYGSSSGKAEYSVKIELKRLGVVLAQNLTKFMSDGSSNTFPVWFEHPVQVEQDTFYTASAVLDGSELSYFGQEGMTEVQCGKVAFQFQCSSDSTNGTGVQGGQIPELIFYA

SEQ ID NO: 19325 - protein, 410 aa, Homo sapiens
MFNNELMADVHFVVGPPGATRTVPAHKYVLAVGSSVFYAMFYGDLAEVKSEIHIPDVEPAAFLILLKYMYSDEIDLEADTVLATLYAAKKYIVPALAKACVNFLETSLEAKNACVLLSQSRLFEEPELTQRCWEVIDAQAEMALRSEGFCEIDRQTLEIIVTREALNTKEAVVFEAVLNWAEAECKRQGLPITPRNKRHVLGRALYLVRIPTMTLEEFANGAAQSDILTLEETHSIFLWYTATNKPRLDFPLTKRKGLAPQRCHRFQSSAYRSNQWRYRGRCDSIQFAVDRRVFIAGLGLYGSSSGKAEYSVKIELKRLGVVLAQNLTKFMSDGSSNTFPVWFEHPVQVEQDTFYTASAVLDGSELSYFGQEGMTEVQCGKVAFQFQCSSDSTNGTGVQGGQIPELIFYA

SEQ ID NO: 19326 - protein, 412 aa, Homo sapiens
MAAALLARASGPARRALCPRAWRQLHTIYQSVELPETHQMLLQTCRDFAEKELFPIAAQVDKEHLFPAAQVKKMGGLGLLAMDVPEELGGAGLDYLAYAIAMEEISRGCASTGVIMSVNNSLYLGPILKFGSKEQKQAWVTPFTSGDKIGCFALSEPGNGSDAGAASTTARAEGDSWVLNGTKAWITNAWEASAAVVFASTDRALQNKGISAFLVPMPTPGLTLGKKEDKLGIRGSSTANLIFEDCRIPKDSILGEPGMGFKIAMQTLDMGRIGIASQALGIAQTALDCAVNYAENRMAFGAPLTKLQVIQFKLADMALALESARLLTWRAAMLKDNKKPFIKEAAMAKLAASEAATAISHQAIQILGGMGYVTEMPAERHYRDARITEIYEGTSEIQRLVIAGHLLRSYRS

SEQ ID NO: 19327 - protein, 119 aa, Homo sapiens
MGTRTLQFEISDSHEKEEDLLHKNHLMQDEIARLRLEIHTIKNQILEKKYLKDIEIIKRKHEDLQKALKQNGEKSTKTIAHYSGQLTALTDENTMLRSKLEKEKQSRQRLTKWNHTIVD

SEQ ID NO: 19328 - protein, 467 aa, Homo sapiens
MSSAPTTPPSVDKVDGFSRKSVRKARQKRSQSSSQFRSQGKPIELTPLPLLKDVPSSEQPELFLKKLQQCCVIFDFMDTLSDLKMKEYKRSTLNELVDYITISRGCLTEQTYPEVVRMVSCNIFRTLPPSDSNEFDPEEDEPTLEASWPHLQLVYEFFIRFLESQEFQPSIAKKYIDQKFVLQLLELFDSEDPRERDYLKTVLHRIYGKFLGLRAFIRKQINNIFLRFVYETEHFNGVAELLEILGSIINGFALPLKAEHKQFLVKVLIPLHTVRSLSLFHAQLAYCIVQFLEKDPSLTEPVIRGLMKFWPKTCSQKEVMFLGELEEILDVIEPSQFVKIQEPLFKQIAKCVSSPHFQVAERALYYWNNEYIMSLIEENSNVILPIMFSSLYRISKEHWNPAIVALVYNVLKAFMEMNSTMFDELTATYKSDRQREKKKEKEREELWKKLEDLELKRGLRRDGIIPT

SEQ ID NO: 19329 - protein, 462 aa, Homo sapiens
MSSAPTTPPSVDKVDGFSRKSVRKARQKRSQSSSQFRSQGKPIELTPLPLLKDVPSSEQPELFLKKLQQCCVIFDFMDTLSDLKMKEYKRSTLNELVDYITISRGCLTEQTYPEVVRMVSCNIFRTLPPSDSNEFDPEEDEPTLEASWPHLQLVYEFFIRFLESQEFQPSIAKKYIDQKFVLQLLELFDSEDPRERDYLKTVLHRIYGKFLGLRAFIRKQINNIFLRFVYETEHFNGVAELLEILGSIINGFALPLKAEHKQFLVKVLIPLHTVRSLSLFHAQLAYCIVQFLEKDPSLTEPVIRGLMKFWPKTCSQKEVMFLGELEEILDVIEPSQFVKIQEPLFKQIAKCVSSPHFQVAERALYYWNNEYIMSLIEENSNVILPIMFSSLYRISKEHWNPAIVALVYNVLKAFMEMNSTMFDELTATYNEKKKEKEREELWKKLEDLELKRGLRRDGIIPT

SEQ ID NO: 19330 - protein, 391 aa, Homo sapiens
MDTLSDLKMKEYKRSTLNELVDYITISRGCLTEQTYPEVVRMVSCNIFRTLPPSDSNEFDPEEDEPTLEASWPHLQLVYEFFIRFLESQEFQPSIAKKYIDQKFVLQLLELFDSEDPRERDYLKTVLHRIYGKFLGLRAFIRKQINNIFLRFVYETEHFNGVAELLEILGSIINGFALPLKAEHKQFLVKVLIPLHTVRSLSLFHAQLAYCIVQFLEKDPSLTEPVIRGLMKFWPKTCSQKEVMFLGELEEILDVIEPSQFVKIQEPLFKQIAKCVSSPHFQVAERALYYWNNEYIMSLIEENSNVILPIMFSSLYRISKEHWNPAIVALVYNVLKAFMEMNSTMFDELTATYKSDRQREKKKEKEREELWKKLEDLELKRGLRRDGIIPT

SEQ ID NO: 19331 - protein, 268 aa, Homo sapiens
MGTEKESPEPDCQKQFQAAVSVIQNLPKNGSYRPSYEEMLRFYSYYKQATMGPCLVPRPGFWDPIGRYKWDAWNSLGKMSREEAMSAYITEMKLVAQKVIDTVPLGEVAEDMFGYFEPLYQVIPDMPRPPETFLRRVTGWKEQVVNGDVGAVSEPPCLPKEPAPPSPESHSPRDLDSEVFCDSLEQLEPELSSGQHLEESVIPGTAPCPPQRKRGCGAARRGPRSWTCGCWGQFEHYRRACRRCRRGCRAWRACPGPLSSLTLSVRLE

SEQ ID NO: 19332 - protein, 305 aa, Homo sapiens
MGTEKESPEPDCQKQFQAAVSVIQNLPKNGSYRPSYEEMLRFYSYYKQATMGPCLVPRPGFWDPIGRYKWDAWNSLGKMSREEAMSAYITEMKLVAQKVIDTVPLGEVAEDMFGYFEPLYQVIPDMPRPPETFLRRVTGWKEQVVNGDVGAVSEPPCLPKEPAPPSPESHSPRDLDSEVFCDSLEQLEPELVWTEQRAASGGKRDPRNSPVPPTKKEGLRGSPPGPQELDVWLLGTVRALQESMQEVQARVQSLESMPRPPEQRPQPRPSARPWPLGLPGPALLFFLLWPFVVQWLFRMFRTQKR

SEQ ID NO: 19333 - protein, 341 aa, Homo sapiens
MGTEKESPEPDCQKQFQAAVSVIQNLPKNGSYRPSYEEMLRFYSYYKQATMGPCLVPRPGFWDPIGRYKWDAWNSLGKMSREEAMSAYITEMKLVAQKVIDTVPLGEVAEDMFGYFEPLYQVIPDMPRPPETFLRRVTGWKEQVVNGDVGAVSEPPCLPKEPAPPSPASLWAVTLPTPPQSPIHPGTWTPRFSVIPWSSWSLSWFGQSSGQHLEESVIPGTAPCPPQRKRGCGAARRGPRSWTCGCWGQFEHYRRACRRCRRGCRAWRACPGPLSRGRSPGPVLGHGPLGSRGPRCSSSSCGPSSSSGSSECFGPKRGDCQWRGLCSQLRLSCCALSLPRV

SEQ ID NO: 19334 - protein, 378 aa, Homo sapiens
MQLRLFRRLLLAALLLVIVWTLFGPSGLGEELLSLSLASLLPAPASPGPPLALPRLLIPNQEACSGPGAPPFLLILVCTAPENLNQRNAIRASWGGLREARGLRVQTLFLLGEPNAQHPVWGSQGSDLASESAAQGDILQAAFQDSYRNLTLKTLSGLNWAEKHCPMARYVLKTDDDVYVNVPELVSELVLRGGRWGQWERSTEPQREAEQEGGQVLHSEEVPLLYLGRVHWRVNPSRTPGGRHRVSEEQWPHTWGPFPPYASGTGYVLSASAVQLILKVASRAPLLPLEDVFVGVSARRGGLAPTQCVKLAGATHYPLDRCCYGKFLLTSHRLDPWKMQEAWKLVGGSDGERTAPFCSWFQGVLGILRCRAIAWLQS

SEQ ID NO: 19335 - protein, 127 aa, Homo sapiens; identical to SEQ ID NO: 200

SEQ ID NO: 19336 - protein, 623 aa, Homo sapiens
MPSDLAKKKAAKKKEAAKARQRPRKGHEENGDVVTEPQVAEKNEANGRETTEVDLLTKELEDFEMKKAAARAVTGVLASHPNSTDVHIINLSLTFHGQELLSDTKLELNSGRRYGLIGLNGIGKSMLLSAIGKREVPIPEHIDIYHLTREMPPSDKTPLHCVMEVDTERAMLEKEAERLAHEDAECEKLMELYERLEELDADKAEMRASRILHGLGFTPAMQRKKLKDFSGGWRMRVALARALFIRPFMLLLDEPTNHLDLDACVWLEEELKTFKRILVLVSHSQDFLNGVCTNIIHMHNKKLKYYTGNYDQYVKTRLELEENQMKRFHWEQDQIAHMKNYIARFGHGSAKLARQAQSKEKTLQKMMASGLTERVVSDKTLSFYFPPCGKIPPPVIMVQNVSFKYTKDGPCIYNNLEFGIDLDTRVALVGPNGAGKSTLLKLLTGELLPTDGMIRKHSHVKIGRYHQHLQEQLDLDLSPLEYMMKCYPEIKEKEEMRKIIGRYGLTGKQQVSPIRNLSDGQKCRVCLAWLAWQNPHMLFLDEPTNHLDIETIDALADAINEFEGGMMLVSHDFRLIQQVAQEIWVCEKQTITKWPGDILAYKEHLKSKLVDEEPQLTKRTHNV

SEQ ID NO: 19337 - protein, 634 aa, Homo sapiens
MPSDLAKKKAAKKKEAAKARQRPRKGHEENGDVVTEPQVAEKNEANGRETTEVDLLTKELEDFEMKKAAARAVTGVLASHPNSTDVHIINLSLTFHGQELLSDTKLELNSGRRYGLIGLNGIGKSMLLSAIGKREVPIPEHIDIYHLTREMPPSDKTPLHCVMEVDTERAMLEKEAERLAHEDAECEKLMELYERLEELDADKAEMRASRILHGLGFTPAMQRKKLKDFSGGWRMRVALARALFIRPFMLLLDEPTNHLDLDACVWLEEELKTFKRILVLVSHSQDFLNGVCTNIIHMHNKKLKYYTGNYDQYVKTRLELEENQMKRFHWEQDQIAHMKNYIARFGHGSAKLARQAQSKEKTLQKMMASGLTERVVSDKTLSFYFPPCGKIPPPVIMVQNVSFKYTKDGPCIYNNLEFGIDLDTRVALVGPNGAGKSTLLKLLTGELLPTDGMIRKHSHVKIGRYHQHLQEQLDLDLSPLEYMMKCYPEIKEKEEMRKIIGRYGLTGKQQVSPIRNLSDGQKCRVCLAWLAWQNPHMLFLDEPTNHLDIETIDALADAINEFEGGMMLVSHDFRLIQQVAQEIWVCEKQTITKWPGDILAYKEHLKSKLVDEEPQLTKRTHNVCTLTLASLPRP

SEQ ID NO: 19338 - protein, 258 aa, Homo sapiens
MERLSAAPVKGQTGPERPSPFSQLVYTNNDSYVIHHGDLRKIHKAASRGQAWKLERMMKKTTMDLNIRDAKKRTALYWACANGHAEVVTLLVDRKCQLDVLDGENRTILMKALQCQREACANILIDSGADPNIVDVYGNTAVHYAVNSENLSVVAKLLSCGADIEVKNKAGHTPLLLAIRKRSEEIVEFLLTKNANANAVDKFKCVHQQLLEYKQKISKNSQNSNPEGTSEGTPDEAAPLAERTPDTAESLVERTPDE

SEQ ID NO: 19339 - protein, 251 aa, Homo sapiens
MERLSAAPVKGQTGPERPSPFSQLVYTNNDSYVIHHGDLRKIHKAASRGQAWKLERMMKKTTMDLNIRDAKKRTALYWACANGHAEVVTLLVDRKCQLDVLDGENRTILMKALQCQREACANILIDSGADPNIVDVYGNTAVHYAVNSENLSVVAKLLSCGADIEVKNKAGHTPLLLAIRKRSEEIVEFLLTKNANANAVDKFKCTALMLAICHGSSEIVGKLLQQNVDICAEATCGMIAERYAVACGFNL

SEQ ID NO: 19340 - protein, 120 aa, Homo sapiens
MESKEELAANNLNGENAQQENEGGEQAPTQNEEESRHLGGGEGQKPGGNIRRGRVRRLVPNFRWAIPNRHIEHNEARDDVERFVGQMMEIKRKTREQQMRHYMRFQTPEPDNHYDFCLIP

SEQ ID NO: 19341 - protein, 1182 aa, Homo sapiens
MGQQVGRVGEAPGLQQPQPRGIRGSSAARPSGRRRDPAGRTTETGFNIFTQHDHFASCVEDGFEGDKTGGSSPEALHRPYGCDVEPQALNEAIRWSSKENLLGATESDPNLFVALYDFVASGDNTLSITKGEKLRVLGYNQNGEWSEVRSKNGQGWVPSNYITPVNSLEKHSWYHGPVSRSAAEYLLSSLINGSFLVRESESSPGQLSISLRYEGRVYHYRINTTADGKVYVTAESRFSTLAELVHHHSTVADGLVTTLHYPAPKCNKPTVYGVSPIHDKWEMERTDITMKHKLGGGQYGEVYVGVWKKYSLTVAVKTLKEDTMEVEEFLKEAAVMKEIKHPNLVQLLGVCTLEPPFYIVTEYMPYGNLLDYLRECNREEVTAVVLLYMATQISSAMEYLEKKNFIHRDLAARNCLVGENHVVKVADFGLSRLMTGDTYTAHAGAKFPIKWTAPESLAYNTFSIKSDVWAFGVLLWEIATYGMSPYPGIDLSQVYDLLEKGYRMEQPEGCPPKVYELMRACWKWSPADRPSFAETHQAFETMFHDSSISEEVAEELGRAASSSSVVPYLPRLPILPSKTRTLKKQVENKENIEGAQDATENSASSLAPGFIRGAQASSGSPALPRKQRDKSPSSLLEDAKETCFTRDRKGGFFSSFMKKRNAPTPPKRSSSFREMENQPHKKYELTGNFSSVASLQHADGFSFTPAQQEANLVPPKCYGGSFAQRNLCNDDGGGGGGSGTAGGGWSGITGFFTPRLIKKTLGLRAGKPTASDDTSKPFPRSNSTSSMSSGLPEQDRMAMTLPRNCQRSKLQLERTVSTSSQPEENVDRANDMLPKKSEESAAPSRERPKAKLLPRGATALPLRTPSGDLAITEKDPPGVGVAGVAAAPKGKEKNGGARLGMAGVPEDGEQPGWPSPAKAAPVLPTTHNHKVPVLISPTLKHTPADVQLIGTDSQGNKFKLLSEHQVTSSGDKDRPRRVKPKCAPPPPPVMRLLQHPSICSDPTEEPTALTAGQSTSETQEGGKKAALGAVPISGKAGRPVMPPPQVPLPTSSISPAKMANGTAGTKVALRKTKQAAEKISADKISKEALLECADLLSSALTEPVPNSQLVDTGHQLLDYCSGYVDCIPQTRNKFAFREAVSKLELSLQELQVSSAAAGVPGTNPVLNNLLSCVQEISDVVQR

SEQ ID NO: 19342 - protein, 1146 aa, Homo sapiens
MVLGTVLLPPNSYGRDQDTSLCCLCTEASESALPDLTEALHRPYGCDVEPQALNEAIRWSSKENLLGATESDPNLFVALYDFVASGDNTLSITKGEKLRVLGYNQNGEWSEVRSKNGQGWVPSNYITPVNSLEKHSWYHGPVSRSAAEYLLSSLINGSFLVRESESSPGQLSISLRYEGRVYHYRINTTADGKVYVTAESRFSTLAELVHHHSTVADGLVTTLHYPAPKCNKPTVYGVSPIHDKWEMERTDITMKHKLGGGQYGEVYVGVWKKYSLTVAVKTLKEDTMEVEEFLKEAAVMKEIKHPNLVQLLGVCTLEPPFYIVTEYMPYGNLLDYLRECNREEVTAVVLLYMATQISSAMEYLEKKNFIHRDLAARNCLVGENHVVKVADFGLSRLMTGDTYTAHAGAKFPIKWTAPESLAYNTFSIKSDVWAFGVLLWEIATYGMSPYPGIDLSQVYDLLEKGYRMEQPEGCPPKVYELMRACWKWSPADRPSFAETHQAFETMFHDSSISEEVAEELGRAASSSSVVPYLPRLPILPSKTRTLKKQVENKENIEGAQDATENSASSLAPGFIRGAQASSGSPALPRKQRDKSPSSLLEDAKETCFTRDRKGGFFSSFMKKRNAPTPPKRSSSFREMENQPHKKYELTGNFSSVASLQHADGFSFTPAQQEANLVPPKCYGGSFAQRNLCNDDGGGGGGSGTAGGGWSGITGFFTPRLIKKTLGLRAGKPTASDDTSKPFPRSNSTSSMSSGLPEQDRMAMTLPRNCQRSKLQLERTVSTSSQPEENVDRANDMLPKKSEESAAPSRERPKAKLLPRGATALPLRTPSGDLAITEKDPPGVGVAGVAAAPKGKEKNGGARLGMAGVPEDGEQPGWPSPAKAAPVLPTTHNHKVPVLISPTLKHTPADVQLIGTDSQGNKFKLLSEHQVTSSGDKDRPRRVKPKCAPPPPPVMRLLQHPSICSDPTEEPTALTAGQSTSETQEGGKKAALGAVPISGKAGRPVMPPPQVPLPTSSISPAKMANGTAGTKVALRKTKQAAEKISADKISKEALLECADLLSSALTEPVPNSQLVDTGHQLLDYCSGYVDCIPQTRNKFAFREAVSKLELSLQELQVSSAAAGVPGTNPVLNNLLSCVQEISDVVQR

SEQ ID NO: 19343 - protein, 1167 aa, Homo sapiens
MVLGTVLLPPNSYGRDQDTSLCCLCTEASESALPDLTDHFASCVEDGFEGDKTGGSSPEALHRPYGCDVEPQALNEAIRWSSKENLLGATESDPNLFVALYDFVASGDNTLSITKGEKLRVLGYNQNGEWSEVRSKNGQGWVPSNYITPVNSLEKHSWYHGPVSRSAAEYLLSSLINGSFLVRESESSPGQLSISLRYEGRVYHYRINTTADGKVYVTAESRFSTLAELVHHHSTVADGLVTTLHYPAPKCNKPTVYGVSPIHDKWEMERTDITMKHKLGGGQYGEVYVGVWKKYSLTVAVKTLKEDTMEVEEFLKEAAVMKEIKHPNLVQLLGVCTLEPPFYIVTEYMPYGNLLDYLRECNREEVTAVVLLYMATQISSAMEYLEKKNFIHRDLAARNCLVGENHVVKVADFGLSRLMTGDTYTAHAGAKFPIKWTAPESLAYNTFSIKSDVWAFGVLLWEIATYGMSPYPGIDLSQVYDLLEKGYRMEQPEGCPPKVYELMRACWKWSPADRPSFAETHQAFETMFHDSSISEEVAEELGRAASSSSVVPYLPRLPILPSKTRTLKKQVENKENIEGAQDATENSASSLAPGFIRGAQASSGSPALPRKQRDKSPSSLLEDAKETCFTRDRKGGFFSSFMKKRNAPTPPKRSSSFREMENQPHKKYELTGNFSSVASLQHADGFSFTPAQQEANLVPPKCYGGSFAQRNLCNDDGGGGGGSGTAGGGWSGITGFFTPRLIKKTLGLRAGKPTASDDTSKPFPRSNSTSSMSSGLPEQDRMAMTLPRNCQRSKLQLERTVSTSSQPEENVDRANDMLPKKSEESAAPSRERPKAKLLPRGATALPLRTPSGDLAITEKDPPGVGVAGVAAAPKGKEKNGGARLGMAGVPEDGEQPGWPSPAKAAPVLPTTHNHKVPVLISPTLKHTPADVQLIGTDSQGNKFKLLSEHQVTSSGDKDRPRRVKPKCAPPPPPVMRLLQHPSICSDPTEEPTALTAGQSTSETQEGGKKAALGAVPISGKAGRPVMPPPQVPLPTSSISPAKMANGTAGTKVALRKTKQAAEKISADKISKEALLECADLLSSALTEPVPNSQLVDTGHQLLDYCSGYVDCIPQTRNKFAFREAVSKLELSLQELQVSSAAAGVPGTNPVLNNLLSCVQEISDVVQR

SEQ ID NO: 19344 - protein, 1043 aa, Homo sapiens
MVLGTVLLPPNSYGRDQDTSLCCLCTEASESALPDLTEALHRPYGCDVEPQALNEAIRWSSKENLLGATESDPNLFVALYDFVASGDNTLSITKGEKLRVLGYNQNGEWSEVRSKNGQGWVPSNYITPVNSLEKHSWYHGPVSRSAAEYLLSSLINGSFLVRESESSPGQLSISLRYEGRVYHYRINTTADGKVYVTAESRFSTLAELVHHHSTVADGLVTTLHYPAPKCNKPTVYGVSPIHDKWEMERTDITMKHKLGGGQYGEVYVGVWKKYSLTVAVKTLKEDTMEVEEFLKEAAVMKEIKHPNLVQLLGVCTLEPPFYIVTEYMPYGNLLDYLRECNREEVTAVVLLYMATQISSAMEYLEKKNFIHRDLAARNCLVGENHVVKVADFGLSRLMTGDTYTAHAGAKFPIKWTAPESLAYNTFSIKSDVWAFGVLLWEIATYGMSPYPGIDLSQVYDLLEKGYRMEQPEGCPPKVYELMRACWKWSPADRPSFAETHQAFETMFHDSSISEEVAEELGRAASSSSVVPYLPRLPILPSKTRTLKKQVENKENIEGAQDATENSASSLAPGFIRGAQASSGSPALPRKQRDKSPSSLLEDAKETCFTRDRKGGFFSSFMKKRNAPTPPKRSSSFREMENQPHKKYELTGLPEQDRMAMTLPRNCQRSKLQLERTVSTSSQPEENVDRANDMLPKKSEESAAPSRERPKAKLLPRGATALPLRTPSGDLAITEKDPPGVGVAGVAAAPKGKEKNGGARLGMAGVPEDGEQPGWPSPAKAAPVLPTTHNHKVPVLISPTLKHTPADVQLIGTDSQGNKFKLLSEHQVTSSGDKDRPRRVKPKCAPPPPPVMRLLQHPSICSDPTEEPTALTAGQSTSETQEGGKKAALGAVPISGKAGRPVMPPPQVPLPTSSISPAKMANGTAGTKVALRKTKQAAEKISADKISKEALLECADLLSSALTEPVPNSQLVDTGHQLLDYCSGYVDCIPQTRNKFAFREAVSKLELSLQELQVSSAAAGVPGTNPVLNNLLSCVQEISDVVQR

SEQ ID NO: 19345 - protein, 1079 aa, Homo sapiens
MGQQVGRVGEAPGLQQPQPRGIRGSSAARPSGRRRDPAGRTTETGFNIFTQHDHFASCVEDGFEGDKTGGSSPEALHRPYGCDVEPQALNEAIRWSSKENLLGATESDPNLFVALYDFVASGDNTLSITKGEKLRVLGYNQNGEWSEVRSKNGQGWVPSNYITPVNSLEKHSWYHGPVSRSAAEYLLSSLINGSFLVRESESSPGQLSISLRYEGRVYHYRINTTADGKVYVTAESRFSTLAELVHHHSTVADGLVTTLHYPAPKCNKPTVYGVSPIHDKWEMERTDITMKHKLGGGQYGEVYVGVWKKYSLTVAVKTLKEDTMEVEEFLKEAAVMKEIKHPNLVQLLGVCTLEPPFYIVTEYMPYGNLLDYLRECNREEVTAVVLLYMATQISSAMEYLEKKNFIHRDLAARNCLVGENHVVKVADFGLSRLMTGDTYTAHAGAKFPIKWTAPESLAYNTFSIKSDVWAFGVLLWEIATYGMSPYPGIDLSQVYDLLEKGYRMEQPEGCPPKVYELMRACWKWSPADRPSFAETHQAFETMFHDSSISEEVAEELGRAASSSSVVPYLPRLPILPSKTRTLKKQVENKENIEGAQDATENSASSLAPGFIRGAQASSGSPALPRKQRDKSPSSLLEDAKETCFTRDRKGGFFSSFMKKRNAPTPPKRSSSFREMENQPHKKYELTGLPEQDRMAMTLPRNCQRSKLQLERTVSTSSQPEENVDRANDMLPKKSEESAAPSRERPKAKLLPRGATALPLRTPSGDLAITEKDPPGVGVAGVAAAPKGKEKNGGARLGMAGVPEDGEQPGWPSPAKAAPVLPTTHNHKVPVLISPTLKHTPADVQLIGTDSQGNKFKLLSEHQVTSSGDKDRPRRVKPKCAPPPPPVMRLLQHPSICSDPTEEPTALTAGQSTSETQEGGKKAALGAVPISGKAGRPVMPPPQVPLPTSSISPAKMANGTAGTKVALRKTKQAAEKISADKISKEALLECADLLSSALTEPVPNSQLVDTGHQLLDYCSGYVDCIPQTRNKFAFREAVSKLELSLQELQVSSAAAGVPGTNPVLNNLLSCVQEISDVVQR

SEQ ID NO: 19346 - protein, 1161 aa, Homo sapiens
MGQQVGRVGEAPGLQQPQPRGIRGSSAARPSGRRRDPAGRTTETGFNIFTQHEALHRPYGCDVEPQALNEAIRWSSKENLLGATESDPNLFVALYDFVASGDNTLSITKGEKLRVLGYNQNGEWSEVRSKNGQGWVPSNYITPVNSLEKHSWYHGPVSRSAAEYLLSSLINGSFLVRESESSPGQLSISLRYEGRVYHYRINTTADGKVYVTAESRFSTLAELVHHHSTVADGLVTTLHYPAPKCNKPTVYGVSPIHDKWEMERTDITMKHKLGGGQYGEVYVGVWKKYSLTVAVKTLKEDTMEVEEFLKEAAVMKEIKHPNLVQLLGVCTLEPPFYIVTEYMPYGNLLDYLRECNREEVTAVVLLYMATQISSAMEYLEKKNFIHRDLAARNCLVGENHVVKVADFGLSRLMTGDTYTAHAGAKFPIKWTAPESLAYNTFSIKSDVWAFGVLLWEIATYGMSPYPGIDLSQVYDLLEKGYRMEQPEGCPPKVYELMRACWKWSPADRPSFAETHQAFETMFHDSSISEEVAEELGRAASSSSVVPYLPRLPILPSKTRTLKKQVENKENIEGAQDATENSASSLAPGFIRGAQASSGSPALPRKQRDKSPSSLLEDAKETCFTRDRKGGFFSSFMKKRNAPTPPKRSSSFREMENQPHKKYELTGNFSSVASLQHADGFSFTPAQQEANLVPPKCYGGSFAQRNLCNDDGGGGGGSGTAGGGWSGITGFFTPRLIKKTLGLRAGKPTASDDTSKPFPRSNSTSSMSSGLPEQDRMAMTLPRNCQRSKLQLERTVSTSSQPEENVDRANDMLPKKSEESAAPSRERPKAKLLPRGATALPLRTPSGDLAITEKDPPGVGVAGVAAAPKGKEKNGGARLGMAGVPEDGEQPGWPSPAKAAPVLPTTHNHKVPVLISPTLKHTPADVQLIGTDSQGNKFKLLSEHQVTSSGDKDRPRRVKPKCAPPPPPVMRLLQHPSICSDPTEEPTALTAGQSTSETQEGGKKAALGAVPISGKAGRPVMPPPQVPLPTSSISPAKMANGTAGTKVALRKTKQAAEKISADKISKEALLECADLLSSALTEPVPNSQLVDTGHQLLDYCSGYVDCIPQTRNKFAFREAVSKLELSLQELQVSSAAAGVPGTNPVLNNLLSCVQEISDVVQR

SEQ ID NO: 19347 - protein, 1058 aa, Homo sapiens
MGQQVGRVGEAPGLQQPQPRGIRGSSAARPSGRRRDPAGRTTETGFNIFTQHEALHRPYGCDVEPQALNEAIRWSSKENLLGATESDPNLFVALYDFVASGDNTLSITKGEKLRVLGYNQNGEWSEVRSKNGQGWVPSNYITPVNSLEKHSWYHGPVSRSAAEYLLSSLINGSFLVRESESSPGQLSISLRYEGRVYHYRINTTADGKVYVTAESRFSTLAELVHHHSTVADGLVTTLHYPAPKCNKPTVYGVSPIHDKWEMERTDITMKHKLGGGQYGEVYVGVWKKYSLTVAVKTLKEDTMEVEEFLKEAAVMKEIKHPNLVQLLGVCTLEPPFYIVTEYMPYGNLLDYLRECNREEVTAVVLLYMATQISSAMEYLEKKNFIHRDLAARNCLVGENHVVKVADFGLSRLMTGDTYTAHAGAKFPIKWTAPESLAYNTFSIKSDVWAFGVLLWEIATYGMSPYPGIDLSQVYDLLEKGYRMEQPEGCPPKVYELMRACWKWSPADRPSFAETHQAFETMFHDSSISEEVAEELGRAASSSSVVPYLPRLPILPSKTRTLKKQVENKENIEGAQDATENSASSLAPGFIRGAQASSGSPALPRKQRDKSPSSLLEDAKETCFTRDRKGGFFSSFMKKRNAPTPPKRSSSFREMENQPHKKYELTGLPEQDRMAMTLPRNCQRSKLQLERTVSTSSQPEENVDRANDMLPKKSEESAAPSRERPKAKLLPRGATALPLRTPSGDLAITEKDPPGVGVAGVAAAPKGKEKNGGARLGMAGVPEDGEQPGWPSPAKAAPVLPTTHNHKVPVLISPTLKHTPADVQLIGTDSQGNKFKLLSEHQVTSSGDKDRPRRVKPKCAPPPPPVMRLLQHPSICSDPTEEPTALTAGQSTSETQEGGKKAALGAVPISGKAGRPVMPPPQVPLPTSSISPAKMANGTAGTKVALRKTKQAAEKISADKISKEALLECADLLSSALTEPVPNSQLVDTGHQLLDYCSGYVDCIPQTRNKFAFREAVSKLELSLQELQVSSAAAGVPGTNPVLNNLLSCVQEISDVVQR

SEQ ID NO: 19348 - protein, 1064 aa, Homo sapiens
MVLGTVLLPPNSYGRDQDTSLCCLCTEASESALPDLTDHFASCVEDGFEGDKTGGSSPEALHRPYGCDVEPQALNEAIRWSSKENLLGATESDPNLFVALYDFVASGDNTLSITKGEKLRVLGYNQNGEWSEVRSKNGQGWVPSNYITPVNSLEKHSWYHGPVSRSAAEYLLSSLINGSFLVRESESSPGQLSISLRYEGRVYHYRINTTADGKVYVTAESRFSTLAELVHHHSTVADGLVTTLHYPAPKCNKPTVYGVSPIHDKWEMERTDITMKHKLGGGQYGEVYVGVWKKYSLTVAVKTLKEDTMEVEEFLKEAAVMKEIKHPNLVQLLGVCTLEPPFYIVTEYMPYGNLLDYLRECNREEVTAVVLLYMATQISSAMEYLEKKNFIHRDLAARNCLVGENHVVKVADFGLSRLMTGDTYTAHAGAKFPIKWTAPESLAYNTFSIKSDVWAFGVLLWEIATYGMSPYPGIDLSQVYDLLEKGYRMEQPEGCPPKVYELMRACWKWSPADRPSFAETHQAFETMFHDSSISEEVAEELGRAASSSSVVPYLPRLPILPSKTRTLKKQVENKENIEGAQDATENSASSLAPGFIRGAQASSGSPALPRKQRDKSPSSLLEDAKETCFTRDRKGGFFSSFMKKRNAPTPPKRSSSFREMENQPHKKYELTGLPEQDRMAMTLPRNCQRSKLQLERTVSTSSQPEENVDRANDMLPKKSEESAAPSRERPKAKLLPRGATALPLRTPSGDLAITEKDPPGVGVAGVAAAPKGKEKNGGARLGMAGVPEDGEQPGWPSPAKAAPVLPTTHNHKVPVLISPTLKHTPADVQLIGTDSQGNKFKLLSEHQVTSSGDKDRPRRVKPKCAPPPPPVMRLLQHPSICSDPTEEPTALTAGQSTSETQEGGKKAALGAVPISGKAGRPVMPPPQVPLPTSSISPAKMANGTAGTKVALRKTKQAAEKISADKISKEALLECADLLSSALTEPVPNSQLVDTGHQLLDYCSGYVDCIPQTRNKFAFREAVSKLELSLQELQVSSAAAGVPGTNPVLNNLLSCVQEISDVVQR

SEQ ID NO: 19349 - protein, 542 aa, Homo sapiens
MGQQVGRVGEAPGLQQPQPRGIRGSSAARPSGRRRDPAGRTTETGFNIFTQHEALHRPYGCDVEPQALNEAIRWSSKENLLGATESDPNLFVALYDFVASGDNTLSITKGEKLRVLGYNQNGEWSEVRSKNGQGWVPSNYITPVNSLEKHSWYHGPVSRSAAEYLLSSLINGSFLVRESESSPGQLSISLRYEGRVYHYRINTTADGKVYVTAESRFSTLAELVHHHSTVADGLVTTLHYPAPKCNKPTVYGVSPIHDKWEMERTDITMKHKLGGGQYGEVYVGVWKKYSLTVAVKTLKEDTMEVEEFLKEAAVMKEIKHPNLVQLLGVCTLEPPFYIVTEYMPYGNLLDYLRECNREEVTAVVLLYMATQISSAMEYLEKKNFIHRDLAARNCLVGENHVVKVADFGLSRLMTGDTYTAHAGAKFPIKWTAPESLAYNTFSIKSDVWAFGVLLWEIATYGMSPYPGIDLSQVYDLLEKGYRMEQPEGCPPKVYELMRACWKWSPADRPSFAETHQAFETMFHDSSISEVLLHCANQTCITL

SEQ ID NO: 19350 - protein, 158 aa, Homo sapiens
MSHGKGTDMLPEIAAAVGFLSSLLRTRGCVSEQRLKVFSGALQEALTEHYKHHWFPEKPSKGSGYRCIRINHKMDPIISRVASQIGLSQPQLHQLLPSELTLWVDPYEVSYRIGEDGSICVLYEEAPLAASCGLLTCKNQVLLGRSSPSKNYVMAVSS

SEQ ID NO: 19351 - protein, 369 aa, Homo sapiens
MQVTFCRLRTHQWCFILFNVILFHALLFGTDFVEEYFLHSLPYIDVKVLEIKNKARKLNIEPLRSNLSKYYVLSQSEICKGKNIFLLSLIFSSPGNGTRRDLIRKTWGNVTSVQGHPILTLFALGMPVSVTTQKEINKESCKNNDIIEGIFLDSSENQTLKIIAMIQWAVAFCPNALFILKVDEETFVNLPSLVDYLLNLKEHLEDIYVGRVLHQVTPNRDPQNRDFVPLSEYPEKYYPDYCSGEAFIMSQDVARMMYVVFKEVPMMVPADVFVGICAKFIGLIPIHSSRFSGKRHIRYNRCCYKFIFTSSEIADPEMPLAWKEINDGKECTLFETSYELISCKLLTYLDSFKRFHMGTIKNNLMYFAD

SEQ ID NO: 19352 - protein, 252 aa, Homo sapiens
MKNEIAAVVFFFTRLVRKHDKLKKEAVERFAEKLTLILQEKYKNHWYPEKPSKGQAYRCIRVNKFQRVDPDVLKACENSCILYSDLGLPKELTLWVDPCEVCCRYGEKNNAFIVASFENKDENKDEISRKVTRALDKVTSDYHSGSSSSDEETSKEMEVKPSSVTAAASPVYQISELIFPPLPMWHPLPRKKPGMYRGNGHQNHYPPPVPFGYPNQGRKNKPYRPIPVTWVPPPGMHCDRNHWINPHMLAPH

SEQ ID NO: 19353 - protein, 296 aa, Homo sapiens
MKNEIAAVVFFFTRLVRKHDKLKKEAVERFAEKLTLILQEKYKNHWYPEKPSKGQAYRCIRVNKFQRVDPDVLKACENSCILYSDLGLPKELTLWVDPCEVCCRRDGVSPCWPDCSQTPDLVIRPPWPPKALDYRREPLRPASSFLIMYGEKNNAFIVASFENKDENKDEISRKVTRALDKVTSDYHSGSSSSDEETSKEMEVKPSSVTAAASPVYQISELIFPPLPMWHPLPRKKPGMYRGNGHQNHYPPPVPFGYPNQGRKNKPYRPIPVTWVPPPGMHCDRNHWINPHMLAPH

SEQ ID NO: 19354 - protein, 223 aa, Homo sapiens
MRDEIATTVFFVTRLVKKHDKLSKQQIEDFAEKLMTILFETYRSHWHSDCPSKGQAFRCIRINNNQNKDPILERACVESNVDFSHLGLPKEMTIWVDPFEVCCRYGEKNHPFTVASFKGRWEEWELYQQISYAVSRASSDVSSGTSCDEESCSKEPRVIPKVSNPKSIYQVENLKQPFQSWLQIPRKKNVVDGRVGLLGNTYHGSQKHPKCYRPAMHRLDRIL

SEQ ID NO: 19355 - protein, 206 aa, Homo sapiens
MRDEIATTVFFVTRLVKKHDKLSKQQIEDFAEKLMTILFETYRSHWHSDCPSKGQAFRCIRINNNQNKDPILERACVESNVDFSHLGLPKEMTIWVDPFEVCCRYGEKNHPFTVASFKGRWEEWELYQQISYAVSRASSDVSSGTSCDEESCSKEPRVIPKVSNPKSIYQVKSVPVLFYTFFLSNSKKNALIMKTKKQKNMERTKL

SEQ ID NO: 19356 - protein, 889 aa, Homo sapiens
MSNPFAHLAEPLDPVQPGKKFFNLNKLEDSRYGRLPFSIRVLLEAAIRNCDEFLVKKQDIENILHWNVTQHKNIEVPFKPARVILQDFTGVPAVVDFAAMRDAVKKLGGDPEKINPVCPADLVIDHSIQVDFNRRADSLQKNQDLEFERNRERFEFLKWGSQAFHNMRIIPPGSGIIHQVNLEYLARVVFDQDGYYYPDSLVGTDSHTTMIDGLGILGWGVGGIEAEAVMLGQPISMVLPQVIGYRLMGKPHPLVTSTDIVLTITKHLRQVGVVGKFVEFFGPGVAQLSIADRATIANMCPEYGATAAFFPVDEVSITYLVQTGRDEEKLKYIKKYLQAVGMFRDFNDPSQDPDFTQVVELDLKTVVPCCSGPKRPQDKVAVSDMKKDFESCLGAKQGFKGFQVAPEHHNDHKTFIYDNTEFTLAHGSVVIAAITSCTNTSNPSVMLGAGLLAKKAVDAGLNVMPYIKTSLSPGSGVVTYYLQESGVMPYLSQLGFDVVGYGCMTCIGNSGPLPEPVVEAITQGDLVAVGVLSGNRNFEGRVHPNTRANYLASPPLVIAYAIAGTIRIDFEKEPLGVNAKGQQVFLKDIWPTRDEIQAVERQYVIPGMFKEVYQKIETVNESWNALATPSDKLFFWNSKSTYIKSPPFFENLTLDLQPPKSIVDAYVLLNLGDSVTTDHISPAGNIARNSPAARYLTNRGLTPREFNSYGSRRGNDAVMARGTFANIRLLNRFLNKQAPQTIHLPSGEILDVFDAAERYQQAGLPLIVLAGKEYGAGSSRDWAAKGPFLLGIKAVLAESYERIHRSNLVGMGVIPLEYLPGENADALGLTGQERYTIIIPENLKPQMKVQVKLDTGKTFQAVMRFDTDVELTYFLNGGILNYMIRKMAK

SEQ ID NO: 19357 - protein, 678 aa, Homo sapiens
MACLMAAFSVGTAMNASSYSAEMTEPKSVCVSVDEVVSSNMEATETDLLNGHLKKVDNNLTEAQRFSSLPRRAAVNIEFRDLSYSVPEGPWWRKKGYKTLLKGISGKFNSGELVAIMGPSGAGKSTLMNILAGYRETGMKGAVLINGLPRDLRCFRKVSCYIMQDDMLLPHLTVQEAMMVSAHLKLQEKDEGRREMVKEILTALGLLSCANTRTGSLSGGQRKRLAIALELVNNPPVMFFDEPTSGLDSASCFQVVSLMKGLAQGGRSIICTIHQPSAKLFELFDQLYVLSQGQCVYRGKVCNLVPYLRDLGLNCPTYHNPADFVMEVASGEYGDQNSRLVRAVREGMCDSDHKRDLGGDAEVNPFLWHRPSEEVKQTKRLKGLRKDSSSMEGCHSFSASCLTQFCILFKRTFLSIMRDSVLTHLRITSHIGIGLLIGLLYLGIGNEAKKVLSNSGFLFFSMLFLMFAALMPTVLTFPLEMGVFLREHLNYWYSLKAYYLAKTMADVPFQIMFPVAYCSIVYWMTSQPSDAVRFVLFAALGTMTSLVAQSLGLLIGAASTSLQVATFVGPVTAIPVLLFSGFFVSFDTIPTYLQWMSYISYVRYGFEGVILSIYGLDREDLHCDIDETCHFQKSEAILRELDVENAKLYLDFIVLGIFFISLRLIAYFVLRYKIRAER

SEQ ID NO: 19358 - protein, 677 aa, Homo sapiens
MRISLPRAPERDGGVSASSLLDTVTNASSYSAEMTEPKSVCVSVDEVVSSNMEATETDLLNGHLKKVDNNLTEAQRFSSLPRRAAVNIEFRDLSYSVPEGPWWRKKGYKTLLKGISGKFNSGELVAIMGPSGAGKSTLMNILAGYRETGMKGAVLINGLPRDLRCFRKVSCYIMQDDMLLPHLTVQEAMMVSAHLKLQEKDEGRREMVKEILTALGLLSCANTRTGSLSGGQRKRLAIALELVNNPPVMFFDEPTSGLDSASCFQVVSLMKGLAQGGRSIICTIHQPSAKLFELFDQLYVLSQGQCVYRGKVCNLVPYLRDLGLNCPTYHNPADFVMEVASGEYGDQNSRLVRAVREGMCDSDHKRDLGGDAEVNPFLWHRPSEEDSSSMEGCHSFSASCLTQFCILFKRTFLSIMRDSVLTHLRITSHIGIGLLIGLLYLGIGNEAKKVLSNSGFLFFSMLFLMFAALMPTVLTFPLEMGVFLREHLNYWYSLKAYYLAKTMADVPFQIMFPVAYCSIVYWMTSQPSDAVRFVLFAALGTMTSLVAQSLGLLIGAASTSLQVATFVGPVTAIPVLLFSGFFVSFDTIPTYLQWMSYISYVRYGFEGVILSIYGLDREDLHCDIDETCHFQKSEAILRELDVENAKLYLDFIVLGIFFISLRLIAYFVLRYKIRAER

SEQ ID NO: 19359 - protein, 668 aa, Homo sapiens
MLGTQGWTKQRKPCPQNASSYSAEMTEPKSVCVSVDEVVSSNMEATETDLLNGHLKKVDNNLTEAQRFSSLPRRAAVNIEFRDLSYSVPEGPWWRKKGYKTLLKGISGKFNSGELVAIMGPSGAGKSTLMNILAGYRETGMKGAVLINGLPRDLRCFRKVSCYIMQDDMLLPHLTVQEAMMVSAHLKLQEKDEGRREMVKEILTALGLLSCANTRTGSLSGGQRKRLAIALELVNNPPVMFFDEPTSGLDSASCFQVVSLMKGLAQGGRSIICTIHQPSAKLFELFDQLYVLSQGQCVYRGKVCNLVPYLRDLGLNCPTYHNPADFVMEVASGEYGDQNSRLVRAVREGMCDSDHKRDLGGDAEVNPFLWHRPSEEDSSSMEGCHSFSASCLTQFCILFKRTFLSIMRDSVLTHLRITSHIGIGLLIGLLYLGIGNEAKKVLSNSGFLFFSMLFLMFAALMPTVLTFPLEMGVFLREHLNYWYSLKAYYLAKTMADVPFQIMFPVAYCSIVYWMTSQPSDAVRFVLFAALGTMTSLVAQSLGLLIGAASTSLQVATFVGPVTAIPVLLFSGFFVSFDTIPTYLQWMSYISYVRYGFEGVILSIYGLDREDLHCDIDETCHFQKSEAILRELDVENAKLYLDFIVLGIFFISLRLIAYFVLRYKIRAER

SEQ ID NO: 19360 - protein, 666 aa, Homo sapiens
MACLMAAFSVGTAMNASSYSAEMTEPKSVCVSVDEVVSSNMEATETDLLNGHLKKVDNNLTEAQRFSSLPRRAAVNIEFRDLSYSVPEGPWWRKKGYKTLLKGISGKFNSGELVAIMGPSGAGKSTLMNILAGYRETGMKGAVLINGLPRDLRCFRKVSCYIMQDDMLLPHLTVQEAMMVSAHLKLQEKDEGRREMVKEILTALGLLSCANTRTGSLSGGQRKRLAIALELVNNPPVMFFDEPTSGLDSASCFQVVSLMKGLAQGGRSIICTIHQPSAKLFELFDQLYVLSQGQCVYRGKVCNLVPYLRDLGLNCPTYHNPADFVMEVASGEYGDQNSRLVRAVREGMCDSDHKRDLGGDAEVNPFLWHRPSEEDSSSMEGCHSFSASCLTQFCILFKRTFLSIMRDSVLTHLRITSHIGIGLLIGLLYLGIGNEAKKVLSNSGFLFFSMLFLMFAALMPTVLTFPLEMGVFLREHLNYWYSLKAYYLAKTMADVPFQIMFPVAYCSIVYWMTSQPSDAVRFVLFAALGTMTSLVAQSLGLLIGAASTSLQVATFVGPVTAIPVLLFSGFFVSFDTIPTYLQWMSYISYVRYGFEGVILSIYGLDREDLHCDIDETCHFQKSEAILRELDVENAKLYLDFIVLGIFFISLRLIAYFVLRYKIRAER

SEQ ID NO: 19361 - protein, 663 aa, Homo sapiens
MIMRLPQPHGTNASSYSAEMTEPKSVCVSVDEVVSSNMEATETDLLNGHLKKVDNNLTEAQRFSSLPRRAAVNIEFRDLSYSVPEGPWWRKKGYKTLLKGISGKFNSGELVAIMGPSGAGKSTLMNILAGYRETGMKGAVLINGLPRDLRCFRKVSCYIMQDDMLLPHLTVQEAMMVSAHLKLQEKDEGRREMVKEILTALGLLSCANTRTGSLSGGQRKRLAIALELVNNPPVMFFDEPTSGLDSASCFQVVSLMKGLAQGGRSIICTIHQPSAKLFELFDQLYVLSQGQCVYRGKVCNLVPYLRDLGLNCPTYHNPADFVMEVASGEYGDQNSRLVRAVREGMCDSDHKRDLGGDAEVNPFLWHRPSEEDSSSMEGCHSFSASCLTQFCILFKRTFLSIMRDSVLTHLRITSHIGIGLLIGLLYLGIGNEAKKVLSNSGFLFFSMLFLMFAALMPTVLTFPLEMGVFLREHLNYWYSLKAYYLAKTMADVPFQIMFPVAYCSIVYWMTSQPSDAVRFVLFAALGTMTSLVAQSLGLLIGAASTSLQVATFVGPVTAIPVLLFSGFFVSFDTIPTYLQWMSYISYVRYGFEGVILSIYGLDREDLHCDIDETCHFQKSEAILRELDVENAKLYLDFIVLGIFFISLRLIAYFVLRYKIRAER

SEQ ID NO: 19362 - protein, 662 aa, Homo sapiens
MAAFSVGTAMNASSYSAEMTEPKSVCVSVDEVVSSNMEATETDLLNGHLKKVDNNLTEAQRFSSLPRRAAVNIEFRDLSYSVPEGPWWRKKGYKTLLKGISGKFNSGELVAIMGPSGAGKSTLMNILAGYRETGMKGAVLINGLPRDLRCFRKVSCYIMQDDMLLPHLTVQEAMMVSAHLKLQEKDEGRREMVKEILTALGLLSCANTRTGSLSGGQRKRLAIALELVNNPPVMFFDEPTSGLDSASCFQVVSLMKGLAQGGRSIICTIHQPSAKLFELFDQLYVLSQGQCVYRGKVCNLVPYLRDLGLNCPTYHNPADFVMEVASGEYGDQNSRLVRAVREGMCDSDHKRDLGGDAEVNPFLWHRPSEEDSSSMEGCHSFSASCLTQFCILFKRTFLSIMRDSVLTHLRITSHIGIGLLIGLLYLGIGNEAKKVLSNSGFLFFSMLFLMFAALMPTVLTFPLEMGVFLREHLNYWYSLKAYYLAKTMADVPFQIMFPVAYCSIVYWMTSQPSDAVRFVLFAALGTMTSLVAQSLGLLIGAASTSLQVATFVGPVTAIPVLLFSGFFVSFDTIPTYLQWMSYISYVRYGFEGVILSIYGLDREDLHCDIDETCHFQKSEAILRELDVENAKLYLDFIVLGIFFISLRLIAYFVLRYKIRAER

SEQ ID NO: 19363 - protein, 644 aa, Homo sapiens
MTEPKSVCVSVDEVVSSNMEATETDLLNGHLKKVDNNLTEAQRFSSLPRRAAVNIEFRDLSYSVPEGPWWRKKGYKTLLKGISGKFNSGELVAIMGPSGAGKSTLMNILAGYRETGMKGAVLINGLPRDLRCFRKVSCYIMQDDMLLPHLTVQEAMMVSAHLKLQEKDEGRREMVKEILTALGLLSCANTRTGSLSGGQRKRLAIALELVNNPPVMFFDEPTSGLDSASCFQVVSLMKGLAQGGRSIICTIHQPSAKLFELFDQLYVLSQGQCVYRGKVCNLVPYLRDLGLNCPTYHNPADFVMEVASGEYGDQNSRLVRAVREGMCDSDHKRDLGGDAEVNPFLWHRPSEEDSSSMEGCHSFSASCLTQFCILFKRTFLSIMRDSVLTHLRITSHIGIGLLIGLLYLGIGNEAKKVLSNSGFLFFSMLFLMFAALMPTVLTFPLEMGVFLREHLNYWYSLKAYYLAKTMADVPFQIMFPVAYCSIVYWMTSQPSDAVRFVLFAALGTMTSLVAQSLGLLIGAASTSLQVATFVGPVTAIPVLLFSGFFVSFDTIPTYLQWMSYISYVRYGFEGVILSIYGLDREDLHCDIDETCHFQKSEAILRELDVENAKLYLDFIVLGIFFISLRLIAYFVLRYKIRAER

SEQ ID NO: 19364 - protein, 785 aa, Homo sapiens
MVRRGWSVCTAILLARLWCLVPTHTFLSEYPEAAEYPHPGWVYWLQMAVAPGHLRAWVMRNNVTTNIPSAFSGTLTHEEKAVLTVFTGTATAVHVQVAALASAKLESSVFVTDCVSCKIENVCDSALQGKRVPMSGLQGSSIVIMPPSNRPLASAASCTWSVQVQGGPHHLGVVAISGKVLSAAHGAGRAYGWGFPGDPMEEGYKTLLKGISGKFNSGELVAIMGPSGAGKSTLMNILAGYRETGMKGAVLINGLPRDLRCFRKVSCYIMQDDMLLPHLTVQEAMMVSAHLKLQEKDEGRREMVKEILTALGLLSCANTRTGSLSGGQRKRLAIALELVNNPPVMFFDEPTSGLDSASCFQVVSLMKGLAQGGRSIICTIHQPSAKLFELFDQLYVLSQGQCVYRGKVCNLVPYLRDLGLNCPTYHNPADFVMEVASGEYGDQNSRLVRAVREGMCDSDHKRDLGGDAEVNPFLWHRPSEEVKQTKRLKGLRKDSSSMEGCHSFSASCLTQFCILFKRTFLSIMRDSVLTHLRITSHIGIGLLIGLLYLGIGNEAKKVLSNSGFLFFSMLFLMFAALMPTVLTFPLEMGVFLREHLNYWYSLKAYYLAKTMADVPFQIMFPVAYCSIVYWMTSQPSDAVRFVLFAALGTMTSLVAQSLGLLIGAASTSLQVATFVGPVTAIPVLLFSGFFVSFDTIPTYLQWMSYISYVRYGFEGVILSIYGLDREDLHCDIDETCHFQKSEAILRELDVENAKLYLDFIVLGIFFISLRLIAYFVLRYKIRAER

SEQ ID NO: 19365 - protein, 443 aa, Homo sapiens
MEEDIDTRKINNSFLRDHSYATEADIISTVEFNHTGELLATGDKGGRVVIFQREQESKNQVHRRGEYNVYSTFQSHEPEFDYLKSLEIEEKINKIRWLPQQNAAYFLLSTNDKTVKLWKVSERDKRPEGYNLKDEEGRLRDPATITTLRVPVLRPMDLMVEATPRRVFANAHTYHINSISVNSDYETYMSADDLRINLWNFEITNQSFNIVDIKPANMEELTEVITAAEFHPHHCNTFVYSSSKGTIRLCDMRASALCDRHTKFFEEPEDPSNRSFFSEIISSISDVKFSHSGRYIMTRDYLTVKVWDLNMENRPIETYQVHDYLRSKLCSLYENDCIFDKFECVWNGSDSVIMTGSYNNFFRMFDRNTKRDVTLEASRENSKPRAILKPRKVCVGGKRRKDEISVDSLDFSKKILHTAWHPSENIIAVAATNNLYIFQDKVN

SEQ ID NO: 19366 - protein, 446 aa, Homo sapiens
MKCFSRYLPYIFRPPNTILSSSCHTEADIISTVEFNHTGELLATGDKGGRVVIFQREQESKNQVHRRGEYNVYSTFQSHEPEFDYLKSLEIEEKINKIRWLPQQNAAYFLLSTNDKTVKLWKVSERDKRPEGYNLKDEEGRLRDPATITTLRVPVLRPMDLMVEATPRRVFANAHTYHINSISVNSDYETYMSADDLRINLWNFEITNQSFNIVDIKPANMEELTEVITAAEFHPHHCNTFVYSSSKGTIRLCDMRASALCDRHTKFFEEPEDPSNRSFFSEIISSISDVKFSHSGRYIMTRDYLTVKVWDLNMENRPIETYQVHDYLRSKLCSLYENDCIFDKFECVWNGSDSVIMTGSYNNFFRMFDRNTKRDVTLEASRENSKPRAILKPRKVCVGGKRRKDEISVDSLDFSKKILHTAWHPSENIIAVAATNNLYIFQDKVN

SEQ ID NO: 19367 - protein, 449 aa, Homo sapiens
MIPGIGTLTQDTLWCFSQVKGTIEIGTTEADIISTVEFNHTGELLATGDKGGRVVIFQREQESKNQVHRRGEYNVYSTFQSHEPEFDYLKSLEIEEKINKIRWLPQQNAAYFLLSTNDKTVKLWKVSERDKRPEGYNLKDEEGRLRDPATITTLRVPVLRPMDLMVEATPRRVFANAHTYHINSISVNSDYETYMSADDLRINLWNFEITNQSFNIVDIKPANMEELTEVITAAEFHPHHCNTFVYSSSKGTIRLCDMRASALCDRHTKFFEEPEDPSNRSFFSEIISSISDVKFSHSGRYIMTRDYLTVKVWDLNMENRPIETYQVHDYLRSKLCSLYENDCIFDKFECVWNGSDSVIMTGSYNNFFRMFDRNTKRDVTLEASRENSKPRAILKPRKVCVGGKRRKDEISVDSLDFSKKILHTAWHPSENIIAVAATNNLYIFQDKVN

SEQ ID NO: 19368 - protein, 501 aa, Homo sapiens
MVLQPSERHYRDWNHRRLGPWCSPTGSPAPLSCETGCGEGSWILVCRLLVPTQVSLLSMEEDIDTRKINNSFLRDHSYATEADIISTVEFNHTGELLATGDKGGRVVIFQREQESKNQVHRRGEYNVYSTFQSHEPEFDYLKSLEIEEKINKIRWLPQQNAAYFLLSTNDKTVKLWKVSERDKRPEGYNLKDEEGRLRDPATITTLRVPVLRPMDLMVEATPRRVFANAHTYHINSISVNSDYETYMSADDLRINLWNFEITNQSFNIVDIKPANMEELTEVITAAEFHPHHCNTFVYSSSKGTIRLCDMRASALCDRHTKFFEEPEDPSNRSFFSEIISSISDVKFSHSGRYIMTRDYLTVKVWDLNMENRPIETYQVHDYLRSKLCSLYENDCIFDKFECVWNGSDSVIMTGSYNNFFRMFDRNTKRDVTLEASRENSKPRAILKPRKVCVGGKRRKDEISVDSLDFSKKILHTAWHPSENIIAVAATNNLYIFQDKVN

SEQ ID NO: 19369 - protein, 509 aa, Homo sapiens
MLLSLPALHLQTSEHHPFFQLPHRRLGPWCSPTGSPAPLSCETGCGEGSWILVCRLLVPTQVSLLSMEEDIDTRKINNSFLRDHSYATEADIISTVEFNHTGELLATGDKGGRVVIFQREQESKNQVHRRGEYNVYSTFQSHEPEFDYLKSLEIEEKINKIRWLPQQNAAYFLLSTNDKTVKLWKVSERDKRPEGYNLKDEEGRLRDPATITTLRVPVLRPMDLMVEATPRRVFANAHTYHINSISVNSDYETYMSADDLRINLWNFEITNQSFNIVDIKPANMEELTEVITAAEFHPHHCNTFVYSSSKGTIRLCDMRASALCDRHTKFFEEPEDPSNRSFFSEIISSISDVKFSHSGRYIMTRDYLTVKVWDLNMENRPIETYQVHDYLRSKLCSLYENDCIFDKFECVWNGSDSVIMTGSYNNFFRMFDRNTKRDVTLEASRENSKPRAILKPRKVCVGGKRRKDEISVDSLDFSKKILHTAWHPSENIIAVAATNNLYIFQDKVN

SEQ ID NO: 19370 - protein, 432 aa, Homo sapiens
MNYPDENTYGNKADIISTVEFNHTGELLATGDKGGRVVIFQREQESKNQVHRRGEYNVYSTFQSHEPEFDYLKSLEIEEKINKIRWLPQQNAAYFLLSTNDKTVKLWKVSERDKRPEGYNLKDEEGRLRDPATITTLRVPVLRPMDLMVEATPRRVFANAHTYHINSISVNSDYETYMSADDLRINLWNFEITNQSFNIVDIKPANMEELTEVITAAEFHPHHCNTFVYSSSKGTIRLCDMRASALCDRHTKFFEEPEDPSNRSFFSEIISSISDVKFSHSGRYIMTRDYLTVKVWDLNMENRPIETYQVHDYLRSKLCSLYENDCIFDKFECVWNGSDSVIMTGSYNNFFRMFDRNTKRDVTLEASRENSKPRAILKPRKVCVGGKRRKDEISVDSLDFSKKILHTAWHPSENIIAVAATNNLYIFQDKVN

SEQ ID NO: 19371 - protein, 549 aa, Homo sapiens
MHQPPPASCSSSSSSSSSSCECARVGVRVSALAPAAAPCPAPRQLPYPRLPEPPSRGTSTLIPARLGPWCSPTGSPAPLSCETGCGEGSWILVCRLLVPTQVSLLSMEEDIDTRKINNSFLRDHSYATEADIISTVEFNHTGELLATGDKGGRVVIFQREQESKNQVHRRGEYNVYSTFQSHEPEFDYLKSLEIEEKINKIRWLPQQNAAYFLLSTNDKTVKLWKVSERDKRPEGYNLKDEEGRLRDPATITTLRVPVLRPMDLMVEATPRRVFANAHTYHINSISVNSDYETYMSADDLRINLWNFEITNQSFNIVDIKPANMEELTEVITAAEFHPHHCNTFVYSSSKGTIRLCDMRASALCDRHTKFFEEPEDPSNRSFFSEIISSISDVKFSHSGRYIMTRDYLTVKVWDLNMENRPIETYQVHDYLRSKLCSLYENDCIFDKFECVWNGSDSVIMTGSYNNFFRMFDRNTKRDVTLEASRENSKPRAILKPRKVCVGGKRRKDEISVDSLDFSKKILHTAWHPSENIIAVAATNNLYIFQDKVN

SEQ ID NO: 19372 - protein, 646 aa, Homo sapiens
MAEKALEAVGCGLGPGAVAMAVTLEDGAEPPVLTTHLKKVENHITEAQRFSHLPKRSAVDIEFVELSYSVREGPCWRKRGYKTLLKCLSGKFCRRELIGIMGPSGAGKSTFMNILAGYRESGMKGQILVNGRPRELRTFRKMSCYIMQDDMLLPHLTVLEAMMVSANLKLSEKQEVKKELVTEILTALGLMSCSHTRTALLSGGQRKRLAIALELVNNPPVMFFDEPTSGLDSASCFQVVSLMKSLAQGGRTIICTIHQPSAKLFEMFDKLYILSQGQCIFKGVVTNLIPYLKGLGLHCPTYHNPADFIIEVASGEYGDLNPMLFRAVQNGLCAMAEKKSSPEKNEVPAPCPPCPPEVDPIESHTFATSTLTQFCILFKRTFLSILRDTVLTHLRFMSHVVIGVLIGLLYLHIGDDASKVFNNTGCLFFSMLFLMFAALMPTVLTFPLEMAVFMREHLNYWYSLKAYYLAKTMADVPFQVVCPVVYCSIVYWMTGQPAETSRFLLFSALATATALVAQSLGLLIGAASNSLQVATFVGPVTAIPVLLFSGFFVSFKTIPTYLQWSSYLSYVRYGFEGVILTIYGMERGDLTCLEERCPFREPQSILRALDVEDAKLYMDFLVLGIFFLALRLLAYLVLRYRVKSER

SEQ ID NO: 19373 - protein, 585 aa, Homo sapiens
MRDLELREVKQLARGHTAGYKTLLKCLSGKFCRRELIGIMGPSGAGKSTFMNILAGYRESGMKGQILVNGRPRELRTFRKMSCYIMQDDMLLPHLTVLEAMMVSANLKLSEKQEVKKELVTEILTALGLMSCSHTRTALLSGGQRKRLAIALELVNNPPVMFFDEPTSGLDSASCFQVVSLMKSLAQGGRTIICTIHQPSAKLFEMFDKLYILSQGQCIFKGVVTNLIPYLKGLGLHCPTYHNPADFIIEVASGEYGDLNPMLFRAVQNGLCAMAEKKSSPEKNEVPAPCPPCPPEVDPIESHTFATSTLTQFCILFKRTFLSILRDTVLTHLRFMSHVVIGVLIGLLYLHIGDDASKVFNNTGCLFFSMLFLMFAALMPTVLTFPLEMAVFMREHLNYWYSLKAYYLAKTMADVPFQVVCPVVYCSIVYWMTGQPAETSRFLLFSALATATALVAQSLGLLIGAASNSLQVATFVGPVTAIPVLLFSGFFVSFKTIPTYLQWSSYLSYVRYGFEGVILTIYGMERGDLTCLEERCPFREPQSILRALDVEDAKLYMDFLVLGIFFLALRLLAYLVLRYRVKSER

SEQ ID NO: 19374 - protein, 582 aa, Homo sapiens
MCGFSHAFQKRIVASGYKTLLKCLSGKFCRRELIGIMGPSGAGKSTFMNILAGYRESGMKGQILVNGRPRELRTFRKMSCYIMQDDMLLPHLTVLEAMMVSANLKLSEKQEVKKELVTEILTALGLMSCSHTRTALLSGGQRKRLAIALELVNNPPVMFFDEPTSGLDSASCFQVVSLMKSLAQGGRTIICTIHQPSAKLFEMFDKLYILSQGQCIFKGVVTNLIPYLKGLGLHCPTYHNPADFIIEVASGEYGDLNPMLFRAVQNGLCAMAEKKSSPEKNEVPAPCPPCPPEVDPIESHTFATSTLTQFCILFKRTFLSILRDTVLTHLRFMSHVVIGVLIGLLYLHIGDDASKVFNNTGCLFFSMLFLMFAALMPTVLTFPLEMAVFMREHLNYWYSLKAYYLAKTMADVPFQVVCPVVYCSIVYWMTGQPAETSRFLLFSALATATALVAQSLGLLIGAASNSLQVATFVGPVTAIPVLLFSGFFVSFKTIPTYLQWSSYLSYVRYGFEGVILTIYGMERGDLTCLEERCPFREPQSILRALDVEDAKLYMDFLVLGIFFLALRLLAYLVLRYRVKSER

SEQ ID NO: 19375 - protein, 546 aa, Homo sapiens
MGPSGAGKSTFMNILAGYRESGMKGQILVNGRPRELRTFRKMSCYIMQDDMLLPHLTVLEAMMVSANLKLSEKQEVKKELVTEILTALGLMSCSHTRTALLSGGQRKRLAIALELVNNPPVMFFDEPTSGLDSASCFQVVSLMKSLAQGGRTIICTIHQPSAKLFEMFDKLYILSQGQCIFKGVVTNLIPYLKGLGLHCPTYHNPADFIIEVASGEYGDLNPMLFRAVQNGLCAMAEKKSSPEKNEVPAPCPPCPPEVDPIESHTFATSTLTQFCILFKRTFLSILRDTVLTHLRFMSHVVIGVLIGLLYLHIGDDASKVFNNTGCLFFSMLFLMFAALMPTVLTFPLEMAVFMREHLNYWYSLKAYYLAKTMADVPFQVVCPVVYCSIVYWMTGQPAETSRFLLFSALATATALVAQSLGLLIGAASNSLQVATFVGPVTAIPVLLFSGFFVSFKTIPTYLQWSSYLSYVRYGFEGVILTIYGMERGDLTCLEERCPFREPQSILRALDVEDAKLYMDFLVLGIFFLALRLLAYLVLRYRVKSER

SEQ ID NO: 19376 - protein, 447 aa, Homo sapiens
MGEDTDTRKINHSFLRDHSYVTEADIISTVEFNHTGELLATGDKGGRVVIFQREPESKNAPHSQGEYDVYSTFQSHEPEFDYLKSLEIEEKINKIKWLPQQNAAHSLLSTNDKTIKLWKITERDKRPEGYNLKDEEGKLKDLSTVTSLQVPVLKPMDLMVEVSPRRIFANGHTYHINSISVNSDCETYMSADDLRINLWHLAITDRSFNIVDIKPANMEDLTEVITASEFHPHHCNLFVYSSSKGSLRLCDMRAAALCDKHSKLFEEPEDPSNRSFFSEIISSVSDVKFSHSGRYMLTRDYLTVKVWDLNMEARPIETYQVHDYLRSKLCSLYENDCIFDKFECAWNGSDSVIMTGAYNNFFRMFDRNTKRDVTLEASRESSKPRAVLKPRRVCVGGKRRRDDISVDSLDFTKKILHTAWHPAENIIAIAATNNLYIFQDKVNSDMH

SEQ ID NO: 19377 - protein, 447 aa, Homo sapiens
MGLSFFSKHLPIQEGQPWALKTPADIISTVEFNHTGELLATGDKGGRVVIFQREPESKNAPHSQGEYDVYSTFQSHEPEFDYLKSLEIEEKINKIKWLPQQNAAHSLLSTNDKTIKLWKITERDKRPEGYNLKDEEGKLKDLSTVTSLQVPVLKPMDLMVEVSPRRIFANGHTYHINSISVNSDCETYMSADDLRINLWHLAITDRSFNIVDIKPANMEDLTEVITASEFHPHHCNLFVYSSSKGSLRLCDMRAAALCDKHSKLFEEPEDPSNRSFFSEIISSVSDVKFSHSGRYMLTRDYLTVKVWDLNMEARPIETYQVHDYLRSKLCSLYENDCIFDKFECAWNGSDSVIMTGAYNNFFRMFDRNTKRDVTLEASRESSKPRAVLKPRRVCVGGKRRRDDISVDSLDFTKKILHTAWHPAENIIAIAATNNLYIFQDKVNSDMH

SEQ ID NO: 19378 - protein, 430 aa, Homo sapiens
MGKRDTADIISTVEFNHTGELLATGDKGGRVVIFQREPESKNAPHSQGEYDVYSTFQSHEPEFDYLKSLEIEEKINKIKWLPQQNAAHSLLSTNDKTIKLWKITERDKRPEGYNLKDEEGKLKDLSTVTSLQVPVLKPMDLMVEVSPRRIFANGHTYHINSISVNSDCETYMSADDLRINLWHLAITDRSFNIVDIKPANMEDLTEVITASEFHPHHCNLFVYSSSKGSLRLCDMRAAALCDKHSKLFEEPEDPSNRSFFSEIISSVSDVKFSHSGRYMLTRDYLTVKVWDLNMEARPIETYQVHDYLRSKLCSLYENDCIFDKFECAWNGSDSVIMTGAYNNFFRMFDRNTKRDVTLEASRESSKPRAVLKPRRVCVGGKRRRDDISVDSLDFTKKILHTAWHPAENIIAIAATNNLYIFQDKVNSDMH

SEQ ID NO: 19379 - protein, 440 aa, Homo sapiens
MREADTLRPPQLMEVSADIISTVEFNHTGELLATGDKGGRVVIFQREPESKNAPHSQGEYDVYSTFQSHEPEFDYLKSLEIEEKINKIKWLPQQNAAHSLLSTNDKTIKLWKITERDKRPEGYNLKDEEGKLKDLSTVTSLQVPVLKPMDLMVEVSPRRIFANGHTYHINSISVNSDCETYMSADDLRINLWHLAITDRSFNIVDIKPANMEDLTEVITASEFHPHHCNLFVYSSSKGSLRLCDMRAAALCDKHSKLFEEPEDPSNRSFFSEIISSVSDVKFSHSGRYMLTRDYLTVKVWDLNMEARPIETYQVHDYLRSKLCSLYENDCIFDKFECAWNGSDSVIMTGAYNNFFRMFDRNTKRDVTLEASRESSKPRAVLKPRRVCVGGKRRRDDISVDSLDFTKKILHTAWHPAENIIAIAATNNLYIFQDKVNSDMH

SEQ ID NO: 19380 - protein, 681 aa, Homo sapiens
MGSPVHRVSLGDTWSRQMHPDIESERYMQSFDVERLTNILDGGAQNTALRRKVESIIHSYPEFSCKDNYFMTQNERYKAAMRRAFHIRLIARRLGWLEDGRELGYAYRALSGDVALNIHRVFVRALRSLGSEEQIAKWDPLCKNIQIIATYAQTELGHGTYLQGLETEATYDAATQEFVIHSPTLTATKWWPGDLGRSATHALVQAQLICSGARRGMHAFIVPIRSLQDHTPLPGIIIGDIGPKMDFDQTDNGFLQLNHVRVPRENMLSRFAQVLPDGTYVKLGTAQSNYLPMVVVRVELLSGEILPILQKACVIAMRYSVIRRQSRLRPSDPEAKVLDYQTQQQKLFPQLAISYAFHFLAVSLLEFFQHSYTAILNQDFSFLPELHALSTGMKAMMSEFCTQGAEMCRRACGGHGYSKLSGLPSLVTKLSASCTYEGENTVLYLQVARFLVKSYLQTQMSPGSTPQRSLSPSVAYLTAPDLARCPAQRAADFLCPELYTTAWAHVAVRLIKDSVQHLQTLTQSGADQHEAWNQTTVIHLQAAKVHCYYVTVKGFTEALEKLENEPAIQQVLKRLCDLHAIHGILTNSGDFLHDAFLSGAQVDMARTAYLDLLRLIRKDAILLTDAFDFTDQCLNSALGCYDGNVYERLFQWAQKSPTNTQENPAYEEYIRPLLQSWRSKL

SEQ ID NO: 19381 - protein, 780 aa, Homo sapiens
MTHTRRKSLPMLSSGLTGRREPLQMEDSNMEQGVEGVEPGMPESPGHLTGRRKNYPLRKRPLVPEKPKACKVLLTRLENVAGPRSADEADELPPDLPKPPSPAPSSEDPGLAQPRKRRLASLNAEALNNLLLEREDTSSLAGTRRSRAGDPHRSRDRDRATGGWSSSKKRPRLGDLGGGSRDLSPEPAPDEGPRRDGDPAPKRLASLNAAAFLKLSQERELPLRLPRAHAEVDGRSTEPPAPKAPRPKWPKVNGKNYPKAWQGASSGEAAGPPGWQGCPDEPWPSATPCGPSVQPSHQPLSKALESPLGLRPHLPLLMGGQAALKPEPGRPGEESPAPKQELHQPSFPTPQLSPLPMPGNPADYNGLCVGPELTALGSFYLYCGQEGLQCGGYSPCPMLPEGKLSPVAAPHEEGLLLAPSSVPSGTPFQHPPWGSSRYCSSEDTGVNGYSICGVLPLSVTHAGTTCGGCPYKMPFAAEGCRSLGQLEFPLPEAGHPASPAHPLLGCPVPSVPPAAEPVPHLQTPTSEPQTVARACPQSAKPPSGSKSGLRTGSSCRHTARSKAARRPSHPKQPRVQRPRPRRRRRRRTNGWVPVGAACEKAVYVLDEPEPAIRKSYQAVERHGETIRVRDTVLLKSGPRKTSTPYVAKISALWENPESGELMMSLLWYYRPEHLQGGRSPSMHEPLQNEVFASRHQDQNSVACIEEKCYVLTFAEYCRFCAMAKRRGEGLPSRKTALVPPSADYSTPPHRTVPEDTDPELVFLCRHVYDFRHGRILKNPQ

SEQ ID NO: 19382 - protein, 779 aa, Homo sapiens
MTHTRRKSLPMLSSGLTGRREPLQMEDSNMEQGVEGVEPGMPESPGHLTGRRKNYPLRKRPLVPEKPKACKVLLTRLENVAGPRSADEADELPPDLPKPPSPAPSSEDPGLAQPRKRRLASLNAEALNNLLLEREDTSSLAGTRRSRAGDPHRSRDRDRATGGWSSSKKRPRLGDLGGGSRDLSPEPAPDEGPRRDGDPAPKRLASLNAAAFLKLSQERELPLRLPRAHAEVDGRSTEPPAPKAPRPKWPKVNGKNYPKAWQGASSGEAAGPPGWQGCPDEPWPSATPCGPSVQPSHQPLSKALESPLGLRPHLPLLMGGQAALKPEPGRPGEESPAPKQELHQPSFPTPQLSPLPMPGNPADYNGLCVGPELTALGSFYLYCGQEGLQCGGYSPCPMLPEGKLSPVAAPHEEGLLLAPSSVPSGTPFQHPPWGSSRYCSSEDTGVNGYSICGVLPLSVTHAGTTCGGCPYKMPFAAGCRSLGQLEFPLPEAGHPASPAHPLLGCPVPSVPPAAEPVPHLQTPTSEPQTVARACPQSAKPPSGSKSGLRTGSSCRHTARSKAARRPSHPKQPRVQRPRPRRRRRRRTNGWVPVGAACEKAVYVLDEPEPAIRKSYQAVERHGETIRVRDTVLLKSGPRKTSTPYVAKISALWENPESGELMMSLLWYYRPEHLQGGRSPSMHEPLQNEVFASRHQDQNSVACIEEKCYVLTFAEYCRFCAMAKRRGEGLPSRKTALVPPSADYSTPPHRTVPEDTDPELVFLCRHVYDFRHGRILKNPQ

SEQ ID NO: 19383 - protein, 777 aa, Homo sapiens
MTHTRRKSLPMLSSGLTGRREPLQMEDSNMEQGVEGVEPGMPESPGHLTGRRKNYPLRKRPLVPEKPKACKVLLTRLENVAGPRSADEADELPPDLPKPPSPAPSSEDPGLAQPRKRRLASLNAEALNNLLLEREDTSSLAGTRRSRAGDPHRSRDRDRATGGWSSSKKRPRLGDLGGGSRDLSPEPAPDEGPRRDGDPAPKRLASLNAAAFLKLSQERELPLRLPRAHAEVDGRSTEPPAPKAPRPKWPKVNGKNYPKAWQGASSGEAAGPPGWQGCPDEPWPSATPCGPSVQPSHQPLSKALESPLGLRPHLPLLMGGQAALKPEPGRPGEESPAPKQELHQPSFPTPQLSPLPMPGNPADYNGLCVGPELTALGSFYLYCGQEGLQCGGYSPCPMLPEGKLSPVAAPHEEGLLLAPSSVPSGTPFQHPPWGSSRYCSSEDTGVNGYSICGVLPLSVTHAGTTCGGCPYKMPFAAEGCRSLGQLEFPLPEAGHPASPAHPLLGCPVPSVPPAAEPVPHLQTPTSEPQTVARACPQSAKPPSGSKSGLRTGSSCRHTARSKAARRPSHPKQPRVQRPRPRRRRRRRTNGWVPVGAACEKAVYVLDEPEPAIRKSYQAVERHGETIRVRDTVLLKSGPRKTSTPYVAKISALWENPESGELMMSLLWYYRPEHLQGGRSPSMHENEVFASRHQDQNSVACIEEKCYVLTFAEYCRFCAMAKRRGEGLPSRKTALVPPSADYSTPPHRTVPEDTDPELVFLCRHVYDFRHGRILKNPQ

SEQ ID NO: 19384 - protein, 1038 aa, Homo sapiens
MQPEEGTGWLLELLSEVQLQQYFLRLRDDLNVTRLSHFEYVKNEDLEKIGMGRPGQRRLWEAVKRRKALCKRKSWMSKVFSGKRLEAEFPPHHSQSTFRKTSPAPGGPAGEGPLQSLTCLIGEKDLRLLEKLGDGSFGVVRRGEWDAPSGKTVSVAVKCLKPDVLSQPEAMDDFIREVNAMHSLDHRNLIRLYGVVLTPPMKMVTELAPLGSLLDRLRKHQGHFLLGTLSRYAVQVAEGMGYLESKRFIHRDLAARNLLLATRDLVKIGDFGLMRALPQNDDHYVMQEHRKVPFAWCAPESLKTRTFSHASDTWMFGVTLWEMFTYGQEPWIGLNGSQILHKIDKEGERLPRPEDCPQDIYNVMVQCWAHKPEDRPTFVALRDFLLEAQPTDMRALQDFEEPDKLHIQMNDVITVIEGRAENYWWRGQNTRTLCVGPFPRNVVTSVAGLSAQDISQPLQNSFIHTGHGDSDPRHCWGFPDRIDELYLGNPMDPPDLLSVELSTSRPPQHLGGVKKPTYDPVSEDQDPLSSDFKRLGLRKPGLPRGLWLAKPSARVPGTKASRGSGAEVTLIDFGEEPVVPALRPCAPSLAQLAMDACSLLDETPPQSPTRALPRPLHPTPVVDWDARPLPPPPAYDDVAQDEDDFEICSINSTLVGAGVPAGPSQGQTNYAFVPEQARPPPPLEDNLFLPPQGGGKPPSSAQTAEIFQALQQECMRQLQAPAGSPAPSPSPGGDDKPQVPPRVPIPPRPTRPHVQLSPAPPGEEETSQWPGPASPPRVPPREPLSPQGSRTPSPLVPPGSSPLPPRLSSSPGKTMPTTQSFASDPKYATPQVIQAPGPRAGPCILPIVRDGKKVSSTHYYLLPERPSYLERYQRFLREAQSPEEPTPLPVPLLLPPPSTPAPAAPTATVRPMPQAALDPKANFSTNNSNPGARPPPPRATARLPQRGCPGDGPEAGRPADKIQMAMVHGVTTEECQAALQCHGWSVQRAAQYLKVEQLFGLGLRPRGECHKVLEMFDWNLEQAGCHLLGSWGPAHHKR

SEQ ID NO: 19385 - protein, 528 aa, Homo sapiens
MQPEEGTGWLLELLSEVQLQQYFLRLRDDLNVTRLSHFEYVKNEDLEKIGMGRPGQRRLWEAVKRRKALCKRKSWMSKVFSGKRLEAEFPPHHSQSTFRKTSPAPGGPAGEGPLQSLTCLIGEKDLRLLEKLGDGSFGVVRRGEWDAPSGKTVSVAVKCLKPDVLSQPEAMDDFIREVNAMHSLDHRNLIRLYGVVLTPPMKMVTELAPLGSLLDRLRKHQGHFLLGTLSRYAVQVAEGMGYLESKRFIHRDLAARNLLLATRDLVKIGDFGLMRALPQNDDHYVMQEHRKVPFAWCAPESLKTRTFSHASDTWMFGVTLWEMFTYGQEPWIGLNGSQILHKIDKEGERLPRPEDCPQDIYNVMVQCWAHKPEDRPTFVALRDFLLEAQPTDMRALQDFEEPDKLHIQMNDVITVIEGRAENYWWRGQNTRTLCVGPFPRNVVTSVAGLSAQDISQPLQNSFIHTGHGDSDPRHCWGFPDRIDECPFSAFSPGHPPAETCGQVLWTGRREACASDPRLHPVSSRTKGL

SEQ ID NO: 19386 - protein, 1047 aa, Homo sapiens
MGERSAYQRLAGGEEGPQRLGGGRMQPEEGTGWLLELLSEVQLQQYFLRLRDDLNVTRLSHFEYVKNEDLEKIGMGRPGQRRLWEAVKRRKALCKRKSWMSKVFSGKRLEAEFPPHHSQSTFRKTSPAPGGPAGEGPLQSLTCLIGEKDLRLLEKLGDGSFGVVRRGEWDAPSGKTVSVAVKCLKPDVLSQPEAMDDFIREVNAMHSLDHRNLIRLYGVVLTPPMKMVTELAPLGSLLDRLRKHQGHFLLGTLSRYAVQVAEGMGYLESKRFIHRDLAARNLLLATRDLVKIGDFGLMRALPQNDDHYVMQEHRKVPFAWCAPESLKTRTFSHASDTWMFGVTLWEMFTYGQEPWIGLNGSQILHKIDKEGERLPRPEDCPQDIYNVMVQCWAHKPEDRPTFVALRDFLLEAQPTDMRALQDFEEPDKLHIQMNDVITVIEGRAENYWWRGQNTRTLCVGPFPRNVVTSVAGLSAQDISQPLQNSFIHTGHGDSDPRHCWGFPDRIDELYLGNPMDPPDLLSVELSTSRPPQHLGGVKREPPPRPPQPAFFTQKPTYDPVSEDQDPLSSDFKRLGLRKPGLPRGLWLAKPSARVPGTKASRGSGAEVTLIDFGEEPVVPALRPCAPSLAQLAMDACSLLDETPPQSPTRALPRPLHPTPVVDWDARPLPPPPAYDDVAQDEDDFEICSINSTLVGAGVPAGPSQGQTNYAFVPEQARPPPPLEDNLFLPPQGGGKPPSSAQTAEIFQALQQECMRQLQAPAGSPAPSPSPGGDDKPQVPPRVPIPPRPTRPHVQLSPAPPGEEETSQWPGPASPPRVPPREPLSPQGSRTPSPLVPPGSSPLPPRLSSSPGKTMPTTQSFASDPKYATPQVIQAPGPRAGPCILPIVRDGKKVSSTHYYLLPERPSYLERYQRFLREAQSPEEPTPLPVPLLLPPPSTPAPAAPTATVRPMPQAALDPKANFSTNNSNPGARPPPPRATARLPQRGCPGDGPEAGRPADKIQMVEQLFGLGLRPRGECHKVLEMFDWNLEQAGCHLLGSWGPAHHKR

SEQ ID NO: 19387 - protein, 383 aa, Homo sapiens
MSPEVALNRISPMLSPFISSVVRNGKVGLDATNCLRITDLKSGCTSLTPGPNCDRFKLHIPYAGETLKWDIIFNAQYPELPPDFIFGEDAEFLPDPSALQNLASWNPSNPECLLLVVKELVQQYHQFQCSRLRESSRLMFEYQTLLEEPQYGENMEIYAGKKNNWTGEFSARFLLKLPVDFSNIPTYLLKDVNEDPGEDVALLSVSFEDTEATQVYPKLYLSPRIEHALGGSSALHIPAFPGGGCLIDYVPQVCHLLTNKVQYVIQGYHKRREYIAAFLSHFGTGVVEYDAEGFTKLTLLLMWKDFCFLVHIDLPLFFPRDQPTLTFQSVYHFTNSGQLYSQAQKNYPYSPRWDGNEMAKRAKAYFKTFVPQFQEAAFANGKL

SEQ ID NO: 19388 - protein, 415 aa, Homo sapiens
MSPEVALNRISPMLSPFISSVVRNGKVGLDATNCLRITDLKSGCTSLTPGPNCDRFKLHIPYAGETLKWDIIFNAQYPELPPDFIFGEDAEFLPDPSALQNLASWNPSNPECLLLVVKELVQQYHQFQCSRLRESSRLMFEYQTLLEEPQYGENMEIYAGKKNNWTGEFSARFLLKLPVDFSNIPTYLLKDVNEDPGEDVALLSVSFEDTEATQVYPKLYLSPRIEHALGGSSALHIPAFPGGGCLIDYVPQVCHLLTNKVQYVIQGYHKRREYIAAFLSHFGTGVVEYDAEGFTKLTLLLMWKDFCFLVHIDLPLFFPRDQPTLTFQSVYHFTNSGQLYSQAQKNYPYSPRWDGNEMAKRAKGCQGSRDACSPWEQVLAFAVAKTGCKLLQPQRNWPSSRGPPWRASEGERTAQ

SEQ ID NO: 19389 - protein, 379 aa, Homo sapiens
MSPEVALNRISPMLSPFISSVVRNGKVGLDATNCLRITDLKSGCTSLTPGPNCDRFKLHIPYAGETLKWDIIFNAQYPELPPDFIFGEDAEFLPDPSALQNLASWNPSNPECLLLVVKELVQQYHQFQCSRLRESSRLMFEYQTLLEEPQYGENMEIYAGKKNNWTGEFSARFLLKLPVDFSNIPTYLLKDVNEDPGEDVALLSVSFEDTEATQVYPKLYLSPRIEHALGGSSALHIPAFPGGGCLIDYVPQVCHLLTNKVQYVIQGYHKRREYIAAFLSHFGTGVVEYDAEGFTKLTLLLMWKDFCFLVHIDLPLFFPRDQPTLTFQSVYHFTNSGQLYSQAQKNYPYSPRWDGNEMAKRANSRRQHLPMESSRKHQS

SEQ ID NO: 19390 - protein, 376 aa, Homo sapiens
MSPEVALNRISPMLSPFISSVVRNGKVGLDATNCLRITDLKSGCTSLTPGPNCDRFKLHIPYAGETLKWDIIFNAQYPELPPDFIFGEDAEFLPDPSALQNLASWNPSNPECLLLVVKELVQQYHQFQCSRLRESSRLMFEYQTLLEEPQYGENMEIYAGKKNNWTGEFSARFLLKLPVDFSNIPTYLLKDVNEDPGEDVALLSVSFEDTEATQVYPKLYLSPRIEHALGGSSALHIPAFPGGGCLIDYVPQVCHLLTNKVQYVIQGYHKRREYIAAFLSHFGTGVVEYDAEGFTKLTLLLMWKDFCFLVHIDLPLFFPRDQPTLTFQSVYHFTNSGQLYSQAQKNYPYSPRWDGNEMAKRAKRESNRDGEESSSA

SEQ ID NO: 19391 - protein, 260 aa, Homo sapiens
MEPASCCAERPKPGPTGVKTKPSCGGWRAVSLLLLLLLLVLAAVGVVAGGLLGSAQGPPKPRLQTLRMTLPSPHMPRPNQTILVDVARNAATITVTPPQSNHSWAVLFDGQSGCICYRPEEHQVCFLRLMEDSDRETLRLLVDTSKVQEAWVPSQDTHHTQELLAVQGSLEVDPAQAGALVQRLCMRTPIYWARRAEGESGPLWGKARPSGWFEELGAEPLEIHGTLATGPRRQRLIYLCIDICFPSNICVSVCFYYLPD

SEQ ID NO: 19392 - protein, 228 aa, Homo sapiens
MEPASCCAERPKPGPTGVKTKPSCGGWRAVSLLLLLLLLVLAAVGVVAGGLLGSAQGPPKPRLQTLRMTLPSPHMPRPNQTILVDVARNAATITVTPPQSNHSWAVLFDGQSGCICYRPEEHQVCFLRLMEDSDRETLRLLVDTSKVQEAWVPSQDTHHTQELLAVQGSLEVDPAQAGALVQRLCMRTPIYWARRAEGPRRQRLIYLCIDICFPSNICVSVCFYYLPD

SEQ ID NO: 19393 - protein, 652 aa, Homo sapiens
MENPRCPRRPLAEKKARSLDRPQAPGKGSESWDCHWLSLPTAPSRKALHWTTSDWARHSDSPAPSAEAHCTTAAAPTPEETGDFLPSEQRPSQDTKKGWLKTMLNFFVRTGPEEPREKASRRPRGKEGISQHPEPLEAAGEPALRKKAHHDKKPSRKKQGHKKHAAEVTKAAQDQEARGREEGLSKAAAALRSGEADLGPARRGGEDSDHQSFLIKVDGTGALDVSPHATGHQQEEELKKPDQDAIIQMIVELLKRVGDQWEEEQSLASQLGVALPNPAPAVRKKSQEKKTSLKRTSKTNPKKHGSEEAKRGAADVSSPEAWPPKKSSFLPLCVSGHRPSISSSYGLEEPKVQEAPSTEAGAPGPSVLPTPSESQEPGEELPLDRASEYKEFIQKIISMLQDAEEQQGEEQPQVQQEEVGVENPAPHCRRKSQEKRSSFRRAFYHKKHTSKEPRRAGAAGAASPEARRPKRPSFLPLCVGGHRPSTSSSLDPEDLECREPLPAEGEPVVISEAPSQARGHTPEGAPQLSGACESKEIIIQKLVALLQEVDGQLGQQIRRHPSFKRFFYEFSDSSLSKLVATLRSQVAHSSKLDRNRARRLYQFDVSLANKFAGSNSHAMCILMGLRDHYNCTQFPYREDQPNITSPKVESPD

SEQ ID NO: 19394 - protein, 511 aa, Homo sapiens
MSRGPEEVNRLTESTYRNVMEQFNPGLRNLINLGKNYEKAVNAMILAGKAYYDGVAKIGEIATGSPVSTELGHVLIEISSTHKKLNESLDENFKKFHKEIIHELEKKIELDVKYMNATLKRYQTEHKNKLESLEKSQAELKKIRRKSQGSRNALKYEHKEIEYVETVTSRQSEIQKFIADGCKEALLEEKRRFCFLVDKHCGFANHIHYYHLQSAELLNSKLPRWQETCVDAIKVPEKIMNMIEEIKTPASTPVSGTPQASPMIERSNVVRKDYDTLSKCSPKMPPAPSGRAYTSPLIDMFNNPATAAPNSQRVNNSTGTSEDPSLQRSVSVATGLNMMKKQKVKTIFPHTAGSNKTLLSFAQGDVITLLIPEEKDGWLYGEHDVSKARGWFPSSYTKLLEENETEAVTVPTPSPTPVRSISTVNLSENSSVVIPPPDYLECLSMGAAADRRADSARTTSTFKAPASKPETAAPNDANGTAKPPFLSGENPFATVKLRPTVTNDRSAPIIR

SEQ ID NO: 19395 - protein, 259 aa, Homo sapiens
MSFKRPCPLARYNRTSYFYPTFSESSEHSHLLVSPVLVASAVIGVVIILSCITIIVGSIRRDRQARLQRHRHRHHRHHHHHHHHRRRRHREYEHGYVSDEHTYSRSSRRMRYACSSSEDWPPPLDISSDGDVDATVLRELYPDSPPGYEECVGPGATQLYVPTDAPPPYSLTDSCPTLDGTSDSGSGHSPGRHQQEQRTPAQGGLHTVSMDTLPPYEAVCGAGPPSGLLPLPGPDPGPRGSQGSPTPTRAPASGPERIV

SEQ ID NO: 19396 - protein, 150 aa, Homo sapiens
MRYACSSSEDWPPPLDISSDGDVDATVLRELYPDSPPGYEECVGPGATQLYVPTDAPPPYSLTDSCPTLDGTSDSGSGHSPGRHQQEQRTPAQGGLHTVSMDTLPPYEAVCGAGPPSGLLPLPGPDPGPRGSQGSPTPTRAPASGPERIV

SEQ ID NO: 19397 - protein, 208 aa, Homo sapiens
MRYACSSSEDWPPPLDISSDGDVDATVLRELYPDSPPGVSLSRLRWSAMMYTGSFTYWVRSMLSRHKLDAILGRLGYTATLESEFSLVQAISKENVKQMVFKIFLVRVSCEAVLRTAGTRMLEPGTEKLARTHSRHSSEKRLVKPCSCLEGVQPGPGSGGPQQGPSEGVGSETALAEGTAGQRSLPMALSPSEVSTAPNSLPSGSPVL

SEQ ID NO: 19398 - protein, 246 aa, Homo sapiens
MGDREQLLQRARLAEQAERYDDMASAMKAVTELNEPLSNEDRNLLSVAYKNVVGARRSSWRVISSIEQKTMADGNEKKLEKVKAYREKIEKELETVCNDVLSLLDKFLIKNCNDFQYESKVFYLKMKGDYYRYLAEVASGEKKNSVVEASEAAYKEAFEISKEQMQPTHPIRLGLALNFSVFYYEIQNAPEQACLLAKQAFDDAIAELDTLNEDSYKDSTLIMQLLRDNLTLWTSDQQDEEAGEGN

SEQ ID NO: 19399 - protein, 841 aa, Homo sapiens; identical to SEQ ID NO: 226

SEQ ID NO: 19400 - protein, 248 aa, Homo sapiens [sequence omitted]

SEQ ID NO: 19401 - protein, 216 aa, Homo sapiens
MERASLIQKAKLAEQAERYEDMAAFMKGAVEKGEELSCEERNLLSVAYKNVVGGQRAAWRVLSSIEQKSNEEGSEEKGPEVREYRVFYLKMKGDYYRYLAEVATGDDKKRIIDSARSAYQEAMDISKKEMPPTNPIRLGLALNFSVFHYEIANSPEEAISLAKTTFDEAMADLHTLSEDSYKDSTLIMQLLRDNLTLWTADNAGEEGGEAPQEPQS

SEQ ID NO: 19402 - protein, 783 aa, Homo sapiens
MRWQCGTRFRGLRPAVAPWTALLALGLPGWVLAVSATAAAVVPEQHASVAGQHPLDWLLTDRGPFHRAQEYADFMERYRQGFTTRYRIYREFARWKVNNLALERKDFFSLPLPLAPEFIRNIRLLGRRPNLQQVTENLIKKYGTHFLLSATLGGEESLTIFVDKQKLGRKTETTGGASIIGGSGNSTAVSLETLHQLAASYFIDRESTLRRLHHIQIATGAIKVTETRTGPLGCSNYDNLDSVSSVLVQSPENKVQLLGLQVLLPEYLRERFVAAALSYITCSSEGELVCKENDCWCKCSPTFPECNCPDADIQAMEDSLLQIQDSWATHNRQFEESEEFQALLKRLPDDRFLNSTAISQFWAMDTSLQHRYQQLGAGLKVLFKKTHRILRRLFNLCKRCHRQPRFRLPKERSLSYWWNRIQSLLYCGESTFPGTFLEQSHSCTCPYDQSSCQGPIPCALGEGPACAHCAPDNSTRCGSCNPGYVLAQGLCRPEVAESLENFLGLETDLQDLELKYLLQKQDSRIEVHSIFISNDMRLGSWFDPSWRKRMLLTLKSNKYKPGLVHVMLALSLQICLTKNSTLEPVMAIYVNPFGGSHSESWFMPVNEGSFPDWERTNVDAAAQCQNWTITLGNRWKTFFETVHVYLRSRIKSLDDSSNETIYYEPLEMTDPSKNLGYMKINTLQVFGYSLPFDPDAIRDLILQLDYPYTQGSQDSALLQLIELRDRVNQLSPPGKVRLDLFSCLLRHRLKLANNEVGRIQSSLRAFNSKLPNPVEYETGKLCS

SEQ ID NO: 19403 - protein, 678 aa, Homo sapiens
MVRAGGRAWQQGLHSLSAVSILAKGFMFLLVGDSRAESVTNTLVLFTIGEESLTIFVDKQKLGRKTETTGGASIIGGSGNSTAVSLETLHQLAASYFIDRESTLRRLHHIQIATGAIKVTETRTGPLGCSNYDNLDSVSSVLVQSPENKVQLLGLQVLLPEYLRERFVAAALSYITCSSEGELVCKENDCWCKCSPTFPECNCPDADIQAMEDSLLQIQDSWATHNRQFEESEEFQALLKRLPDDRFLNSTAISQFWAMDTSLQHRYQQLGAGLKVLFKKTHRILRRLFNLCKRCHRQPRFRLPKERSLSYWWNRIQSLLYCGESTFPGTFLEQSHSCTCPYDQSSCQGPIPCALGEGPACAHCAPDNSTRCGSCNPGYVLAQGLCRPEVAESLENFLGLETDLQDLELKYLLQKQDSRIEVHSIFISNDMRLGSWFDPSWRKRMLLTLKSNKYKPGLVHVMLALSLQICLTKNSTLEPVMAIYVNPFGGSHSESWFMPVNEGSFPDWERTNVDAAAQCQNWTITLGNRWKTFFETVHVYLRSRIKSLDDSSNETIYYEPLEMTDPSKNLGYMKINTLQVFGYSLPFDPDAIRDLILQLDYPYTQGSQDSALLQLIELRDRVNQLSPPGKVRLDLFSCLLRHRLKLANNEVGRIQSSLRAFNSKLPNPVEYETGKLCS

SEQ ID NO: 19404 - protein, 168 aa, Homo sapiens
MFQIPEFEPSEQEDSSSAERGLGPSPAGDGPSGSGKHHRQAPGLLWDASHQQEQPTSSSHHGGAGAVEIRSRHSSYPAGTEDDEGMGEEPSPFRGRSRSAPPNLWAAQRYGRELRRMSDEFVDSFKKGLPRPKSAGTATQMRQSSSWTRVFQSWWDRNLGRGSSAPSQ

SEQ ID NO: 19405 - protein, 529 aa, Homo sapiens
MGPSCPVFLSFTKLSLWWLLLTPAGGEEAKRPPPRAPGDPLSSPSPTALPQGGSHTETEDRLFKHLFRGYNRWARPVPNTSDVVIVRFGLSIAQLIDVDEKNQMMTTNVWLKQEWSDYKLRWNPTDFGNITSLRVPSEMIWIPDIVLYNNADGEFAVTHMTKAHLFSTGTVHWVPPAIYKSSCSIDVTFFPFDQQNCKMKFGSWTYDKAKIDLEQMEQTVDLKDYWESGEWAIVNATGTYNSKKYDCCAEIYPDVTYAFVIRRLPLFYTINLIIPCLLISCLTVLVFYLPSDCGEKITLCISVLLSLTVFLLLITEIIPSTSLVIPLIGEYLLFTMIFVTLSIVITVFVLNVHHRSPSTHTMPHWVRGALLGCVPRWLLMNRPPPPVELCHPLRLKLSPSYHWLESNVDAEEREVVVEEEDRWACAGHVAPSVGTLCSHGHLHSGASGPKAEALLQEGELLLSPHMQKALEGVHYIADHLRSEDADSSVKEDWKYVAMVIDRIFLWLFIIVCFLGTIGLFLPPFLAGMI

SEQ ID NO: 19406 - protein, 514 aa, Homo sapiens
MGPSCPVFLSFTKLSLWWLLLTPAGGEEAKRPPPRAPGDPLSSPSPTALPQGGSHTETEDRLFKHLFRGYNRWARPVPNTSDVDEKNQMMTTNVWLKQEWSDYKLRWNPTDFGNITSLRVPSEMIWIPDIVLYNNADGEFAVTHMTKAHLFSTGTVHWVPPAIYKSSCSIDVTFFPFDQQNCKMKFGSWTYDKAKIDLEQMEQTVDLKDYWESGEWAIVNATGTYNSKKYDCCAEIYPDVTYAFVIRRLPLFYTINLIIPCLLISCLTVLVFYLPSDCGEKITLCISVLLSLTVFLLLITEIIPSTSLVIPLIGEYLLFTMIFVTLSIVITVFVLNVHHRSPSTHTMPHWVRGALLGCVPRWLLMNRPPPPVELCHPLRLKLSPSYHWLESNVDAEEREVVVEEEDRWACAGHVAPSVGTLCSHGHLHSGASGPKAEALLQEGELLLSPHMQKALEGVHYIADHLRSEDADSSVKEDWKYVAMVIDRIFLWLFIIVCFLGTIGLFLPPFLAGMI

SEQ ID NO: 19407 - protein, 552 aa, Homo sapiens
MAEKQKHDGRVKIGHYVLGDTLGVGTFGKVKIGEHQLTGHKVAVKILNRQKIRSLDVVGKIKREIQNLKLFRHPHIIKLYQVISTPTDFFMVMEYVSGGELFDYICKHGRVEEMEARRLFQQILSAVDYCHRHMVVHRDLKPENVLLDAHMNAKIADFGLSNMMSDGEFLRTSCGSPNYAAPEVISGRLYAGPEVDIWSCGVILYALLCGTLPFDDEHVPTLFKKIRGGVFYIPEYLNRSVATLLMHMLQVDPLKRATIKDIREHEWFKQDLPSYLFPEDPSYDANVIDDEAVKEVCEKFECTESEVMNSLYSGDPQDQLAVAYHLIIDNRRIMNQASEFYLASSPPSGSFMDDSAMHIPPGLKPHPERMPPLIADSPKARCPLDALNTTKPKSLAVKKAKWHLGIRSQSKPYDIMAEVYRAMKQLDFEWKVVNAYHLRVRRKNPVTGNYVKMSLQLYLVDNRSYLLDFKSIDDEVVEQRSGSSTPQRSCSAAGLHRPRSSFDSTTAESHSLSGSLTGSLTGSTLSSVSPRLGSHTMDFFEMCASLITTLAR

SEQ ID NO: 19408 - protein, 412 aa, Homo sapiens
MAFWCQRDSYAREFTTTVVSCCPAELQTEGSNGKKEVLSGFQVVLEDTVLFPEGGGQPDDRGTINDISVLRVTRRGEQADHFTQTPLDPGSQVLVRVDWERRFDHMQQHSGQHLITAVADHLFKLKTTSWELGRFRSAIELDTPSMTAEQVAAIEQSVNEKIRDRLPVNVRELSLDDPEVEQVSGRGLPDDHAGPIRVVNIEGVDSNMCCGTHVSNLSDLQVIKILGTEKGKKNRTNLIFLSGNRVLKWMERSHGTEKALTALLKCGAEDHVEAVKKLQNSTKILQKNNLNLLRDLAVHIAHSLRNSPDWGGVVILHRKEGDSEFMNIIANEIGSEETLLFLTVGDEKGGGLFLLAGPPASVETLGPRVAEVLEGKGAGKKGRFQGKATKMSRRMEAQALLQDYISTQSAKE

SEQ ID NO: 19409 - protein, 525 aa, Homo sapiens
MEFCVEDSTDVHVLIEDHRIVFSCKNADGVELYNEIEFYAKVNSKDSQDKRSSRSITCFVRKWKEKVAWPRLTKEDIKPVWLSVDFDNWRDWEGDEEMELAHVEHYAELLKKVSTKRPPPAMDDLDFTTTVVSCCPAELQTEGSNGKKEVLSGFQVVLEDTVLFPEGGGQPDDRGTINDISVLRVTRRGEQADHFTQTPLDPGSQVLVRVDWERRFDHMQQHSGQHLITAVADHLFKLKTTSWELGRFRSAIELDTPSMTAEQVAAIEQSVNEKIRDRLPVNVRELSLDDPEVEQVSGRGLPDDHAGPIRVVNIEGVDSNMCCGTHVSNLSDLQVIKILGTEKGKKNRTNLIFLSGNRVLKWMERSHGTEKALTALLKCGAEDHVEAVKKLQNSTKILQKNNLNLLRDLAVHIAHSLRNSPDWGGVVILHRKEGDSEFMNIIANEIGSEETLLFLTVGDEKGGGLFLLAGPPASVETLGPRVAEVLEGKGAGKKGRFQGKATKMSRRMEAQALLQDYISTQSAKE

SEQ ID NO: 19410 - protein, 586 aa, Homo sapiens
MFSLPLNCSPDHIRRGSCWGRPQDLKIAAPAWNSKCHPGAGAAMARQHARTLWYDRPRYVFMEFCVEDSTDVHVLIEDHRIVFSCKNADGVELYNEIEFYAKVNSKDSQDKRSSRSITCFVRKWKEKVAWPRLTKEDIKPVWLSVDFDNWRDWEGDEEMELAHVEHYAELLKKVSTKRPPPAMDDLDFTTTVVSCCPAELQTEGSNGKKEVLSGFQVVLEDTVLFPEGGGQPDDRGTINDISVLRVTRRGEQADHFTQTPLDPGSQVLVRVDWERRFDHMQQHSGQHLITAVADHLFKLKTTSWELGRFRSAIELDTPSMTAEQVAAIEQSVNEKIRDRLPVNVRELSLDDPEVEQVSGRGLPDDHAGPIRVVNIEGVDSNMCCGTHVSNLSDLQVIKILGTEKGKKNRTNLIFLSGNRVLKWMERSHGTEKALTALLKCGAEDHVEAVKKLQNSTKILQKNNLNLLRDLAVHIAHSLRNSPDWGGVVILHRKEGDSEFMNIIANEIGSEETLLFLTVGDEKGGGLFLLAGPPASVETLGPRVAEVLEGKGAGKKGRFQGKATKMSRRMEAQALLQDYISTQSAKE

SEQ ID NO: 19411 - protein, 326 aa, Homo sapiens
MPPSISAFQAAYIGIEVLIALVSVPGNVLVIWAVKVNQALRDATFCFIVSLAVADVAVGALVIPLAILINIGPQTYFHTCLMVACPVLILTQSSILALLAIAVDRYLRVKIPLRYKMVVTPRRAAVAIAGCWILSFVVGLTPMFGWNNLSAVERAWAANGSMGEPVIKCEFEKVISMEYMVYFNFFVWVLPPLLLMVLIYLEVFYLIRKQLNKKVSASSGDPQKYYGKELKIAKSLALILFLFALSWLPLHILNCITLFCPSCHKPSILTYIAIFLTHGNSAMNPIVYAFRIQKFRVTFLKIWNDHFRCQPAPPIDEDLPEERPDD

SEQ ID NO: 19412 - protein, 125 aa, Homo sapiens
MPPSISAFQAAYIGIEVLIALVSVPGNVLVIWAVKVNQALRDATFCFIVSLAVADVAVGALVIPLAILINIGPQTYFHTCLMVACPVLILTQSSILALLAIAVDRYLRVKIPLRRISQCMASTKS

SEQ ID NO: 19413 - protein, 306 aa, Homo sapiens
MSEVTRSLLQRWGASFRRGADFDSWGQLVEAIDEYQILARHLQKEAQAQHNNSEFTEEQKKTIGKIATCLELRSAALQSTQSQEEFKLEDLKKLEPILKNILTYNKEFPFDVQPVPLRRILAPGEEENLEFEEDEEEGGAGAGSPDSFPARVPGTLLPRLPSEPGMTLLTIRIEKIGLKDAGQCIDPYITVSVKDLNGIDLTPVQDTPVASRKEDTYVHFNVDIELQKHVEKLTKGAAIFFEFKHYKPKKRFTSTKCFAFMEMDEIKPGPIVIELYKKPTDFKRKKLQLLTKKPLYLHLHQTLHKE

SEQ ID NO: 19414 - protein, 141 aa, Homo sapiens
MTLLTIRIEKIGLKDAGQCIDPYITVSVKDLNGIDLTPVQDTPVASRKEDTYVHFNVDIELQKHVEKLTKGAAIFFEFKHYKPKKRFTSTKCFAFMEMDEIKPGPIVIELYKKPTDFKRKKLQLLTKKPLYLHLHQTLHKE

SEQ ID NO: 19415 - protein, 224 aa, Homo sapiens
MSEVTRSLLQRWGASFRRGADFDSWGQLVEAIDEYQILARHLQKEAQAQHNNSEFTEEQKKTIGKIATCLELRSAALQSTQSQEEFKLEDLKKLEPILKNILTYNKEFPFDVQPVPLRRILAPGEEENLEFEEDEEEGGAGAGSPDSFPARVPGAAIFFEFKHYKPKKRFTSTKCFAFMEMDEIKPGPIVIELYKKPTDFKRKKLQLLTKKPLYLHLHQTLHKE

SEQ ID NO: 19416 - protein, 501 aa, Homo sapiens
MSSSGTPDLPVLLTDLKIQYTKIFINNEWHDSVSGKKFPVFNPATEEELCQVEEGDKEDVDKAVKAARQAFQIGSPWRTMDASERGRLLYKLADLIERDRLLLATMESMNGGKLYSNAYLNDLAGCIKTLRYCAGWADKIQGRTIPIDGNFFTYTRHEPIGVCGQIIPWNFPLVMLIWKIGPALSCGNTVVVKPAEQTPLTALHVASLIKEAGFPPGVVNIVPGYGPTAGAAISSHMDIDKVAFTGSTEVGKLIKEAAGKSNLKRVTLELGGKSPCIVLADADLDNAVEFAHHGVFYHQGQCCIAASRIFVEESIYDEFVRRSVERAKKYILGNPLTPGVTQGPQIDKEQYDKILDLIESGKKEGAKLECGGGPWGNKGYFVQPTVFSNVTDEMRIAKEEIFGPVQQIMKFKSLDDVIKRANNTFYGLSAGVFTKDIDKAITISSALQAGTVWVNCYGVVSAQCPFGGFKMSGNGRELGEYGFHEYTEVKTVTVKISQKNS

SEQ ID NO: 19417 - protein, 573 aa, Homo sapiens
MLGSLGLWALLPTAVEAPPNRRTCVFFEAPGVRGSTKTLGELLDTGTELPRAIRCLYSRCCFGIWNLTQDRAQVEMQGCRDSDEPGCESLHCDPSPRAHPSPGSTLFTCSCGTDFCNANYSHLPPPGSPGTPGSQGPQAAPGESIWMALVLLGLFLLLLLLLGSIILALLQRKNYRVRGEPVPEPRPDSGRDWSVELQELPELCFSQVIREGGHAVVWAGQLQGKLVAIKAFPPRSVAQFQAERALYELPGLQHDHIVRFITASRGGPGRLLSGPLLVLELHPKGSLCHYLTQYTSDWGSSLRMALSLAQGLAFLHEERWQNGQYKPGIAHRDLSSQNVLIREDGSCAIGDLGLALVLPGLTQPPAWTPTQPQGPAAIMEAGTQRYMAPELLDKTLDLQDWGMALRRADIYSLALLLWEILSRCPDLRPDSSPPPFQLAYEAELGNTPTSDELWALAVQERRRPYIPSTWRCFATDPDGLRELLEDCWDADPEARLTAECVQQRLAALAHPQESHPFPESCPRGCPPLCPEDCTSIPAPTILPCRPQRSACHFSVQQGPCSRNPQPACTLSPV

SEQ ID NO: 19418 - protein, 478 aa, Homo sapiens
MLGSLGLWALLPTAVEAPPNRRTCVFFEAPGVRGSTKTLGELLDTGTELPRAIRCLYSRCCFGIWNLTQDRAQVEMQGCRDSDEPGCESLHCDPSPRAHPSPGSTLFTCSCGTDFCNANYSHLPPPGSPGTPGSQGPQAAPGESIWMALVLLGLFLLLLLLLGSIILALLQRKNYRVRGEPVPEPRPDSGRDWSVELQELPELCFSQVIREGGHAVVWAGQLQGKLVAIKAFPPRSVAQFQAERALYELPGLQHDHIVRFITASRGGPGRLLSGPLLVLELHPKGSLCHYLTQYTSDWGSSLRMALSLAQGLAFLHEERWQNGQYKPGIAHRDLSSQNVLIREDGSCAIGDLGLALVLPGLTQPPAWTPTQPQGPAAIMEAGTQRYMAPELLDKTLDLQDWGMALRRADIYSLALLLWEILSRCPDLRPAVHHPSNWPMRQNWAIPLPLMSYGPWQCRRGGVPTSHPPGAALPQTLMG

SEQ ID NO: 19419 - protein, 478 aa, Homo sapiens
MLGSLGLWALLPTAVEAPPNRRTCVFFEAPGVRGSTKTLGELLDTGTELPRAIRCLYSRCCFGIWNLTQDRAQVEMQGCRDSDEPGCESLHCDPSPRAHPSPGSTLFTCSCGTDFCNANYSHLPPPGSPGTPGSQGPQAAPGESIWMALVLLGLFLLLLLLLGSIILALLQRKNYRVRGEPVPEPRPDSGRDWSVELQELPELCFSQVIREGGHAVVWAGQLQGKLVAIKAFPPRSVAQFQAERALYELPGLQHDHIVRFITASRGGPGRLLSGPLLVLELHPKGSLCHYLTQYTSDWGSSLRMALSLAQGLAFLHEERWQNGQYKPGIAHRDLSSQNVLIREDGSCAIGDLGLALVLPGLTQPPAWTPTQPQGPAAIMEDPDGLRELLEDCWDADPEARLTAECVQQRLAALAHPQESHPFPESCPRGCPPLCPEDCTSIPAPTILPCRPQRSACHFSVQQGPCSRNPQPACTLSPV

SEQ ID NO: 19420 - protein, 385 aa, Homo sapiens
MKDEPRSTNLFMKLDSVFIWKEPFGLVLIIAPWNYPLNLTLVLLVGALAAGSCVVLKPSEISQGTEKVLAEVLPQYLDQSCFAVVLGGPQETGQLLEHKLDYIFFTGSPRVGKIVMTAATKHLTPVTLELGGKNPCYVDDNCDPQTVANRVAWFCYFNAGQTCVAPDYVLCSPEMQERLLPALQSTITRFYGDDPQSSPNLGHIINQKQFQRLRALLGCSRVAIGGQSNESDRYIAPTVLVDVQETEPVMQEEIFGPILPIVNVQSVDEAIKFINRQEKPLALYAFSNSSQVVNQMLERTSSGSFGGNEGFTYISLLSVPFGGVGHSGMGRYHGKFTFDTFSHHRTCLLAPSGLEKLKEIHYPPYTDWNQQLLRWGMGSQSCTLL

SEQ ID NO: 19421 - protein, 499 aa, Homo sapiens
MSFGSEHYLCSSSSYRKVFGDGSRLSARLSGAGGAGGFRSQSLSRSNVASSAACSSASSLGLGLAYRRPPASDGLDLSQAAARTNEYKIIRTNEKEQLQGLNDRFAVFIEKVHQLETQNRALEAELAALRQRHAEPSRVGELFQRELRDLRAQLEEASSARSQALLERDGLAEEVQRLRARCEEESRGREGAERALKAQQRDVDGATLARLDLEKKVESLLDELAFVRQVHDEEVAELLATLQASSQAAAEVDVTVAKPDLTSALREIRAQYESLAAKNLQSAEEWYKSKFANLNEQAARSTEAIRASREEIHEYRRQLQARTIEIEGLRGANESLERQILELEERHSAEVAGYQDSIGQLENDLRNTKSEMARHLREYQDLLNVKMALDIEIAAYRKLLEGEETRFSTSGLSISGLNPLPNPSYLLPPRILSATTSKVSSTGLSLKKEEEEEEASKVASKKTSQIGESFEEILEETVISTKKTEKSNIEETTISSQKI

SEQ ID NO: 19422 - protein, 384 aa, Homo sapiens
MDAALLLNVEGVKKTILHGGTGELPNFITGSRVIFHFRTMKCDEERTVIDDSRQVGQPMHIIIGNMFKLEVWEILLTSMRVHEVAEFWCDTIHTGVYPILSRSLRQMAQGKDPTEWHVHTCGLANMFAYHTLGYEDLDELQKEPQPLVFVIELLQVDAPSDYQRETWNLSNHEKMKAVPVLHGEGNRLFKLGRYEEASSKYQEAIICLRNLQTKEKPWEVQWLKLEKMINTLILNYCQCLLKKEEYYEVLEHTSDILRHHPGIVKAYYVRARAHAEVWNEAEAKADLQKVLELEPSMQKAVRRELRLLENRMAEKQEEERLRCRNMLSQGATQPPAEPPTEPPAQSSTEPPAEPPTAPSAELSAGPPAEPATEPPPSPGHSLQH

SEQ ID NO: 19423 - protein, 324 aa, Homo sapiens
MDAALLLNVEGVKKTILHGGTGELPNFITGSRHTGVYPILSRSLRQMAQGKDPTEWHVHTCGLANMFAYHTLGYEDLDELQKEPQPLVFVIELLQVDAPSDYQRETWNLSNHEKMKAVPVLHGEGNRLFKLGRYEEASSKYQEAIICLRNLQTKEKPWEVQWLKLEKMINTLILNYCQCLLKKEEYYEVLEHTSDILRHHPGIVKAYYVRARAHAEVWNEAEAKADLQKVLELEPSMQKAVRRELRLLENRMAEKQEEERLRCRNMLSQGATQPPAEPPTEPPAQSSTEPPAEPPTAPSAELSAGPPAEPATEPPPSPGHSLQH

SEQ ID NO: 19424 - protein, 321 aa, Homo sapiens
MDAALLLNVEGVKKTILHGGTGELPNFITGSRVIFHFRTMKCDEERTVIDDSRQVGQPMHIIIGNMFKLEVWEILLTSMRVHEVAEFWCDTIVDAPSDYQRETWNLSNHEKMKAVPVLHGEGNRLFKLGRYEEASSKYQEAIICLRNLQTKEKPWEVQWLKLEKMINTLILNYCQCLLKKEEYYEVLEHTSDILRHHPGIVKAYYVRARAHAEVWNEAEAKADLQKVLELEPSMQKAVRRELRLLENRMAEKQEEERLRCRNMLSQGATQPPAEPPTEPPAQSSTEPPAEPPTAPSAELSAGPPAEPATEPPPSPGHSLQH

SEQ ID NO: 19425 - protein, 362 aa, Homo sapiens
MDAALLLNVEGVKKTILHGGTGELPNFITGSRVGQPMHIIIGNMFKLEVWEILLTSMRVHEVAEFWCDTIHTGVYPILSRSLRQMAQGKDPTEWHVHTCGLANMFAYHTLGYEDLDELQKEPQPLVFVIELLQVDAPSDYQRETWNLSNHEKMKAVPVLHGEGNRLFKLGRYEEASSKYQEAIICLRNLQTKEKPWEVQWLKLEKMINTLILNYCQCLLKKEEYYEVLEHTSDILRHHPGIVKAYYVRARAHAEVWNEAEAKADLQKVLELEPSMQKAVRRELRLLENRMAEKQEEERLRCRNMLSQGATQPPAEPPTEPPAQSSTEPPAEPPTAPSAELSAGPPAEPATEPPPSPGHSLQH

SEQ ID NO: 19426 - protein, 360 aa, Homo sapiens
MDAALLLNVEGVKKTILHGGTGELPNFITGSRVIFHFRTMKCDEERTVIDDSRQVGQPMHIIIGNMFKLEVWEILLTSMRVHEVAEFWCDTIHTGVYPILSRSLRQMAQGKDPTEWHVHTCGLANMFAYHTLGYEDLDELQKEPQPLVFVIELLQVDAPSDYQRETWNLSNHEKMKAVPVLHGEGNRLFKLGRYEEASSKYQEAIICLRNLQTKCLLKKEEYYEVLEHTSDILRHHPGIVKAYYVRARAHAEVWNEAEAKADLQKVLELEPSMQKAVRRELRLLENRMAEKQEEERLRCRNMLSQGATQPPAEPPTEPPAQSSTEPPAEPPTAPSAELSAGPPAEPATEPPPSPGHSLQH

SEQ ID NO: 19427 - protein, 577 aa, Homo sapiens
MHWLRKVQGLCTLWGTQMSSRTLYINSRQLVSLQWGHQEVPAKFNFASDVLDHWADMEKAGKRLPSPALWWVNGKGKELMWNFRELSENSQQAANVLSGACGLQRGDRVAVVLPRVPEWWLVILGCIRAGLIFMPGTIQMKSTDILYRLQMSKAKAIVAGDEVIQEVDTVASECPSLRIKLLVSEKSCDGWLNFKKLLNEASTTHHCVETGSQEASAIYFTSGTSGLPKMAEHSYSSLGLKAKMDAGWTGLQASDIMWTISDTGWILNILCSLMEPWALGACTFVHLLPKFDPLVILKTLSSYPIKSMMGAPIVYRMLLQQDLSSYKFPHLQNCVTVGESLLPETLENWRAQTGLDIRESYGQTETGLTCMVSKTMKIKPGYMGTAASCYDVQIIDDKGNVLPPGTEGDIGIRVKPIRPIGIFSGYVDNPDKTAANIRGDFWLLGDRGIKDEDGYFQFMGRANDIINSSGYRIGPSEVENALMEHPAVVETAVISSPDPVRGEVVKAFVVLASQFLSHDPEQLTKELQQHVKSVTAPYKYPRKIEFVLNLPKTVTGKIQRAKLRDKEWKMSGKARAQ

SEQ ID NO: 19428 - protein, 976 aa, Homo sapiens
MTRTDPPDLLVSTVYQDIKVATPGPASKCSPCERSVARPAEPAPFNKRHCRSFDFLEALDGPAMETLPEPPPPESAVPRARTREAEPRRRARSKSAPRAPPGLTPAPASPPVLPRRGREAQRAARAEASPRREPAYPALRALANELHPIKLQPQRGGPGRVAPLCAAAGRCAPPEPPAGPAPHVRCRLDIKPDDAVLQHATRGSRSCGPTEAAHWARPAPQFHGLTVPGPRHMALSRTPTPSDSYCADPRAFYCDGPLPGPRDYAERRSLPFTTPPGPTQFFYTEEPQGFRGSFAASPGPTFDAYYPRPYPSEELSGPSPRRMGGYYAGEVRTFPIQEPPSRSYYGEAPRAYGLPYGPRYVPEEPRAHSTARPFYTEDFGRYRERDVLARTYPHPRSSPAWADWGPRPYRTLQVVPPSDPDPLLASWHGGTGTSPPRLATDSRHYSRSWDNILAPGPRREDPLGRGRSYENLLGREVREPRGVSPEGRRPPVVVNLSTSPRRYAALSLSETSLTEKGRAGEGLGRNWYVTPEITITDNDLRATERPSARAWELPGGRTRPPPHAAPDGPTSGRQRSLEQLDELITDLVIDSRPTAGQASEPAADCLGPQLRRLLDSRPAGSGAPALAPPRSPPASAGSAEEPAAPGEAADASPEPSADEDDLMTCSNARCRRTETMFNACLYFKSCHSCYTYYCSRLCRREDWDAHKARCVYGRVGSVCRHVLQFCRDSGPVHRAFSRIARVGFLSRGRGVLFLGFPSPGSADNFLRFGLEGLLLSPTYLSLRELATHAAPLGSYARELAAAGRLYEPAECFLLSVSVAVGPGTAPPGTPALPAPAPRSHGPTVRKFAKVALAAGSPARPPPARSREPDMETLILTPPPGTAGLDQDGEAGRRAREVAFIHIQRELRLRGVFLRHEFPRVYEQLCEFVEANRRFTPTTIYPTDRRTGRPFMCMIMAASEPRALDWVASANLLDDIM

SEQ ID NO: 19429 - protein, 695 aa, Homo sapiens
MAAATIVHDTSEAVELCPAYGLYLKPITKMTISVALPQLKQPGKSISNWEVMERLKGMVQNHQFSTLRISKSTMDFIRFEGEVENKSLVKSFLACLDGKTIKLSGFSDILKVRAAEFKIDFPTRHDWDSFFRDAKDMNETLPGERPDTIHLEGLPCKWFALKESGSEKPSEDVLVKVFEKFGEIRNVDIPMLDPYREEMTGRNFHTFSFGGHLNFEAYVQYREYMGFIQAMSALRGMKLMYKGEDGKAVACNIKVSFDSTKHLSDASIKKRQLERQKLQELEQQREEQKRREKEAEERQRAEERKQKELEELERERKREEKLRKREQKQRDRELRRNQKKLEKLQAEEQKQLQEKIKLEERKLLLAQRNLQSIRLIAELLSRAKAVKLREQEQKEEKLRLQQQEERRRLQEAELRRVEEEKERALGLQRKERELRERLLSILLSKKPDDSHTHDELGVAHADLLQPVLDILQTVSSGCVSATTLHPLGGQPPAGAPKESPAHPEADGAPKSVNGSVAEEAPCKEVQSSCRVVPEDGSPEKRCPGGVLSCIPDNNQQPKGIPACEQNVSRKDTRSEQDKCNREPSKGRGRATGDGLADRHKRERSRARRASSREDGRPRKERRPHKKHAYKDDSPRRRSTSPDHTRSRRSHSKDRHRRERSRERRGSASRKHSRHRRRSERSRSRSPSRHRSTWNR

SEQ ID NO: 19430 - protein, 385 aa, Homo sapiens
MAAATIVHDTSEAVELCPAYGLYLKPITKMTISVALPQLKQPGKSISNWEVMERLKGMVQNHQFSTLRISKSTMDFIRFEGEVENKSLVKSFLACLDGKTIKLSGFSDILKVRAAEFKIDFPTRHDWDSFFRDAKDMNETLPGERPDTIHLEGLPCKWFALKESGSEKPSEDVLVKVFEKFGEIRNVDIPMLDPYREEMTGRNFHTFSFGGHLNFEAYVQYREYMGFIQAMSALRGMKLMYKGEDGKAVACNIKVSFDSTKHLSDASIKKRQLERQKLQELEQQREEQKRREKEAEERQRAEERKQKELEELERERKREEKLRKREQKQRDRELRRNQKKLEKLQAEEQKQLQEKIKLEERKLLLAQRNLQSIRLIAELLSRAKL

SEQ ID NO: 19431 - protein, 445 aa, Homo sapiens
MAAATIVHDTSEAVELCPAYGLYLKPITKMTISVALPQLKQPGKSISNWEVMERLKGMVQNHQFSTLRISKSTMDFIRFEGEVENKSLVKSFLACLDGKTIKLSGFSDILKVRAAEFKIDFPTRHDWDSFFRDAKDMNETLPGERPDTIHLEGLPCKWFALKESGSEKPSEDVLVKVFEKFGEIRNVDIPMLDPYREEMTGRNFHTFSFGGHLNFEAYVQYREYMGFIQAMSALRGMKLMYKGEDGKAVACNIKVSFDSTKHLSDASIKKRQLERQKLQELEQQREEQKRREKEAEERQRAEERKQKELEELERERKREEKLRKREQKQRDRELRRNQKKLEKLQAEEQKQLQEKIKLEERKLLLAQRNLQSIRLIAELLSRAKVGGSLCSRQPRPGCPQCPPLKCGRRHGAVSPPAAAVATKPALMPRMTAPSREGVALVCRSR

SEQ ID NO: 19432 - protein, 689 aa, Homo sapiens [sequence omitted]

SEQ ID NO: 19433 - protein, 687 aa, Homo sapiens
MAARTLGRGVGRLLGSLRGLSGQPARPPCGVSAPRRAASGPSGSAPAVAAAAAQPGSYPALSAQAAREPAAFWGPLARDTLVWDTPYHTVWDCDFSTGKIGWFLGGQLNVSVNCLDQHVRKSPESVALIWERDEPGTEVRITYRELLETTCRLANTLKRHGVHRGDRVAIYMPVSPLAVAAMLACARIGAVHTVIFAGFSAESLAGRINDAKCKVVITFNQGLRGGRVVELKKIVDEAVKHCPTVQHVLVAHRTDNKVHMGDLDVPLEQEMAKEDPVCAPESMGSEDMLFMLYTSGSTGMPKGIVHTQAGYLLYAALTHKLVFDHQPGDIFGCVADIGWITGHSYVVYGPLCNGATSVLFESTPVYPNAGRYWETVERLKINQFYGAPTAVRLLLKYGDAWVKKYDRSSLRTLGSVGEPINCEAWEWLHRVVGDSRCTLVDTWWQTGGICIAPRPSEEGAEILPAMAMRPFFGIVPVLMDEKGSVVEGSNVSGALCISQAWPGMARTIYGDHQRFVDAYFKAYPGYYFTGDGAYRTEGGYYQITGRMDDVINISGHRLGTAEIEDAIADHPAVPESAVIGYPHDIKGEAAFAFIVVKDSAGDSDVVVQELKSMVATKIAKYAVPDEILVVKRLPKTRSGKVMRRLLRKIITSEAQELGDTTTLEDPSIIAEILSVYQKCKDKQAAAK

SEQ ID NO: 19434 - protein, 568 aa, Homo sapiens
MRRRKERQPWDRFHFLHFAPHGRELLETTCRLANTLKRHGVHRGDRVAIYMPVSPLAVAAMLACARIGAVHTVIFAGFSAESLAGRINDAKCKVVITFNQGLRGGRVVELKKIVDEAVKHCPTVQHVLVAHRTDNKVHMGDLDVPLEQEMAKEDPVCAPESMGSEDMLFMLYTSGSTGMPKGIVHTQAGYLLYAALTHKLVFDHQPGDIFGCVADIGWITGHSYVVYGPLCNGATSVLFESTPVYPNAGRYWETVERLKINQFYGAPTAVRLLLKYGDAWVKKYDRSSLRTLGSVGEPINCEAWEWLHRVVGDSRCTLVDTWWQTETGGICIAPRPSEEGAEILPAMAMRPFFGIVPVLMDEKGSVVEGSNVSGALCISQAWPGMARTIYGDHQRFVDAYFKAYPGYYFTGDGAYRTEGGYYQITGRMDDVINISGHRLGTAEIEDAIADHPAVPESAVIGYPHDIKGEAAFAFIVVKDSAGDSDVVVQELKSMVATKIAKYAVPDEILVVKRLPKTRSGKVMRRLLRKIITSEAQELGDTTTLEDPSIIAEILSVYQKCKDKQAAAK

SEQ ID NO: 19435 - protein, 575 aa, Homo sapiens
MAARTLGRGVGRLLGSLRGLSGQPARPPCGVSAPRRAASGPSGSAPAVAAAAAQPGSYPALSAQAAREPAAFWGPLARDTLVWDTPYHTVWDCDFSTGKIGWFLGGQLNVSVNCLDQHVRKSPESVALIWERDEPGTEVRITYRELLETTCRLANTLKRHGVHRGDRVAIYMPVSPLAVAAMLACARIGAVHTVIFAGFSAESLAGRINDAKCKVVITFNQGLRGGRVVELKKIVDEAVKHCPTVQHVLVAHRTDNKVHMGDLDVPLEQEMAKEDPVCAPESMGSEDMLFMLYTSGSTGMPKGIVHTQAGYLLYAALTHKLVFDHQPGDIFGCVADIGWITGHSYVVYGPLCNGATSVLFESTPVYPNAGRYWETVERLKINQFYGAPTAVRLLLKYGDAWVKKYDRSSLRTLGSVGEPINCEAWEWLHRVVGDSRCTLVDTWWQTETGGICIAPRPSEEGAEILPAMAMRPFFGIVPVLMDEKGSVVEGSNVSGALCISQAWPGMARTIYGDHQRFVDAYFKAYPGYYFTGDGAYRTEGGYYQITGRMDDVINILQIVGFFREAIRNSGDLLEH

SEQ ID NO: 19436 - protein, 1196 aa, Homo sapiens
MPTAESEAKVKTKVRFEELLKTHSDLMREKKKLKKKLVRSEENISPDTIRSNLHYMKETTSDDPDTIRSNLPHIKETTSDDVSAANTNNLKKSTRVTKNKLRNTQLATENPNGDASVEEDKQGKPNKKVIKTVPQLTTQDLKPETPENKVDSTHQKTHTKPQPGVDHQKSEKANEGREETDLEEDEELMQAYQCHVTEEMAKEIKRKIRKKLKEQLTYFPSDTLFHDDKLSSEKRKKKKEVPVFSKAETSTLTISGDTVEGEQKKESSVRSVSSDSHQDDEISSMEQSTEDSMQDDTKPKPKKTKKKTKAVADNNEDVDGDGVHEITSRDSPVYPKCLLDDDLVLGVYIHRTDRLKSDFMISHPMVKIHVVDEHTGQYVKKDDSGRPVSSYYEKENVDYILPIMTQPYDFKQLKSRLPEWEEQIVFNENFPYLLRGSDESPKVILFFEILDFLSVDEIKNNSEVQNQECGFRKIAWAFLKLLGANGNANINSKLRLQLYYPPTKPRSPLSVVEAFEWWSKCPRNHYPSTLYVTVRGLKVPDCIKPSYRSMMALQEEKGKPVHCERHHESSSVDTEPGLEESKEVIKWKRLPGQACRIPNKHLFSLNAGERGCFCLDFSHNGRILAAACASRDGYPIILYEIPSGRFMRELCGHLNIIYDLSWSKDDHYILTSSSDGTARIWKNEINNTNTFRVLPHPSFVYTAKFHPAVRELVVTGCYDSMIRIWKVEMREDSAILVRQFDVHKSFINSLCFDTEGHHMYSGDCTGVIVVWNTYVKINDLEHSVHHWTINKEIKETEFKGIPISYLEIHPNGKRLLIHTKDSTLRIMDLRILVARKFVGAANYREKIHSTLTPCGTFLFAGSEDGIVYVWNPETGEQVAMYSDLPFKSPIRDISYHPFENMVAFCAFGQNEPILLYIYDFHVAQQEAEMFKRYNGTFPLPGIHQSQDALCTCPKLPHQGSFQIDEFVHTESSSTKMQLVKQRLETVTEVIRSCAAKVNKNLSFTSPPAVSSQQSKLKQSNMLTAQEILHQFGFTQTGIISIERKPCNHQVDTAPTVVALYDYTANRSDELTIHRGDIIRVFFKDNEDWWYGSIGKGQEGYFPANHVASETLYQELPPEIKERSPPLSPEEKTKIEKSPAPQKQSINKNKSQDFRLGSESMTHSEMRKEQSHEDQGHIMDTRMRKNKQAGRKVTLIE

SEQ ID NO: 19437 - protein, 1053 aa, Homo sapiens
MPTAESEAKVKTKVRFEELLKTHSDLMREKKKLKKKLVRSEENISPDTIRSNLHYMKETTSDDPDTIRSNLPHIKETTSDDVSAANTNNLKKSTRVTKNKLRNTQLATENPNGDASVEEDKQGKPNKKVIKTVPQLTTQDLKPETPENKVDSTHQKTHTKPQPGVDHQKSEKANEGREETDLEEDEELMQAYQCHVTEEMAKEIKRKIRKKLKEQLTYFPSDTLFHDDKLSSEKRKKKKEVPVFSKAETSTLTISGDTVEGEQKKESSVRSVSSDSHQDDEISSMEQSTEDSMQDDTKPKPKKTKKKTKAVADNNEDVDGDGVHEITSRDSPVYPKCLLDDDLVLGVYIHRTDRLKSDFMISHPMVKIHVVDEHTGQYVKKDDSGRPVSSYYEKENVDYILPIMTQPYDFKQLKSRLPEWEEQIVFNENFPYLLRGSDESPKVILFFEILDFLSVDEIKNNSEVQNQECGFRKIAWAFLKLLGANGNANINSKLRLQLYYPPTKPRSPLSVVEAFEWWSKCPRNHYPSTLYVTVRGLKVPDCIKPSYRSMMALQEEKGKPVHCERHHESSSVDTEPGLEESKEVIKWKRLPGQACRIPNKHLFSLNAGERGCFCLDFSHNGRILAAACASRDGYPIILYEIPSGRFMRELCGHLNIIYDLSWSKDDHYILTSSSDGTARIWKNEINNTNTFRVLPHPSFVYTAKFHPAVRELVVTGCYDSMIRIWKVEMREDSAILVRQFDVHKSFINSLCFDTEGHHMYSGDCTGVIVVWNTYVKINDLEHSVHHWTINKEIKETEFKGIPISYLEIHPNGKRLLIHTKDSTLRIMDLRILVARKFVGAANYREKIHSTLTPCGTFLFAGSEDGIVYVWNPETGEQVAMYSDLPFKSPIRDISYHPFENMVAFCAFGQNEPILLYIYDFHVAQQEAEMFKRYNGTFPLPGIHQSQDALCTCPKLPHQGSFQIDEFVHTESSSTKMQLVKQRLETVTEVIRSCAAKVNKNLSFTSPPAVSSQQSKLKQSNMLTAQEILHQFGFTQTDSHFAEFNTCILWWKKH

SEQ ID NO: 19438 - protein, 609 aa, Homo sapiens
MPTAESEAKVKTKVRFEELLKTHSDLMREKKKLKKKLVRSEENISPDTIRSNLHYMKETTSDDPDTIRSNLPHIKETTSDDVSAANTNNLKKSTRVTKNKLRNTQLATENPNGDASVEEDKQGKPNKKVIKTVPQLTTQDLKPETPENKVDSTHQKTHTKPQPGVDHQKSEKANEGREETDLEEDEELMQAYQCHVTEEMAKEIKRKIRKKLKEQLTYFPSDTLFHDDKLSSEKRKKKKEVPVFSKAETSTLTISGDTVEGEQKKESSVRSVSSDSHQDDEISSMEQSTEDSMQDDTKPKPKKTKKKTKAVADNNEDVDGDGVHEITSRDSPVYPKCLLDDDLVLGVYIHRTDRLKSDFMISHPMVKIHVVDEHTGQYVKKDDSGRPVSSYYEKENVDYILPIMTQPYDFKQLKSRLPEWEEQIVFNENFPYLLRGSDESPKVILFFEILDFLSVDEIKNNSEVQNQECGFRKIAWAFLKLLGANGNANINSKLRLQLYYPPTKPRSPLSVVEAFEWWSKCPRNHYPSTLYVTVRGLKVPDCIKPSYRSMMALQEEKGKPVHCERHHESSSVDTEPGLEESKEVIKWKRLPGQENEDVFVLISPTMEEY

SEQ ID NO: 19439 - protein, 511 aa, Homo sapiens
MLVDGPSERPALCFLLLAVAMSFFGSALSIDETRAHLLLKEKMMRLGGRLVLNTKEELANERLMTLKIAEMKEAMRTLIFPPSMHFFQAKHLIERSQVFNILRMMPKGAALHLHDIGIVTMDWLVRNVTYRPHCHICFTPRGIMQFRFAHPTPRPSEKCSKWILLEDYRKRVQNVTEFDDSLLRNFTLVTQHPEVIYTNQNVVWSKFETIFFTISGLIHYAPVFRDYVFRSMQEFYEDNVLYMEIRARLLPVYELSGEHHDEEWSVKTYQEVAQKFVETHPEFIGIKIIYSDHRSKDVAVIAESIRMAMGLRIKFPTVVAGFDLVGHEDTGHSLHDYKEALMIPAKDGVKLPYFFHAGETDWQGTSIDRNILDALMLNTTRIGHGFALSKHPAVRTYSWKKDIPIEVCPISNQVLKLVSDLRNHPVATLMATGHPMVISSDDPAMFGAKGLSYDFYEVFMGIGGMKADLRTLKQLAMNSIKYSTLLESEKNTFMEIWKKRWDKFIADVATK

SEQ ID NO: 19440 - protein, 270 aa, Homo sapiens
MDSLEWNWALVYELSGEHHDEEWSVKTYQEVAQKFVETHPEFIGIKIIYSDHRSKDVAVIAESIRMAMGLRIKFPTVVAGFDLVGHEDTGHSLHDYKEALMIPAKDGVKLPYFFHAGETDWQGTSIDRNILDALMLNTTRIGHGFALSKHPAVRTYSWKKDIPIEVCPISNQVLKLVSDLRNHPVATLMATGHPMVISSDDPAMFGAKGLSYDFYEVFMGIGGMKADLRTLKQLAMNSIKYSTLLESEKNTFMEIWKKRWDKFIADVATK

SEQ ID NO: 19441 - protein, 723 aa, Homo sapiens
MLSSMAAAGSVKAALQVAEVLEAIVSCCVGPEGRQVLCTKPTGEVLLSRNGGRLLEALHLEHPIARMIVDCVSSHLKKTGDGAKTFIIFLCHLLRGLHAITDREKDPLMCENIQTHGRHWKNCSRWKFISQALLTFQTQILDGIMDQYLSRHFLSIFSSAKERTLCRSSLELLLEAYFCGRVGRNNHKFISQLMCDYFFKCMTCKSGIGVFELVDDHFVELNVGVTGLPVSDSRIIAGLVLQKDFSVYRPADGDMRMVIVTETIQPLFSTSGSEFILNSEAQFQTSQFWIMEKTKAIMKHLHSQNVKLLISSVKQPDLVSYYAGVNGISVVECLSSEEVSLIRRIIGLSPFVPPQAFSQCEIPNTALVKFCKPLILRSKRYVHLGLISTCAFIPHSIVLCGPVHGLIEQHEDALHGALKMLRQLFKDLDLNYMTQTNDQNGTSSLFIYKNSGESYQAPDPGNGSIQRPYQDTVAENKDALEKTQTYLKVHSNLVIPDVELETYIPYSTPTLTPTDTFQTVETLTCLSLERNRLTDYYEPLLKNNSTAYSTRGNRIEISYENLQVTNITRKGSMLPVSCKLPNMGTSQSYLSSSMPAGCVLPVGGNFEILLHYYLLNYAKKCHQSEETMVSMIIANALLGIPKVLYKSKTGKYSFPHTYIRAVHALQTNQPLVSSQTGLESVMGKYQLLTSVLQCLTKILTIDMVITVKRHPQKVHNQDSEDEL

SEQ ID NO: 19442 - protein, 775 aa, Homo sapiens
MLQGLLPVSLLLSVAVSAIKELPGVKKYEVVYPIRLHPLHKREAKEPEQQEQFETELKYKMTINGKIAVLYLKKNKNLLAPGYTETYYNSTGKEITTSPQIMDDCYYQGHILNEKVSDASISTCRGLRGYFSQGDQRYFIEPLSPIHRDGQEHALFKYNPDEKNYDSTCGMDGVLWAHDLQQNIALPATKLVKLKDRKVQEHEKYIEYYLVLDNGEFKRYNENQDEIRKRVFEMANYVNMLYKKLNTHVALVGMEIWTDKDKIKITPNASFTLENFSKWRGSVLSRRKRHDIAQLITATELAGTTVGLAFMSTMCSPYSVGVVQDHSDNLLRVAGTMAHEMGHNFGMFHDDYSCKCPSTICVMDKALSFYIPTDFSSCSRLSYDKFFEDKLSNCLFNAPLPTDIISTPICGNQLVEMGEDCDCGTSEECTNICCDAKTCKIKATFQCALGECCEKCQFKKAGMVCRPAKDECDLPEMCNGKSGNCPDDRFQVNGFPCHHGKGHCLMGTCPTLQEQCTELWGPGTEVADKSCYNRNEGGSKYGYCRRVDDTLIPCKANDTMCGKLFCQGGSDNLPWKGRIVTFLTCKTFDPEDTSQEIGMVANGTKCGDNKVCINAECVDIEKAYKSTNCSSKCKGHAVCDHELQCQCEEGWIPPDCDDSSVVFHFSIVVGVLFPMAVIFVVVAMVIRHQSSREKQKKDQRPLSTTGTRPHKQKRKPQMVKAVQPQEMSQMKPHVYDLPVEGNEPPASFHKDTNALPPTVFKDNPVSTPKDSNPKA

SEQ ID NO: 19443 - protein, 540 aa, Homo sapiens
MLQGLLPVSLLLSVAVSAIKELPGVKKYEVVYPIRLHPLHKREAKEPEQQEQFETELKYKMTINGKIAVLYLKKNKNLLAPGYTETYYNSTGKEITTSPQIMDDCYYQGHILNEKVSDASISTCRGLRGYFSQGDQRYFIEPLSPIHRDGQEHALFKYNPDEKNYDSTCGMDGVLWAHDLQQNIALPATKLVKLKDRKVQEHEKYIEYYLVLDNGEFKRYNENQDEIRKRVFEMANYVNMLYKKLNTHVALVGMEIWTDKDKIKITPNASFTLENFSKWRGSVLSRRKRHDIAQLITATELAGTTVGLAFMSTMCSPYSVGVVQDHSDNLLRVAGTMAHEMGHNFGMFHDDYSCKCPSTICVMDKALSFYIPTDFSSCSRLSYDKFFEDKLSNCLFNAPLPTDIISTPICGNQLVEMGEDCDCGTSEECTNICCDAKTCKIKATFQCALGECCEKCQFKKAGMVCRPAKDECDLPEMCNGKSGNCPDDRFQVNGFPCHHGKGHCLMGTCPTLQEQCTELWGPGRRTNPFPCACAKENHFR

SEQ ID NO: 19444 - protein, 1901 aa, Homo sapiens
MATFRNNHMKTKASVRKSFSEDVFQSVKSLLQSQKELCSVTAEDCLQQDEHANLTEVTFLGFNEETDAAHIQDLAAVSLELPDILNSLHFCSLNENEIICMKNINKPLDISSDPLNQSHPSGMLCVMRVSPTSPRLRIDFIFSLLSKYATGIRYTLDTFLHQKHQLETTDEDDDDTNQSVSSIEDDFVTAFEHLEEEETSKPYNDGMNITVLRSQCDAASQTVTGHHLETHDLKILISSGQQKSLAKPSTSSVNVLGHKELPSVKTSVTTSISEPWTQRSFYRSSNASDKDSDLQKTFFSSSPAYSSESECSSPSPVIFLDEEGYQKSLKAKLELPKIPVMKDDIEDSDSEVSEFFDSFDQFDELEQTLETCLFNKDPVIGKSSQRKGHKHGKSCMNPQKFKFDRPALPANVRKPTPRKPESPYGNLCDAPDSPRPVKASREDSGLFSPIRSSAFSPLGGCTPAECFCQTDIGGDRIHENHDSVYYTYEDYAKSISCEVLGSVLRTHHTNTLSNINSIKHGENKTVTFKHGNLDQKNKSKNKSLMIKDSIQKFAADLVEKSFGSAFKDLQKGVSSCTNALYHLAIKLTSSVLQMAFDELRRQRAFSLKERAISGLANFLVSEALSNALKDLQYVKKQIFTNTVARFAADLAEELVFEGIMEVCQFSYPQTPASPQCGSFDFEDKVVKLYAKDLSESVIQEAFIELSQVDVTFTTKAAVSVSTDNIKYVSAESVVPSTQAVTFSPSFHNQAIMVTKPVQEYKKEYTVQQALFCTSGIVTSIPVPLAGSALLPYHISSTACQAKAHLSSDDSNSNGDSAQVHIATKNREEKAACLRNICLPSEHNPGNQNDFKPTNDDIEMQSSSKLPNDPAIISNFSAAVVHTIVNETLESMTSLEVTKMVDERTDYLTKSLKEKTPPFSHCDQAVLQCSEASSNKDMFADRLSKSIIKHSIDKSKSVIPNIDKNAVYKESLPVSGEESQLTPEKSPKFPDSQNQLTHCSLSAAKDCVPECKVSMVHGSSLETLPSCPAVTGQKSDLKESAKDQPLKKHNLNSTSLEALSFGQENPFPHSHTFSSTALTCVDGLHVEDKQKVRDRNVIPDTPPSTPLVPSRASSEWDIKKLTKKLKGELAKEFAPATPPSTPHNSSVGSLSENEQNTIEKEEFMLKLMRSLSEEVESSESGELPEVDVKSEHSGKKVQFAEALATHILSLATEMAASHLDNKIIQEPKVKNPCLNVQSQRSVSPTFLNPSDENLKTLCNFAGDLAAEVITEAEKIAKVRNCMLFKQKKNSCYADGDEDYKVEEKLDIEAVVHPREVDPFILSLPPSSCMSGLMYKYPSCESVTDEYAGHLIQILKQEGGNSELIMDQYANRLAYRSVKSGLQEAAKTTKVQCNSRMFPVPSSQVKTNKELLMFSNKEHHQEADKKRQSKRNEGYFCKNQTCERTLDPYRNEVSQLYSFSTSLVHSITKDAKEELTASLVGLPKSLTDSCLFEKSGYEEDNECHVTPELPKSLQPSSQNHRFYHSTGSLNGYGCGDNVVQAVEQYAKKVVDDTLELTLGSTVFRVSETTKSADRVTYAEKLSPLTGQACRYCDLKELHNCTGNSSQHFFRQGSLASSKPASNPKFSSRYQKSRIFHLSVPQIHVNLDKKAVLAEKIVAEAIEKAERELSSTSLAADSGIGQEGASFAESLATETMTAAVTNVGHAVSSSKEIEDFQSTESVSSQQMNLSIGDDSTGSWSNLSFEDEHQDESSSFHHLSESNGNSSSWSSLGLEGDLYEDNLSFPTSDSDGPDDKDEEHEDEVEGLGQDGKTLLITNIDMEPCTVDPQLRIILQWLIASEAEVAELYFHDSANKEFMLLSKQLQEKGWKVGDLLQAVLQYYEVMEKASSEERCKSLFDWLLENA

SEQ ID NO: 19445 - protein, 664 aa, Homo sapiens
MDSNHQSNYKLSKTEKKFLRKQIKAKHTLLRHEGIETVSYATQSLVVANGGLGNGVSRNQLLPVLEKCGLVDALLMPPNKPYSFARYRTTEESKRAYVTLNGKEVVDDLGQKITLYLNFVEKVQWKELRPQALPPGLMVVEEIISSEEEKMLLESVDWTEDTDNQNSQKSLKHRRVKHFGYEFHYENNNVDKDKPLSGGLPDICESFLEKWLRKGYIKHKPDQMTINQYEPGQGIPAHIDTHSAFEDEIVSLSLGSEIVMDFKHPDGIAVPVMLPRRSLLVMTGESRYLWTHGITCRKFDTVQASESLKSGIITSDVGDLTLSKRGLRTSFTFRKVRQTPCNCSYPLVCDSQRKETPPSFPESDKEASRLEQEYVHQVYEEIAGHFSSTRHTPWPHIVEFLKALPSGSIVADIGCGNGKYLGINKELYMIGCDRSQNLVDICRERQFQAFVCDALAVPVRSGSCDACISIAVIHHFATAERRVAALQEIVRLLRPGGKALIYVWAMEQEYNKQKSKYLRGNRNSQGKKEEMNSDTSVQRSLVEQMRDMGSRDSASSVPRINDSQEGGCNSRQVSNSKLPVHVNRTSFYSQDVLVPWHLKGNPDKGKPVEPFGPIGSQDPSPVFHRYYHVFREGELEGACRTVSDVRILQSYYDQGNWCVILQKA

SEQ ID NO: 19446 - protein, 238 aa, Homo sapiens
MDSNHQSNYKLSKTEKKFLRKQIKAKHTLLRHEGIETVSYATQSLVVANGGLGNGVSRNQLLPVLEKCGLVDALLMPPNKPYSFARYRTTEESKRAYVTLNGKEVVDDLGQKITLYLNFVEKVQWKELRPQALPPGLMVVEEIISSEEEKMLLESVDWTEDTDNQNSQKSLKHRRVKHFGYEFHYENNNVDKDKPLSGGLPDICESFLEKWLRKGYIKHKPDQMTINQYEPGQDCHGF

SEQ ID NO: 19447 - protein, 224 aa, Homo sapiens
MDSNHQSNYKLSKTEKKFLRKQIKAKHTLLRHEGIETVSYATQSLVVANGGLGNGVSRNQLLPVLEKCGLVDALLMPPNKPYSFARYRTTEESKRAYVTLNGKEVVDDLGQKITLYLNFVEKVQWKELRPQALPPGLMVVEEIISSEEEKMLLESVDWTEDTDNQNSQKSLKHRRVKHFGYEFHYENNNVDKDKPLSGGLPDICESFLEKWLRKAEKNLEVGIH

SEQ ID NO: 19448 - protein, 667 aa, Homo sapiens
MFAMDSNHQSNYKLSKTEKKFLRKQIKAKHTLLRHEGIETVSYATQSLVVANGGLGNGVSRNQLLPVLEKCGLVDALLMPPNKPYSFARYRTTEESKRAYVTLNGKEVVDDLGQKITLYLNFVEKVQWKELRPQALPPGLMVVEEIISSEEEKMLLESVDWTEDTDNQNSQKSLKHRRVKHFGYEFHYENNNVDKDKPLSGGLPDICESFLEKWLRKGYIKHKPDQMTINQYEPGQGIPAHIDTHSAFEDEIVSLSLGSEIVMDFKHPDGIAVPVMLPRRSLLVMTGESRYLWTHGITCRKFDTVQASESLKSGIITSDVGDLTLSKRGLRTSFTFRKVRQTPCNCSYPLVCDSQRKETPPSFPESDKEASRLEQEYVHQVYEEIAGHFSSTRHTPWPHIVEFLKALPSGSIVADIGCGNGKYLGINKELYMIGCDRSQNLVDICRERQFQAFVCDALAVPVRSGSCDACISIAVIHHFATAERRVAALQEIVRLLRPGGKALIYVWAMEQEYNKQKSKYLRGNRNSQGKKEEMNSDTSVQRSLVEQMRDMGSRDSASSVPRINDSQEGGCNSRQVSNSKLPVHVNRTSFYSQDVLVPWHLKGNPDKGKPVEPFGPIGSQDPSPVFHRYYHVFREGELEGACRTVSDVRILQSYYDQGNWCVILQKA

SEQ ID NO: 19449 - protein, 857 aa, Homo sapiens
MEAGPSGAAAGAYLPPLQQVFQAPRRPGIGTVGKPIKLLANYFEVDIPKIDVYHYEVDIKPDKCPRRVNREVVEYMVQHFKPQIFGDRKPVYDGKKNIYTVTALPIGNERVDFEVTIPGEGKDRIFKVSIKWLAIVSWRMLHEALVSGQIPVPLESVQALDVAMRHLASMRYTPVGRSFFSPPEGYYHPLGGGREVWFGFHQSVRPAMWKMMLNIDVSATAFYKAQPVIEFMCEVLDIRNIDEQPKPLTDSQRVRFTKEIKGLKVEVTHCGQMKRKYRVCNVTRRPASHQTFPLQLESGQTVECTVAQYFKQKYNLQLKYPHLPCLQVGQEQKHTYLPLEVCNIVAGQRCIKKLTDNQTSTMIKATARSAPDRQEEISRLMKNASYNLDPYIQEFGIKVKDDMTEVTGRVLPAPILQYGGRNRAIATPNQGVWDMRGKQFYNGIEIKVWAIACFAPQKQCREEVLKNFTDQLRKISKDAGMPIQGQPCFCKYAQGADSVEPMFRHLKNTYSGLQLIIVILPGKTPVYAEVKRVGDTLLGMATQCVQVKNVVKTSPQTLSNLCLKINVKLGGINNILVPHQRSAVFQQPVIFLGADVTHPPAGDGKKPSITAVVGSMDAHPSRYCATVRVQRPRQEIIEDLSYMVRELLIQFYKSTRFKPTRIIFYRDGVPEGQLPQILHYELLAIRDACIKLEKDYQPGITYIVVQKRHHTRLFCADKNERIGKSGNIPAGTTVDTNITHPFEFDFYLCSHAGIQGTSRPSHYYVLWDDNRFTADELQILTYQLCHTYVRCTRSVSIPAPAYYARLVAFRARYHLVDKEHDSGEGSHISGQSNGRDPQALAKAVQVHQDTLRTMYFA

SEQ ID NO: 19450 - protein, 754 aa, Homo sapiens
MLPGCIFLMILLIPQVKEKFILGVEGQQLVRPKKLPLIQKRDTGHTHDDDILKTYEEELLYEIKLNRKTLVLHLLRSREFLGSNYSETFYSMKGEAFTRHPQIMDHCFYQGSIVHEYDSAASISTCNGLRGFFRINDQRYLIEPVKYSDEGEHLVFKYNLRVPYGANYSCTELNFTRKTVPGDNESEEDSKIKGIHDEKYVELFIVADDTVYRRNGHPHNKLRNRIWGMVNFVNMIYKTLNIHVTLVGIEIWTHEDKIELYSNIETTLLRFSFWQEKILKTRKDFDHVVLLSGKWLYSHVQGISYPGGMCLPYYSTSIIKDLLPDTNIIANRMAHQLGHNLGMQHDEFPCTCPSGKCVMDSDGSIPALKFSKCSQNQYHQYLKDYKPTCMLNIPFPYNFHDFQFCGNKKLDEGEECDCGPAQECTNPCCDAHTCVLKPGFTCAEGECCESCQIKKAGSICRPAKDECDFPEMCTGHSPACPKDQFRVNGFPCKNSEGYCFMGKCPTREDQCSELFDDEAIESHDICYKMNTKGNKFGYCKNKENRFLPCEEKDVRCGKIYCTGGELSSLLGEDKTYHLKDPQKNATVKCKTIFLYHDSTDIGLVASGTKCGEGMVCNNGECLNMEKVYISTNCPSQCNENPVDGHGLQCHCEEGQAPVACEETLHVTNITILVVVLVLVIVGIGVLILLVRYRKCIKLKQVQSPPTETLGVENKGYFGDEQQIRTEPILPEIHFLNKPASKDSRGIADPNQSAK

SEQ ID NO: 19451 - protein, 210 aa, Homo sapiens
MLPGCIFLMILLIPQVKEKFILGVEGQQLVRPKKLPLIQKRDTGHTHDDDILKTYEEELLYEIKLNRKTLVLHLLRSREFLGSNYSETFYSMKGEAFTRHPQIMDHCFYQGSIVHEYDSAASISTCNGLRGFFRINDQRYLIEPVKYSDEGEHLVFKYNLRVPYGANYSCTELNFTRKTVPGDNESEEDSKIKVSTLLLSLPQMKHLLFS

SEQ ID NO: 19452 - protein, 1226 aa, Homo sapiens
MDSFDLALLQEWDLESLCVYEPDRNALRRKERERRNQETQQDDGTFNSSYSLFSEPYKTNKGDELSNRIQNTLGNYDEMKDFLTDRSNQSHLVGVPKPGVPQTPVNKIDEHFVADSRAQNQPSSICSTTTSTPAAVPVQQSKRGTMGWQKAGHPPSDGQQRATQQGSLRTLLGDGVGRQQPRAKQVCNVEVGLQTQERPPAMAAKHSSSGHCVQNFPPSLASKPSLVQQKPTAYVRPMDGQDQAPDESPKLKSSSETSVHCTSYRGVPASKPEPARAKAKLSKFSIPKQGEESRSGETNSCVEEIIREMTWLPPLSAIQAPGKVEPTKFPFPNKDSQLVSSGHNNPKKGDAEPESPDNGTSNTSMLEDDLKLSSDEEENEQQAAQRTALRALSDSAVVQQPNCRTSVPSSKGSSSSSSSGSSSSSSDSESSSGSDSETESSSSESEGSKPPHFSSPEAEPASSNKWQLDKWLNKVNPHKPPILIQNESHGSESNQYYNPVKEDVQDCGKVPDVCQPSLREKEIKSTCKEEQRPRTANKAPGSKGVKQKSPPAAVAVAVSAAAPPPAVPCAPAENAPAPARRSAGKKPTRRTERTSAGDGANCHRPEEPAAADALGTSVVVPPEPTKTRPCGNNRASHRKELRSSVTCEKRRTRGLSRIVPKSKEFIETESSSSSSSSDSDLESEQEEYPLSKAQTVAASASSGNDQRLKEAAANGGSGPRAPVGSINARTTSDIAKELEEQFYTLVPFGRNELLSPLKDSDEIRSLWVKIDLTLLSRIPEHLPQEPGVLSAPATKDSESAPPSHTSDTPAEKALPKSKRKRKCDNEDDYREIKKSQGEKDSSSRLATSTSNTLSANHCNMNINSVAIPINKNEKMLRSPISPLSDASKHKYTSEDLTSSSRPNGNSLFTSASSSKKPKADSQLQPHGGDLTKAAHNNSENIPLHKSRPQTKPWSPGSNGHRDCKRQKLVFDDMPRSADYFMQEAKRMKHKADAMVEKFGKALNYAEAALSFIECGNAMEQGPMESKSPYTMYSETVELIRYAMRLKTHSGPNATPEDKQLAALCYRCLALLYWRMFRLKRDHAVKYSKALIDYFKNSSKAAQAPSPWGASGKSTGTPSPMSPNPSPASSVGSQGSLSNASALSPSTIVSIPQRIHQMAANHVSITNSILHSYDYWEMADNLAKENREFFNDLDLLMGPVTLHSSMEHLVQYSQQGLHWLRNSAHLS

SEQ ID NO: 19453 - protein, 1251 aa, Homo sapiens
MDSFDLALLQEWDLESLWGEDILNQRNDSLVVEFQSSASRCRSVYEPDRNALRRKERERRNQETQQDDGTFNSSYSLFSEPYKTNKGDELSNRIQNTLGNYDEMKDFLTDRSNQSHLVGVPKPGVPQTPVNKIDEHFVADSRAQNQPSSICSTTTSTPAAVPVQQSKRGTMGWQKAGHPPSDGQQRATQQGSLRTLLGDGVGRQQPRAKQVCNVEVGLQTQERPPAMAAKHSSSGHCVQNFPPSLASKPSLVQQKPTAYVRPMDGQDQAPDESPKLKSSSETSVHCTSYRGVPASKPEPARAKAKLSKFSIPKQGEESRSGETNSCVEEIIREMTWLPPLSAIQAPGKVEPTKFPFPNKDSQLVSSGHNNPKKGDAEPESPDNGTSNTSMLEDDLKLSSDEEENEQQAAQRTALRALSDSAVVQQPNCRTSVPSSKGSSSSSSSGSSSSSSDSESSSGSDSETESSSSESEGSKPPHFSSPEAEPASSNKWQLDKWLNKVNPHKPPILIQNESHGSESNQYYNPVKEDVQDCGKVPDVCQPSLREKEIKSTCKEEQRPRTANKAPGSKGVKQKSPPAAVAVAVSAAAPPPAVPCAPAENAPAPARRSAGKKPTRRTERTSAGDGANCHRPEEPAAADALGTSVVVPPEPTKTRPCGNNRASHRKELRSSVTCEKRRTRGLSRIVPKSKEFIETESSSSSSSSDSDLESEQEEYPLSKAQTVAASASSGNDQRLKEAAANGGSGPRAPVGSINARTTSDIAKELEEQFYTLVPFGRNELLSPLKDSDEIRSLWVKIDLTLLSRIPEHLPQEPGVLSAPATKDSESAPPSHTSDTPAEKALPKSKRKRKCDNEDDYREIKKSQGEKDSSSRLATSTSNTLSANHCNMNINSVAIPINKNEKMLRSPISPLSDASKHKYTSEDLTSSSRPNGNSLFTSASSSKKPKADSQLQPHGGDLTKAAHNNSENIPLHKSRPQTKPWSPGSNGHRDCKRQKLVFDDMPRSADYFMQEAKRMKHKADAMVEKFGKALNYAEAALSFIECGNAMEQGPMESKSPYTMYSETVELIRYAMRLKTHSGPNATPEDKQLAALCYRCLALLYWRMFRLKRDHAVKYSKALIDYFKNSSKAAQAPSPWGASGKSTGTPSPMSPNPSPASSVGSQGSLSNASALSPSTIVSIPQRIHQMAANHVSITNSILHSYDYWEMADNLAKENREFFNDLDLLMGPVTLHSSMEHLVQYSQQGLHWLRNSAHLS

SEQ ID NO: 19454 - protein, 320 aa, Homo sapiens
MGDIPAVGLSSWKASPGKVTEAVKEAIDAGYRHFDCAYFYHNEREVGAGIRCKIKEGAVRREDLFIATKLWCTCHKKSLVETACRKSLKALKLNYLDLYLIHWPMGFKPPHPEWIMSCSELSFCLSHPRVQDLPLDESNMVIPSDTDFLDTWEAMEDLVITGLVKNIGVSNFNHEQLERLLNKPGLRFKPLTNQIECHPYLTQKNLISFCQSRDVSVTAYRPLGGSCEGVDLIDNPVIKRIAKEHGKSPAQILIRFQIQRNVIVIPGSITPSHIKENIQVFDFELTQHDMDNILSLNRNLRLAMFPITKNHKDYPFHIEY

SEQ ID NO: 19455 - protein, 263 aa, Homo sapiens
MGDIPAVGLSSWKASPGKVTEAVKEAIDAGYRHFDCAYFYHNEREVGAGIRCKIKEGAVRREDLFIATKLWCTCHKKSLVETACRKSLKALKLNYLDLYLIHWPMGFKPPHPEWIMSCSELSFCLSHPRVQDLPLDESNMVIPSDTDFLDTWEAMEDLVITGLVKNIGVSNFNHEQLERLLNKPGLRFKPLTNQILIRFQIQRNVIVIPGSITPSHIKENIQVFDFELTQHDMDNILSLNRNLRLAMFPITKNHKDYPFHIEY

SEQ ID NO: 19456 - protein, 250 aa, Homo sapiens
MGDIPAVGLSSWKASPGKVTEAVKEAIDAGYRHFDCAYFYHNEREVGAGIRCKIKEGAVRREDLFIATKLWCTCHKKSLVETACRKSLKALKLNYLDLYLIHWPMGFKPPHPEWIMSCSELSFCLSHPRVQDLPLDESNMVIPSDTDFLDTWEAMEDLVITGLVKNIGVSNFNHEQLERLLNKPGLRFKPLTNQILIRFQIQRNVIVIPGSITPSHIKENIQVFDFELTQHDMDNILSLNRNLRLAMFPM

SEQ ID NO: 19457 - protein, 307 aa, Homo sapiens
MGDIPAVGLSSWKASPGKVTEAVKEAIDAGYRHFDCAYFYHNEREVGAGIRCKIKEGAVRREDLFIATKLWCTCHKKSLVETACRKSLKALKLNYLDLYLIHWPMGFKPPHPEWIMSCSELSFCLSHPRVQDLPLDESNMVIPSDTDFLDTWEAMEDLVITGLVKNIGVSNFNHEQLERLLNKPGLRFKPLTNQIECHPYLTQKNLISFCQSRDVSVTAYRPLGGSCEGVDLIDNPVIKRIAKEHGKSPAQILIRFQIQRNVIVIPGSITPSHIKENIQVFDFELTQHDMDNILSLNRNLRLAMFPM

SEQ ID NO: 19458 - protein, 222 aa, Homo sapiens
MGDIPAVGLSSWKASPGKVTEAVKEAIDAGYRHFDCAYFYHNEREVGAGIRCKIKEGAVRREDLFIATKLWCTCHKKSLVETACRKSLKALKLNYLDLYLIHWPMGFKPPHPEWIMSCSELSFCLSHPRVQDLPLDESNMVIPSDTDFLDTWEILIRFQIQRNVIVIPGSITPSHIKENIQVFDFELTQHDMDNILSLNRNLRLAMFPITKNHKDYPFHIEY

SEQ ID NO: 19459 - protein, 528 aa, Homo sapiens
MDPAGRARGQGATAGGLLLRAAAAAKGLREDLWGAAALPWRSLSRIPKREGLGEEDTAVAGHELLLPNERSFQNAAKSNNLDLMEKLFEKKVNINVVNNMNRTALHFAVGRNHLSAVDFLLKHKARVDVADKHGLTVIHLAAWSGSLEVMLMLVKAGADQRAKNQDGMSALHFATQSNHVRIVEYLIQDLHLKDLNQPDEKGRKPFLLAAERGHVEMIEKLTFLNLHTSEKDKGGNTALHLAAKHGHSPAVQVLLAQWQDINEMNELNISSLQIATRNGHASLVNFLLSENVDLHQKVEPKESPLHLVVINNHITVVNSLLSAQHDIDILNQKQQTPLHVAADRGNVELVETLLKAGCDLKAVDKQGKTALAVASRSNHSLVVGMLIKAERYYAWREEHHESIRDPSTGFTLTFKQDHSLETRHIRTLLWDLAYHQLKANEWQRLARSWNFTDDQIRAIEEQWSGNESFREHGHRALLIWLHGTLMTQGDPAKQLYEELVHAGFPKLAEKTRHFKSKTDSNSKKCVVS

SEQ ID NO: 19460 - protein, 894 aa, Homo sapiens
MNQIEPGVQYNYVYDEDEYMIQEEEWDRDLLLDPAWEKQQRKTFTAWCNSHLRKAGTQIENIEEDFRNGLKLMLLLEVISGERLPKPDRGKMRFHKIANVNKALDYIASKGVKLVSIGAEEIVDGNVKMTLGMIWTIILRFAIQDISVEETSAKEGLLLWCQRKTAPYRNVNIQNFHTSWKDGLGLCALIHRHRPDLIDYSKLNKDDPIGNINLAMEIAEKHLDIPKMLDAEDIVNTPKPDERAIMTYVSCFYHAFAGAEQAETAANRICKVLAVNQENERLMEEYERLASELLEWIRRTIPWLENRTPEKTMQAMQKKLEDFRDYRRKHKPPKVQEKCQLEINFNTLQTKLRISNRPAFMPSEGKMVSDIAGAWQRLEQAEKGYEEWLLNEIRRLERLEHLAEKFRQKASTHETWAYGKEQILLQKDYESASLTEVRALLRKHEAFESDLAAHQDRVEQIAAIAQELNELDYHDAVNVNDRCQKICDQWDRLGTLTQKRREALERMEKLLETIDQLHLEFAKRAAPFNNWMEGAMEDLQDMFIVHSIEEIQSLITAHEQFKATLPEADGERQSIMAIQNEVEKVIQSYNIRISSSNPYSTVTMDELRTKWDKVKQLVPIRDQSLQEELARQHANERLRRQFAAQANAIGPWIQNKMEEIARSSIQITGALEDQMNQLKQYEHNIINYKNNIDKLEGDHQLIQEALVFDNKHTNYTMEHIRVGWELLLTTIARTINEVETQILTRDAKGITQEQMNEFRASFNHFDRRKNGLMDHEDFRACLISMGYDLGEAEFARIMTLVDPNGQGTVTFQSFIDFMTRETADTDTAEQVIASFRILASDKPYILAEELRRELPPDQAQYCIKRMPAYSGPGSVPGALDYAAFSSALYGESDL

SEQ ID NO: 19461 - protein, 894 aa, Homo sapiens
MNQIEPGVQYNYVYDEDEYMIQEEEWDRDLLLDPAWEKQQRKTFTAWCNSHLRKAGTQIENIEEDFRNGLKLMLLLEVISGERLPKPDRGKMRFHKIANVNKALDYIASKGVKLVSIGAEEIVDGNVKMTLGMIWTIILRFAIQDISVEETSAKEGLLLWCQRKTAPYRNVNIQNFHTSWKDGLGLCALIHRHRPDLIDYSKLNKDDPIGNINLAMEIAEKHLDIPKMLDAEDLVYTARPDERAIMTYVSCYYHAFAGAQKAETAANRICKVLAVNQENERLMEEYERLASELLEWIRRTIPWLENRTPEKTMQAMQKKLEDFRDYRRKHKPPKVQEKCQLEINFNTLQTKLRISNRPAFMPSEGKMVSDIAGAWQRLEQAEKGYEEWLLNEIRRLERLEHLAEKFRQKASTHETWAYGKEQILLQKDYESASLTEVRALLRKHEAFESDLAAHQDRVEQIAAIAQELNELDYHDAVNVNDRCQKICDQWDRLGTLTQKRREALERMEKLLETIDQLHLEFAKRAAPFNNWMEGAMEDLQDMFIVHSIEEIQSLITAHEQFKATLPEADGERQSIMAIQNEVEKVIQSYNIRISSSNPYSTVTMDELRTKWDKVKQLVPIRDQSLQEELARQHANERLRRQFAAQANAIGPWIQNKMEEIARSSIQITGALEDQMNQLKQYEHNIINYKNNIDKLEGDHQLIQEALVFDNKHTNYTMEHIRVGWELLLTTIARTINEVETQILTRDAKGITQEQMNEFRASFNHFDRRKNGLMDHEDFRACLISMGYDLGEAEFARIMTLVDPNGQGTVTFQSFIDFMTRETADTDTAEQVIASFRILASDKPYILAEELRRELPPDQAQYCIKRMPAYSGPGSVPGALDYAAFSSALYGESDL

SEQ ID NO: 19462 - protein, 579 aa, Homo sapiens
MRPWLRHLVLQALRNSRAFCGSHGKPAPLPVPQKIVATWEAISLGRQLVPEYFNFAHDVLDVWSRLEEAGHRPPNPAFWWVNGTGAEIKWSFEELGKQSRKAANVLGGACGLQPGDRMMLVLPRLPEWWLVSVACMRTGTVMIPGVTQLTEKDLKYRLQASRAKSIITSDSLAPRVDAISAECPSLQTKLLVSDSSRPGWLNFRELLREASTEHNCMRTKSRDPLAIYFTSGTTGAPKMVEHSQSSYGLGFVASGRRWVALTESDIFWNTTDTGWVKAAWTLFSAWPNGSCIFVHELPRVDAKVILNTLSKFPITTLCCVPTIFRLLVQEDLTRYQFQSLRHCLTGGEALNPDVREKWKHQTGVELYEGYGQSETVVICANPKGMKIKSGSMGKASPPYDVQIVDDEGNVLPPGEEGNVAVRIRPTRPFCFFNCYLDNPEKTAASEQGDFYITGDRARMDKDGYFWFMGRNDDVINSSSYRIGPVEVESALAEHPAVLESAVVSSPDPIRGEVVKAFIVLTPAYSSHDPEALTRELQEHVKRVTAPYKYPRKVAFVSELPKTVSGKIQRSKLRSQEWGK

SEQ ID NO: 19463 - protein, 208 aa, Homo sapiens
MRPWLRHLVLQALRNSRAFCGSHGKPAPLPVPQKIVATWEAISLGRQLVPEYFNFAHDVLDVWSRLEEAGHRPPNPAFWWVNGTGAEIKWSFEELGKQSRKAANVLGGACGLQPGDRMMLVLPRLPEWWLVSVACMRTGTVMIPGVTQLTEKDLKYRLQASRAKSIITSDSLAPRVDAISAECPSLQTKLLVSDSSRPGWLNFRELLR

SEQ ID NO: 19464 - protein, 720 aa, Homo sapiens
MNNHVSSKPSTMKLKHTINPILLYFIHFLISLYTILTYIPFYFFSESRQEKSNRIKAKPVNSKPDSAYRSVNSLDGLASVLYPGCDTLDKVFTYAKNKFKNKRLLGTREVLNEEDEVQPNGKIFKKVILGQYNWLSYEDVFVRAFNFGNGLQMLGQKPKTNIAIFCETRAEWMIAAQACFMYNFQLVTLYATLGGPAIVHALNETEVTNIITSKELLQTKLKDIVSLVPRLRHIITVDGKPPTWSEFPKGIIVHTMAAVEALGAKASMENQPHSKPLPSDIAVIMYTSGSTGLPKGVMISHSNIIAGITGMAERIPELGEEDVYIGYLPLAHVLELSAELVCLSHGCRIGYSSPQTLADQSSKIKKGSKGDTSMLKPTLMAAVPEIMDRIYKNVMNKVSEMSSFQRNLFILAYNYKMEQISKGRNTPLCDSFVFRKVRSLLGGNIRLLLCGGAPLSATTQRFMNICFCCPVGQGYGLTESAGAGTISEVWDYNTGRVGAPLVCCEIKLKNWEEGGYFNTDKPHPRGEILIGGQSVTMGYYKNEAKTKADFFEDENGQRWLCTGDIGEFEPDGCLKIIDRKKDLVKLQAGEYVSLGKVEAALKNLPLVDNICAYANSYHSYVIGFVVPNQKELTELARKKGLKGTWEELCNSCEMENEVLKVLSEAAISASLEKFEIPVKIRLSPEPWTPETGLVTDAFKLKRKELKTHYQADIERMYGRK

SEQ ID NO: 19465 - protein, 99 aa, Homo sapiens
MQPRVLLVVALLALLASARASEAEDASLLSFMQGYMKHATKTAKDALSSVQESQVAQQARGWVTDGFSSLKDYWSTVKDKFSEFWDLDPEVRPTSAVAA

SEQ ID NO: 19466 - protein, 418 aa, Homo sapiens
MGNITRKGSRDLVVDSAKSLEDGPSAALHSKLYEAIMREDCTTIEVLLRNHPVNQPITILPNSASNRLLLTQPTESIIPIHLAAKYHKAQSLLCLLRHGADPEVRDTTGLTTLNLMLLHWPVTSTTWAKPGNRTHRILTDIQNSSITCLRILCAHGAQVNTQGEISNKRSPLHLAIAYGCYPVLSILTQNGADVNAINEASMTPLHMAANMLNKEMMETLIAYGANVNCAVSSTGNTPLKLAVCTASSKAGRLLGAGVSCIRLLLTHGAKVNAQDYKGQTAIHEACFGGREAIINLLLEFEANVNILTRNGESPIYMYLQRSCNVRDTALLARLLYHTYPLRMTNNQGILPAGIMLPEFRLLRDTLIKQSQKPLSLQGICKRNIRNIYGEKYKQHLKQFLPVTIWNSVYCCYDLAYTS

SEQ ID NO: 19467 - protein, 878 aa, Homo sapiens
MGPLSRDAWAQRLGAFRASPSAFMAGPEGEDLGRDLLSDLRSEKLSEQTKVSLLALSMEYPAQLWPDASAAEVAATSLLDTLVLLPPRPSALRRPLLLAATTALAAGGALGPTSGASCRLLPLLLGLAAGSDLGRGFVPASEQRPLQATACECLRELESCKPGLLGGSLGLLRGLLGQEGPVQPLSLLLALALRNTLVLQSRVGAGLGGLLTDKVSPTGGGPWDWTLVEEGDGRLQPQAPSWPAAEEGEGERSLTAREHSPEEARELRAAVIQLLDTSYLLTPVAQAQLLWLLGWALRGLQGQPPALFKPQLVRLLGTAQLTLLHAMLALKAAFGEALFTAQDEALLLRRLTLAAQHPALPPPTHLFYLHCVLSFPENWPLGPEGEEAAPLLLGPQLCRGLLPSLLHDPMALLARLHLLCLLCAEEEEEEKGQLPSPRHYLEELLAGLRQRAALDGGPRALATLCFQASYLVACCLAGQPTVLTPLIHGLAQLYQARPMLAPHFVDLLDQVDSELREPLKVVLRQVVVSRPGRDEALCWHLQMLAKVADGDAQSATLNFLQAAAAHCTNWDLQQGLLRVCRALLRAGVRGGLVDLLQVLARQLEDPDGRDHARLYYILLAHLAAPKLGVALGPSLAAPALASSLVAENQGFVAALMVQEAPALVRLSLGSHRVKGPLPVLKLQPEALEPIYSLELRFRVEGQLYAPLEAVHVPCLCPGRPARPLLLPLQPRCPAPARLDVHALYTTSTGLTCHAHLPPLFVNFADLFLPFPQPPEGAGLGFFEELWDSCLPEGAESRVWCPLGPQGLEGLVSRHLEPFVVVAQPPTSYCVAIHLPPDSKLLLRLEAALADGVPVALRTDDWAVLPLAGDYLRGLAAAV

SEQ ID NO: 19468 - protein, 1076 aa, Homo sapiens
MGILSITDQPPLVQAIFSRDVEEVRSLLSQKENINVLDQERRTPLHAAAYVGDVPILQLLLMSGANVNAKDTLWLTPLHRAAASRNEKVLGLLLAHSADVNARDKLWQTPLHVAAANRATKCAEALAPLLSSLNVADRSGRSALHHAVHSGHLETVNLLLNKGASLNVCDKKERQPLHWAAFLGHLEVLKLLVARGADLGCKDRKGYGLLHTAAASGQIEVVKYLLRMGAEIDEPNAFGNTALHIACYLGQDAVAIELVNAGANVNQPNDKGFTPLHVAAVSTNGALCLELLVNNGADVNYQSKEGKSPLHMAAIHGRFTRSQILIQNGSEIDCADKFGNTPLHVAARYGHELLISTLMTNGADTARRGIHDMFPLHLAVLFGFSDCCRKLLSSGQLYSIVSSLSNEHVLSAGFDINTPDNLGRTCLHAAASGGNVECLNLLLSSGADLRRRDKFGRTPLHYAAANGSYQCAVTLVTAGAGVNEADCKGCSPLHYAAASDTYRRAEPHTPSSHDAEEDEPLKESRRKEAFFCLEFLLDNGADPSLRDRQGYTAVHYAAAYGNRQNLELLLEMSFNCLEDVESTIPVSPLHLAAYNGHCEALKTLAETLVNLDVRDHKGRTALFLATERGSTECVEVLTAHGASALIKERKRKWTPLHAAAASGHTDSLHLLIDSGERADITDVMDAYGQTPLMLAIMNGHVDCVHLLLEKGSTADAADLRGRTALHRGAVTGCEDCLAALLDHDAFVLCRDFKGRTPIHLASACGHTAVLRTLLQAALSTDPLDAGVDYSGYSPMHWASYTGHEDCLELLLEHSPFSYLEGNPFTPLHCAVINNQDSTTEMLLGALGAKIVNSRDAKGRTPLHAAAFADNVSGLRMLLQHQAEVNATDHTGRTALMTAAENGQTAAVEFLLYRGKADLTVLDENKNTALHLACSKGHEKCALMILAETQDLGLINATNSALQMPLHIAARNGLASVVQALLSHGATVLAVDEEGHTPALACAPNKDVADCLALILSTMKPFPPKDAVSPFSFSLLKNCSIAAAKTVGGCGALPHGASCPYSQERPGAIGLDGCYSE

SEQ ID NO: 19469 - protein, 993 aa, Homo sapiens
MAVLKLTDQPPLVQAIFSGDPEEIRMLIHKTEDVNTLDSEKRTPLHVAAFLGDAEIIELLILSGARVNAKDNMWLTPLHRAVASRSEEAVQVLIKHSADVNARDKNWQTPLHVAAANKAVKCAEVIIPLLSSVNVSDRGGRTALHHAALNGHVEMVNLLLAKGANINAFDKKDRRALHWAAYMGHLDVVALLINHGAEVTCKDKKGYTPLHAAASNGQINVVKHLLNLGVEIDEINVYGNTALHIACYNGQDAVVNELIDYGANVNQPNNNGFTPLHFAAASTHGALCLELLVNNGADVNIQSKDGKSPLHMTAVHGRFTRSQTLIQNGGEIDCVDKDGNTPLHVAARYGHELLINTLITSGADTAKCGIHSMFPLHLAALNAHSDCCRKLLSSGFEIDTPDKFGRTCLHAAAAGGNVECIKLLQSSGADFHKKDKCGRTPLHYAAANCHFHCIETLVTTGANVNETDDWGRTALHYAAASDMDRNKTILGNAHDNSEELERARELKEKEATLCLEFLLQNDANPSIRDKEGYNSIHYAAAYGHRQCLELLLERTNSGFEESDSGATKSPLHLAAYNGHHQALEVLLQSLVDLDIRDEKGRTALDLAAFKGHTECVEALINQGASIFVKDNVTKRTPLHASVINGHTLCLRLLLEIADNPEAVDVKDAKGQTPLMLAVAYGHIDAVSLLLEKEANVDTVDILGCTALHRGIMTGHEECVQMLLEQEVSILCKDSRGRTPLHYAAARGHATWLSELLQMALSEEDCCFKDNQGYTPLHWACYNGNENCIEVLLEQKCFRKFIGNPFTPLHCAIINDHGNCASLLLGAIDSSIVSCRDDKGRTPLHAAAFADHVECLQLLLRHSAPVNAVDNSGKTALMMAAENGQAGAVDILVNSAQADLTVKDKDLNTPLHLACSKGHEKCALLILDKIQDESLINEKNNALQTPLHVAARNGLKVVVEELLAKGACVLAVDENASRSNGPRSTPGTAVQKEE

SEQ ID NO: 19470 - protein, 994 aa, Homo sapiens
MAVLKLTDQPPLVQAIFSGDPEEIRMLIHKTEDVNTLDSEKRTPLHVAAFLGDAEIIELLILSGARVNAKDNMWLTPLHRAVASRSEEAVQVLIKHSADVNARDKNWQTPLHVAAANKAVKCAEVIIPLLSSVNVSDRGGRTALHHAALNGHVEMVNLLLAKGANINAFDKKDRRALHWAAYMGHLDVVALLINHGAEVTCKDKKGYTPLHAAASNGQINVVKHLLNLGVEIDEINVYGNTALHIACYNGQDAVVNELIDYGANVNQPNNNGFTPLHFAAASTHGALCLELLVNNGADVNIQSKDGKSPLHMTAVHGRFTRSQTLIQNGGEIDCVDKDGNTPLHVAARYGHELLINTLITSGADTAKCGIHSMFPLHLAALNAHSDCCRKLLSSGQKYSIVSLFSNEHVLSAGFEIDTPDKFGRTCLHAAAAGGNVECIKLLQSSGADFHKKDKCGRTPLHYAAANCHFHCIETLVTTGANVNETDDWGRTALHYAAASDMDRNKTILGNAHDNSEELERARELKEKEATLCLEFLLQNDANPSIRDKEGYNSIHYAAAYGHRQCLELLLERTNSGFEESDSGATKSPLHLAAYNGHHQALEVLLQSLVDLDIRDEKGRTALDLAAFKGHTECVEALINQGASIFVKDNVTKRTPLHASVINGHTLCLRLLLEIADNPEAVDVKDAKGQTPLMLAVAYGHIDAVSLLLEKEANVDTVDILGCTALHRGIMTGHEECVQMLLEQEVSILCKDSRGRTPLHYAAARGHATWLSELLQMALSEEDCCFKDNQGYTPLHWACYNGNENCIEVLLEQKCFRKFIGNPFTPLHCAIINDHGNCASLLLGAIDSSIVSCRDDKGRTPLHAAAFADHVECLQLLLRHSAPVNAVDNSGKTALMMAAENGQAGAVDILVNSAQADLTVKDKDLNTPLHLACSKGHEKCALLILDKIQDESLINEKNNALQTPLHVAARNGLKVVVEELLAKGACVLAVDENGC

SEQ ID NO: 19471 - protein, 579 aa, Homo sapiens
MAVLKLTDQPPLVQAIFSGDPEEIRMLIHKTEDVNTLDSEKRTPLHVAAFLGDAEIIELLILSGARVNAKDNMWLTPLHRAVASRSEEAVQVLIKHSADVNARDKNWQTPLHVAAANKAVKCAEVIIPLLSSVNVSDRGGRTALHHAALNGHVEMVNLLLAKGANINAFDKKDRRALHWAAYMGHLDVVALLINHGAEVTCKDKKGYTPLHAAASNGQINVVKHLLNLGVEIDEINVYGNTALHIACYNGQDAVVNELIDYGANVNQPNNNGFTPLHFAAASTHGALCLELLVNNGADVNIQSKDGKSPLHMTAVHGRFTRSQTLIQNGGEIDCVDKDGNTPLHVAARYGHELLINTLITSGADTAKCGIHSMFPLHLAALNAHSDCCRKLLSSGFEIDTPDKFGRTCLHAAAAGGNVECIKLLQSSGADFHKKDKCGRTPLHYAAANCHFHCIETLVTTGANVNETDDWGRTALHYAAASDMDRNKTILGNAHDNSEELERARELKEKEATLCLEFLLQNDANPSIRDKEGYNSIHYAAAYGHRQCLELVSCFVLFSLTHTHTHTPNHRGINCFFPEL

SEQ ID NO: 19472 - protein, 919 aa, Homo sapiens
MLIHKTEDVNTLDSEKRTPLHVAAFLGDAEIIELLILSGARVNAKDNMWLTPLHRAVASRSEEAVQVLIKHSADVNARDKNWQTPLHVAAANKAVKCAEVIIPLLSSVNVSDRGGRTALHHAALNGHVEMVNLLLAKGANINAFDKKDRRALHWAAYMGHLDVVALLINHGAEVTCKDKKGYTPLHAAASNGQINVVKHLLNLGVEIDEINVYGNTALHIACYNGQDAVVNELIDYGANVNQPNNNGFTPLHFAAASTHGALCLELLVNNGADVNIQSKDGKSPLHMTAVHGRFTRSQTLIQNGGEIDCVDKDGNTPLHVAARYGHELLINTLITSGADTAKCGIHSMFPLHLAALNAHSDCCRKLLSSGFEIDTPDKFGRTCLHAAAAGGNVECIKLLQSSGADFHKKDKCGRTPLHYAAANCHFHCIETLVTTGANVNETDDWGRTALHYAAASDMDRNKTILGNAHDNSEELERARELKEKEATLCLEFLLQNDANPSIRDKEGYNSIHYAAAYGHRQCLELLLERTNSGFEESDSGATKSPLHLAAYNGHHQALEVLLQSLVDLDIRDEKGRTALDLAAFKGHTECVEALINQGASIFVKDNVTKRTPLHASVINGHTLCLRLLLEIADNPEAVDVKDAKGQTPLMLAVAYGHIDAVSLLLEKEANVDTVDILGCTALHRGIMTGHEECVQMLLEQEVSILCKDSRGRTPLHYAAARGHATWLSELLQMALSEEDCCFKDNQGYTPLHWACYNGNENCIEVLLEQKCFRKFIGNPFTPLHCAIINDHGNCASLLLGAIDSSIVSCRDDKGRTPLHAAAFADHVECLQLLLRHSAPVNAVDNSGKTALMMAAENGQAGAVDILVNSAQADLTVKDKDLNTPLHLACSKGHEKCALLILDKIQDESLINEKNNALQT

SEQ ID NO: 19473 - protein, 367 aa, Homo sapiens
MAVLKLTDQPPLVQAIFSGDPEEIRMLIHKTEDVNTLDSEKRTPLHVAAFLGDAEIIELLILSGARVNAKDNMWLTPLHRAVASRSEEAVQVLIKHSADVNARDKNWQTPLHVAAANKAVKCAEVIIPLLSSVNVSDRGGRTALHHAALNGHVEMVNLLLAKGANINAFDKKDRRALHWAAYMGHLDVVALLINHGAEVTCKDKKGYTPLHAAASNGQINVVKHLLNLGVEIDEINVYGNTALHIACYNGQDAVVNELIDYGANVNQPNNNGFTPLHFAAASTHGALCLELLVNNGADVNIQSKDGKSPLHMTAVHGRFTRSQTLIQNGGEIDCVDKDGNTPLHVAARYGHELLINTLITSGADTAK

SEQ ID NO: 19474 - protein, 209 aa, Homo sapiens
MRSTILLFCLLGSTRSLPQLKPALGLPPTKLAPDQGTLPNQQQSNQVFPSLSLIPLTQMLTLGPDLHLLNPAAGMTPGTQTHPLTLGGLNVQQQLHPHVLPIFVTQLGAQGTILSSEELPQIFTSLIIHSLFPGGILPTSQAGANPDVQDGSLPAGGAGVNPATQGTPAGRLPTPSGTDDDFAVTTPAGIQRSTHAIEEATTESANGIQ

SEQ ID NO: 19475 - protein, 208 aa, Homo sapiens
MRSTILLFCLLGSTRSLPLKPALGLPPTKLAPDQGTLPNQQQSNQVFPSLSLIPLTQMLTLGPDLHLLNPAAGMTPGTQTHPLTLGGLNVQQQLHPHVLPIFVTQLGAQGTILSSEELPQIFTSLIIHSLFPGGILPTSQAGANPDVQDGSLPAGGAGVNPATQGTPAGRLPTPSGTDDDFAVTTPAGIQRSTHAIEEATTESANGIQ

SEQ ID NO: 19476 - protein, 530 aa, Homo sapiens
MASAGSTARRAGSGSWHSERGEGRGARPQPTPSGSMQQANKVSLKATWTDAESKQPSQPLPDLADHLSAQATALARPRRPASLTPPRADPSPSKESDQTAIDQTAIGSYYQLFAAAVGNVEWLRFCLNQSLREIPTDDKGFTAIHFAAQWGKLACLQVLVEEYKFPVDLLTNNSQTPLHLVIHRDNTTVALPCIYYLLEKGADLNAQTCNGSTPLHLAARDGLLDCVKVLVQSGANVHAQDAMGYKPIDFCKIWNHRACARFLKDAMWKKDKKDFAREMTKMKMFKSQLTLMEHNYLIEYQKEHKILREAAIRKWLHGKLHPGHSLVSNTKQARATALSKTPEQRESQRSRSFHPSVDARLQCIPQPTEMPKPIYRKPTVKRPTMWNVSNNPARPPTTQISHSQGIRLGVHPDPTPEHDFSSFLEVRPDGHGGARLHTVDGHWVAPVPRLPFEVLLRMLYPRVWPYRMKVPQGFYPISMREVPRKRHLGDNTFWTDTLAMNLRDTFDEAFLAAVRSHQGLPTLPSPQTNP

SEQ ID NO: 19477 - protein, 343 aa, Homo sapiens
MASAGSTARRAGSGSWHSERGEGRGARPQPTPSGSMQQANKVSLKATWTDAESKQPSQPLPDLADHLSAQATALARPRRPASLTPPRADPSPSKESDQTAIDQTAIGSYYQLFAAAVGNVEWLRFCLNQSLREIPTDDKGFTAIHFAAQWGKLACLQVLVEEYKFPVDLLTNNSQTPLHLVIHRDNTTVALPCIYYLLEKGADLNAQTCNGSTPLHLAARDGLLDCVKVLVQSGANVHAQDAMGYKPIDFCKIWNHRACARFLKDAMWKKDKKDFAREMTKMKMFKSQLTLMEHNYLIEYQGQGCSVHFPFAFSPITPETLLWQDISLLSDCGFLWRRRELSF

SEQ ID NO: 19478 - protein, 650 aa, Homo sapiens
MGPASPAARGLSRRPGQPPLPLLLPLLLLLLRAQPAIGSLAGGSPGAAEAPGSAQVAGLCGRLTLHRDLRTGRWEPDPQRSRRCLRDPQRVLEYCRQMYPELQIARVEQATQAIPMERWCGGSRSGSCAHPHHQVVPFRCLPGEFVSEALLVPEGCRFLHQERMDQCESSTRRHQEAQEACSSQGLILHGSGMLLPCGSDRFRGVEYVCCPPPGTPDPSGTAVGDPSTRSWPPGSRVEGAEDEEEEESFPQPVDDYFVEPPQAEEEEETVPPPSSHTLAVVGKVTPTPRPTDGVDIYFGMPGEISEHEGFLRAKMDLEERRMRQINEVMREWAMADNQSKNLPKADRQALNEHFQSILQTLEEQVSGERQRLVETHATRVIALINDQRRAALEGFLAALQADPPQAERVLLALRRYLRAEQKEQRHTLRHYQHVAAVDPEKAQQMRFQVHTHLQVIEERVNQSLGLLDQNPHLAQELRPQIQELLHSEHLGPSELEAPAPGGSSEDKGGLQPPDSKDDTPMTLPKGSTEQDAASPEKEKMNPLEQYERKVNASVPRGFPFHSSEIQRDELAPAGTGVSREAVSGLLIMGAGGGSLIVLSMLLLRRKKPYGAISHGVVEVDPMLTLEEQQLRELQRHGYENPTYRFLEERP

SEQ ID NO: 19479 - protein, 651 aa, Homo sapiens
MGPASPAARGLSRRPGQPPLPLLLPLLLLLLRAQPAIGSLAGGSPGAAEAPGSAQVAGLCGRLTLHRDLRTGRWEPDPQRSRRCLRDPQRVLEYCRQMYPELQIARVEQATQAIPMERWCGGSRSGSCAHPHHQVVPFRCLPGEFVSEALLVPEGCRFLHQERMDQCESSTRRHQEAQEACSSQGLILHGSGMLLPCGSDRFRGVEYVCCPPPGTPDPSGTAVGDPSTRSWPPGSRVEGAEDEEEEESFPQPVDDYFVEPPQAEEEEETVPPPSSHTLAVVGKVTPTPRPTDGVDIYFGMPGEISEHEGFLRAKMDLEERRMRQINEVMREWAMADNQSKNLPKADRQALNEHFQSILQTLEEQVSGERQRLVETHATRVIALINDQRRAALEGFLAALQADPPQAERVLLALRRYLRAEQKEQRHTLRHYQHVAAVDPEKAQQMRFQVHTHLQVIEERVNQSLGLLDQNPHLAQELRPQIQELLHSEHLGPSELEAPAPGGSSEDKGGLQPPDSKDADTPMTLPKGSTEQDAASPEKEKMNPLEQYERKVNASVPRGFPFHSSEIQRDELAPAGTGVSREAVSGLLIMGAGGGSLIVLSMLLLRRKKPYGAISHGVVEVDPMLTLEEQQLRELQRHGYENPTYRFLEERP

SEQ ID NO: 19480 - protein, 417 aa, Homo sapiens
MSTRYHQAASDSYLELLKEATKRDLNLSDEDGMTPTLLAAYHGNLEALEIICSRGGDPDRCDIWGNTPLHFAASNGHAHCVSFLVNFGANIFALDNDLQTPLDAAASREQNECVALLDKAATAQNIMNPKKVTRLKEQAQKNARRQIKECERLQEKHQNKMAHTYSKEESGTLSSSKGTFSRSSPSNASAPGTFGSLSKGIKDTFKIKFKKNKDTAEQVGKEGRSGQRNVMEVFREEEEDSFSGDFKEKLQLSAEEDGSVHHESILNRPGLGSIVFRRNRISSPEDISDSKREFGFKLPSELLQRQGASEADEGAADEEGEENGLKDDLPWDDDEVEWEEDVVDATPLEVFLLSQHLEEFLPIFKREQIDLEALLLCSDEDLQSIQMQLGPRKKVLNAINRRKQVLQQPGQLVDTSL

SEQ ID NO: 19481 - protein, 324 aa, Homo sapiens
MFCGDYVQGTIFPAPNFNPIMDAQMLGGALQGFDCDKDMLINILTQRCNAQRMMIAEAYQSMYGRDLIGDMREQLSDHFKDVMAGLMYPPPLYDAHELWHAMKGVGTDENCLIEILASRTNGEIFQMREAYCLQYSNNLQEDIYSETSGHFRDTLMNLVQGTREEGYTDPAMAAQDAMVLWEACQQKTGEHKTMLQMILCNKSYQQLRLVFQEFQNISGQDMVDAINECYDGYFQELLVAIVLCVRDKPAYFAYRLYSAIHDFGFHNKTVIRILIARSEIDLLTIRKRYKERYGKSLFHDIRNFASGHYKKALLAICAGDAEDY

SEQ ID NO: 19482 - protein, 327 aa, Homo sapiens
MAWWKSWIEQEGVTVKSSSHFNPDPDAETLYKAMKGIGTNEQAIIDVLTKRSNTQRQQIAKSFKAQFGKDLTETLKSELSGKFERLIVALMYPPYRYEAKELHDAMKGLGTKEGVIIEILASRTKNQLREIMKAYEEDYGSSLEEDIQADTSGYLERILVCLLQGSRDDVSSFVDPGLALQDAQDLYAAGEKIRGTDEMKFITILCTRSATHLLRVFEEYEKIANKSIEDSIKSETHGSLEEAMLTVVKCTQNLHSYFAERLYYAMKGAGTRDGTLIRNIVSRSEIDLNLIKCHFKKMYGKTLSSMIMEDTSGDYKNALLSLVGSDP

SEQ ID NO: 19483 - protein, 141 aa, Homo sapiens
MAWWKSWIEQEGVTVKSSSHFNPDPDAETLYKAMKGIGTNEQAIIDVLTKRSNTQRQQIAKSFKAQFGKDLTETLKSELSGKFERLIVALMYPPYRYEAKELHDAMKGLGTKEGVIIEILASRTKNQLREIMKAYEEGQQG

SEQ ID NO: 19484 - protein, 265 aa, Homo sapiens
MAWWKSWDLTETLKSELSGKFERLIVALMYPPYRYEAKELHDAMKGLGTKEGVIIEILASRTKNQLREIMKAYEEDYGSSLEEDIQADTSGYLERILVCLLQGSRDDVSSFVDPGLALQDAQDLYAAGEKIRGTDEMKFITILCTRSATHLLRVFEEYEKIANKSIEDSIKSETHGSLEEAMLTVVKCTQNLHSYFAERLYYAMKGAGTRDGTLIRNIVSRSEIDLNLIKCHFKKMYGKTLSSMIMEDTSGDYKNALLSLVGSDP

SEQ ID NO: 19485 - protein, 3957 aa, Homo sapiens
MMNEDAAQKSDSGEKFNGSSQRRKRPKKSDSNASFLRAARAGNLDKVVEYLKGGIDINTCNQNGLNALHLAAKEGHVGLVQELLGRGSSVDSATKKGNTALHIASLAGQAEVVKVLVKEGANINAQSQNGFTPLYMAAQENHIDVVKYLLENGANQSTATEDGFTPLAVALQQGHNQAVAILLENDTKGKVRLPALHIAARKDDTKSAALLLQNDHNADVQSKMMVNRTTESGFTPLHIAAHYGNVNVATLLLNRGAAVDFTARNGITPLHVASKRGNTNMVKLLLDRGGQIDAKTRDGLTPLHCAARSGHDQVVELLLERGAPLLARTKNGLSPLHMAAQGDHVECVKHLLQHKAPVDDVTLDYLTALHVAAHCGHYRVTKLLLDKRANPNARALNGFTPLHIACKKNRIKVMELLVKYGASIQAITESGLTPIHVAAFMGHLNIVLLLLQNGASPDVTNIRGETALHMAARAGQVEVVRCLLRNGALVDARAREEQTPLHIASRLGKTEIVQLLLQHMAHPDAATTNGYTPLHISAREGQVDVASVLLEAGAAHSLATKKGFTPLHVAAKYGSLDVAKLLLQRRAAADSAGKNGLTPLHVAAHYDNQKVALLLLEKGASPHATAKNGYTPLHIAAKKNQMQIASTLLNYGAETNIVTKQGVTPLHLASQEGHTDMVTLLLDKGANIHMSTKSGLTSLHLAAQEDKVNVADILTKHGADQDAHTKLGYTPLIVACHYGNVKMVNFLLKQGANVNAKTKNGYTPLHQAAQQGHTHIINVLLQHGAKPNATTANGNTALAIAKRLGYISVVDTLKVVTEEVTTTTTTITEKHKLNVPETMTEVLDVSDEEGDDTMTGDGGEYLRPEDLKELGDDSLPSSQFLDGMNYLRYSLEGGRSDSLRSFSSDRSHTLSHASYLRDSAVMDDSVVIPSHQVSTLAKEAERNSYRLSWGTENLDNVALSSSPIHSGFLVSFMVDARGGAMRGCRHNGLRIIIPPRKCTAPTRVTCRLVKRHRLATMPPMVEGEGLASRLIEVGPSGAQFLGKLHLPTAPPPLNEGESLVSRILQLGPPGTKFLGPVIVEIPHFAALRGKERELVVLRSENGDSWKEHFCDYTEDELNEILNGMDEVLDSPEDLEKKRICRIITRDFPQYFAVVSRIKQDSNLIGPEGGVLSSTVVPQVQAVFPEGALTKRIRVGLQAQPMHSELVKKILGNKATFSPIVTLEPRRRKFHKPITMTIPVPKASSDVMLNGFGGDAPTLRLLCSITGGTTPAQWEDITGTTPLTFVNECVSFTTNVSARFWLIDCRQIQESVTFASQVYREIICVPYMAKFVVFAKSHDPIEARLRCFCMTDDKVDKTLEQQENFAEVARSRDVEVLEGKPIYVDCFGNLVPLTKSGQHHIFSFFAFKENRLPLFVKVRDTTQEPCGRLSFMKEPKSTRGLVHQAICNLNITLPIYTKESESDQEQEEEIDMTSEKNDETESTETSVLKSHLVNEVPVLASPDLLSEVSEMKQDLIKMTAILTTDVSDKAGSIKVKELVKAAEEEPGEPFEIVERVKEDLEKVNEILRSGTCTRDESSVQSSRSERGLVEEEWVIVSDEEIEEARQKAPLEITEYPCVEVRIDKEIKGKVEKDSTGLVNYLTDDLNTCVPLPKEQLQTVQDKAGKKCEALAVGRSSEKEGKDIPPDETQSTQKQHKPSLGIKKPVRRKLKEKQKQKEEGLQASAEKAELKKGSSEESLGEDPGLAPEPLPTVKATSPLIEETPIGSIKDKVKALQKRVEDEQKGRSKLPIRVKGKEDVPKKTTHRPHPAASPSLKSERHAPGSPSPKTERHSTLSSSAKTERHPPVSPSSKTEKHSPVSPSAKTERHSPASSSSKTEKHSPVSPSTKTERHSPVSSTKTERHPPVSPSGKTDKRPPVSPSGRTEKHPPVSPGRTEKRLPVSPSGRTDKHQPVSTAGKTEKHLPVSPSGKTEKQPPVSPTSKTERIEETMSVRELMKAFQSGQDPSKHKTGLFEHKSAKQKQPQEKGKVRVEKEKGPILTQREAQKTENQTIKRGQRLPVTGTAESKRGVRVSSIGVKKEDAAGGKEKVLSHKIPEPVQSVPEEESHRESEVPKEKMADEQGDMDLQISPDRKTSTDFSEVIKQELEDNDKYQQFRLSEETEKAQLHLDQVLTSPFNTTFPLDYMKDEFLPALSLQSGALDGSSESLKNEGVAGSPCGSLMEGTPQISSEESYKHEGLAETPETSPESLSFSPKKSEEQTGETKESTKTETTTEIRSEKEHPTTKDITGGSEERGATVTEDSETSTESFQKEATLGSPKDTSPKRQDDCTGSCSVALAKETPTGLTEEAACDEGQRTFGSSAHKTQTDSEVQESTATSDETKALPLPEASVKTDTGTESKPQGVIRSPQGLELALPSRDSEVLSAVADDSLAVSHKDSLEASPVLEDNSSHKTPDSLEPSPLKESPCRDSLESSPVEPKMKAGIFPSHFPLPAAVAKTELLTEVASVRSRLLRDPDGSAEDDSLEQTSLMESSGKSPLSPDTPSSEEVSYEVTPKTTDVSTPKPAVIHECAEEDDSENGEKKRFTPEEEMFKMVTKIKMFDELEQEAKQKRDYKKEPKQEESSSSSDPDADCSVDVDEPKHTGSGEDESGVPVLVTSESRKVSSSSESEPELAQLKKGADSGLLPEPVIRVQPPSPLPSSMDSNSSPEEVQFQPVVSKQYTFKMNEDTQEEPGKSEEEKDSESHLAEDRHAVSTEAEDRSYDKLNRDTDQPKICDGHGCEAMSPSSSAAPVSSGLQSPTGDDVDEQPVIYKESLALQGTHEKDTEGEELDVSRAESPQADCPSESFSSSSSLPHCLVSEGKELDEDISATSSIQKTEVTKTDETFENLPKDCPSQDSSITTQTDRFSMDVPVSDLAENDEIYDPQITSPYENVPSQSFFSSEESKTQTDANHTTSFHSSEVYSVTITSPVEDVVVASSSSGTVLSKESNFEGQDIKMESQQESTLWEMQSDSVSSSFEPTMSATTTVVGEQISKVIITKTDVDSDSWSEIREDDEAFEARVKEEEQKIFGLMVDRQSQGTTPDTTPARTPTEEGTPTSEQNPFLFQEGKLFEMTRSGAIDMTKRSYADESFHFFQIGQESREETLSEDVKEGATGADPLPLETSAESLALSESKETVDDEADLLPDDVSEEVEEIPASDAQLNSQMGISASTETPTKEAVSVGTKDLPTVQTGDIPPLSGVKQISCPDSSEPAVQVQLDFSTLTRSVYSDRGDDSPDSSPEEQKSVIEIPTAPMENVPFTESKSKIPVRTMPTSTPAPPSAEYESSVSEDFLSSVDEENKADEAKPKSKLPVKVPLQRVEQQLSDLDTSVQKTVAPQGQDMASIAPDNRSKSESDASSLDSKTKCPVKTRSYTETETESRERAEELELESEEGATRPKILTSRLPVKSRSTTSSCRGGTSPTKESKEHFFDLYRNSIEFFEEISDEASKLVDRLTQSEREQEIVSDDESSSALEVSVIENLPPVETEHSVPEDIFDTRPIWDESIETLIERIPDENGHDHAEDPQDEQERIEERLAYIADHLGFSWTELARELDFTEEQIHQIRIENPNSLQDQSHALLKYWLERDGKHATDTNLVECLTKINRMDIVHLMETNTEPLQERISHSYAEIEQTITLDHSEGFSVLQEELCTAQHKQKEEQAVSKESETCDHPPIVSEEDISVGYSTFQDGVPKTEGDSSATALFPQTHKEQVQQDFSGKMQDLPEESSLEYQQEYFVTTPGTETSETQKAMIVPSSPSKTPEEVSTPAEEEKLYLQTPTSSERGGSPIIQEPEEPSEHREESSPRKTSLVIVESADNQPETCERLDEDAAFEKGDDMPEIPPETVTEEEYIDEHGHTVVKKVTRKIIRRYVSSEGTEKEEIMVQGMPQEPVNIEEGDGYSKVIKRVVLKSDTEQSEDNNE

SEQ ID NO: 19486 - protein, 1872 aa, Homo sapiens
MMNEDAAQKSDSGEKFNGSSQRRKRPKKSDSNASFLRAARAGNLDKVVEYLKGGIDINTCNQNGLNALHLAAKEGHVGLVQELLGRGSSVDSATKKGNTALHIASLAGQAEVVKVLVKEGANINAQSQNGFTPLYMAAQENHIDVVKYLLENGANQSTATEDGFTPLAVALQQGHNQAVAILLENDTKGKVRLPALHIAARKDDTKSAALLLQNDHNADVQSKMMVNRTTESGFTPLHIAAHYGNVNVATLLLNRGAAVDFTARNGITPLHVASKRGNTNMVKLLLDRGGQIDAKTRDGLTPLHCAARSGHDQVVELLLERGAPLLARTKNGLSPLHMAAQGDHVECVKHLLQHKAPVDDVTLDYLTALHVAAHCGHYRVTKLLLDKRANPNARALNGFTPLHIACKKNRIKVMELLVKYGASIQAITESGLTPIHVAAFMGHLNIVLLLLQNGASPDVTNIRGETALHMAARAGQVEVVRCLLRNGALVDARAREEQTPLHIASRLGKTEIVQLLLQHMAHPDAATTNGYTPLHISAREGQVDVASVLLEAGAAHSLATKKGFTPLHVAAKYGSLDVAKLLLQRRAAADSAGKNGLTPLHVAAHYDNQKVALLLLEKGASPHATAKNGYTPLHIAAKKNQMQIASTLLNYGAETNIVTKQGVTPLHLASQEGHTDMVTLLLDKGANIHMSTKSGLTSLHLAAQEDKVNVADILTKHGADQDAHTKLGYTPLIVACHYGNVKMVNFLLKQGANVNAKTKNGYTPLHQAAQQGHTHIINVLLQHGAKPNATTANGNTALAIAKRLGYISVVDTLKVVTEEVTTTTTTITEKHKLNVPETMTEVLDVSDEEGDDTMTGDGGEYLRPEDLKELGDDSLPSSQFLDGMNYLRYSLEGGRSDSLRSFSSDRSHTLSHASYLRDSAVMDDSVVIPSHQVSTLAKEAERNSYRLSWGTENLDNVALSSSPIHSGFLVSFMVDARGGAMRGCRHNGLRIIIPPRKCTAPTRVTCRLVKRHRLATMPPMVEGEGLASRLIEVGPSGAQFLGKLHLPTAPPPLNEGESLVSRILQLGPPGTKFLGPVIVEIPHFAALRGKERELVVLRSENGDSWKEHFCDYTEDELNEILNGMDEVLDSPEDLEKKRICRIITRDFPQYFAVVSRIKQDSNLIGPEGGVLSSTVVPQVQAVFPEGALTKRIRVGLQAQPMHSELVKKILGNKATFSPIVTLEPRRRKFHKPITMTIPVPKASSDVMLNGFGGDAPTLRLLCSITGGTTPAQWEDITGTTPLTFVNECVSFTTNVSARFWLIDCRQIQESVTFASQVYREIICVPYMAKFVVFAKSHDPIEARLRCFCMTDDKVDKTLEQQENFAEVARSRDVEVLEGKPIYVDCFGNLVPLTKSGQHHIFSFFAFKENRLPLFVKVRDTTQEPCGRLSFMKEPKSTRGLVHQAICNLNITLPIYTKESESDQEQEEEIDMTSEKNPQDEQERIEERLAYIADHLGFSWTELARELDFTEEQIHQIRIENPNSLQDQSHALLKYWLERDGKHATDTNLVECLTKINRMDIVHLMETNTEPLQERISHSYAEIEQTITLDHSEGFSVLQEELCTAQHKQKEEQAVSKESETCDHPPIVSEEDISVGYSTFQDGVPKTEGDSSATALFPQTHKEQVQQDFSGKMQDLPEESSLEYQQEYFVTTPGTETSETQKAMIVPSSPSKTPEEVSTPAEEEKLYLQTPTSSERGGSPIIQEPEEPSEHREESSPRKTSLVIVESADNQPETCERLDEDAAFEKGDDMPEIPPETVTEEEYIDEHGHTVVKKVTRKIIRRYVSSEGTEKEEIMVQGMPQEPVNIEEGDGYSKVIKRVVLKSDTEQSEDNNE

SEQ ID NO: 19487 - protein, 1863 aa, Homo sapiens
MTTMLQKSDSNASFLRAARAGNLDKVVEYLKGGIDINTCNQNGLNALHLAAKEGHVGLVQELLGRGSSVDSATKKGNTALHIASLAGQAEVVKVLVKEGANINAQSQNGFTPLYMAAQENHIDVVKYLLENGANQSTATEDGFTPLAVALQQGHNQAVAILLENDTKGKVRLPALHIAARKDDTKSAALLLQNDHNADVQSKMMVNRTTESGFTPLHIAAHYGNVNVATLLLNRGAAVDFTARNGITPLHVASKRGNTNMVKLLLDRGGQIDAKTRDGLTPLHCAARSGHDQVVELLLERGAPLLARTKNGLSPLHMAAQGDHVECVKHLLQHKAPVDDVTLDYLTALHVAAHCGHYRVTKLLLDKRANPNARALNGFTPLHIACKKNRIKVMELLVKYGASIQAITESGLTPIHVAAFMGHLNIVLLLLQNGASPDVTNIRGETALHMAARAGQVEVVRCLLRNGALVDARAREEQTPLHIASRLGKTEIVQLLLQHMAHPDAATTNGYTPLHISAREGQVDVASVLLEAGAAHSLATKKGFTPLHVAAKYGSLDVAKLLLQRRAAADSAGKNGLTPLHVAAHYDNQKVALLLLEKGASPHATAKNGYTPLHIAAKKNQMQIASTLLNYGAETNIVTKQGVTPLHLASQEGHTDMVTLLLDKGANIHMSTKSGLTSLHLAAQEDKVNVADILTKHGADQDAHTKLGYTPLIVACHYGNVKMVNFLLKQGANVNAKTKNGYTPLHQAAQQGHTHIINVLLQHGAKPNATTANGNTALAIAKRLGYISVVDTLKVVTEEVTTTTTTITEKHKLNVPETMTEVLDVSDEEGDDTMTGDGGEYLRPEDLKELGDDSLPSSQFLDGMNYLRYSLEGGRSDSLRSFSSDRSHTLSHASYLRDSAVMDDSVVIPSHQVSTLAKEAERNSYRLSWGTENLDNVALSSSPIHSGRASPCLERDNSSFLVSFMVDARGGAMRGCRHNGLRIIIPPRKCTAPTRVTCRLVKRHRLATMPPMVEGEGLASRLIEVGPSGAQFLGKLHLPTAPPPLNEGESLVSRILQLGPPGTKFLGPVIVEIPHFAALRGKERELVVLRSENGDSWKEHFCDYTEDELNEILNGMDEVLDSPEDLEKKRICRIITRDFPQYFAVVSRIKQDSNLIGPEGGVLSSTVVPQVQAVFPEGALTKRIRVGLQAQPMHSELVKKILGNKATFSPIVTLEPRRRKFHKPITMTIPVPKASSDVMLNGFGGDAPTLRLLCSITGGTTPAQWEDITGTTPLTFVNECVSFTTNVSARFWLIDCRQIQESVTFASQVYREIICVPYMAKFVVFAKSHDPIEARLRCFCMTDDKVDKTLEQQENFAEVARSRDVEVLEGKPIYVDCFGNLVPLTKSGQHHIFSFFAFKENRLPLFVKVRDTTQEPCGRLSFMKEPKSTRGLVHQAICNLNITLPIYTKESESDQEQEEEIDMTSEKNPQDEQERIEERLAYIADHLGFSWTELARELDFTEEQIHQIRIENPNSLQDQSHALLKYWLERDGKHATDTNLVECLTKINRMDIVHLMETNTEPLQERISHSYAEIEQTITLDHSEGFSVLQEELCTAQHKQKEEQAVSKESETCDHPPIVSEEDISVGYSTFQDGVPKTEGDSSATALFPQTHKEQVQQDFSGKMQDLPEESSLEYQQEYFVTTPGTETSETQKAMIVPSSPSKTPEEVSTPAEEEKLYLQTPTSSERGGSPIIQEPEEPSEHREESSPRKTSLVIVESADNQPETCERLDEDAAFEKGDDMPEIPPETVTEEEYIDEHGHTVVKKVTRKIIRRYVSSEGTEKEEIMVQGMPQEPVNIEEGDGYSKVIKRVVLKSDTEQSEDNNE

SEQ ID NO: 19488 - protein, 555 aa, Homo sapiens
MTDDKVDKTLEQQENFAEVARSRDVEVLEGKPIYVDCFGNLVPLTKSGQHHIFSFFAFKENRLPLFVKVRDTTQEPCGRLSFMKEPKSTRGLVHQAICNLNITLPIYTKESESDQEQEEEIDMTSEKNPQDEQERIEERLAYIADHLGFSWTELARELDFTEEQIHQIRIENPNSLQDQSHALLKYWLERDGKHATDTNLVECLTKINRMDIVHLMETNTEPLQERISHSYAEIEQTITLDHSEGFSVLQEELCTAQHKQKEEQAVSKESETCDHPPIVSEEDISVGYSTFQDGVPKTEGDSSATALFPQTHKEQVQQDFSGKMQDLPEESSLEYQQEYFVTTPGTETSETQKAMIVPSSPSKTPEEVSTPAEEEKLYLQTPTSSERGGSPIIQEPEEPSEHREESSPRKTSLVIVESADNQPETCERLDEDAAFEKELTEELGELEASSDEEAMVTTRVVRRRVIIQGDDMPEIPPETVTEEEYIDEHGHTVVKKVTRKIIRRYVSSEGTEKEEIMVQGMPQEPVNIEEGDGYSKVIKRVVLKSDTEQSEDNNE

SEQ ID NO: 19489 - protein, 491 aa, Homo sapiens
MKTFTWTLGVLFFLLVDTGHCRGGQFKIKKINQRRYPRATDGKEEAKKCAYTFLVPEQRITGPICVNTKGQDASTIKDMITRMDLENLKDVLSRQKREIDVLQLVVDVDGNIVNEVKLLRKESRNMNSRVTQLYMQLLHEIIRKRDNSLELSQLENKILNVTTEMLKMATRYRELEVKYASLTDLVNNQSVMITLLEEQCLRIFSRQDTHVSPPLVQVVPQHIPNSQQYTPGLLGGNEIQRDPGYPRDLMPPPDLATSPTKSPFKIPPVTFINEGPFKDCQQAKEAGHSVSGIYMIKPENSNGPMQLWCENSLDPGGWTVIQKRTDGSVNFFRNWENYKKGFGNIDGEYWLGLENIYMLSNQDNYKLLIELEDWSDKKVYAEYSSFRLEPESEFYRLRLGTYQGNAGDSMMWHNGKQFTTLDRDKDMYAGNCAHFHKGGWWYNACAHSNLNGVWYRGGHYRSKHQDGIFWAEYRGGSYSLRAVQMMIKPID

SEQ ID NO: 19490 - protein, 314 aa, Homo sapiens
MQNVINTVKGKALEVAEYLTPVLKESKFKETGVITPEEFVAAGDHLVHHCPTWQWATGEELKVKAYLPTGKQFLVTKNVPCYKRCKQMEYSDELEAIIEEDDGDGGWVDTYHNTGITGITEAVKEITLENKDNIRLQDCSALCEEEEDEDEGEAADMEEYEESGLLETDEATLDTRKIVEACKAKTDAGGEDAILQTRTYDLYITYDKYYQTPRLWLFGYDEQRQPLTVEHMYEDISQDHVKKTVTIENHPHLPPPPMCSVHPCRHAEVMKKIIETVAEGGGELGVHMYLLIFLKFVQAVIPTIEYDYTRHFTM

SEQ ID NO: 19491 - protein, 311 aa, Homo sapiens
MQNVINTVKGKALEVAEYLTPVLKESKFKETGVITPEEFVAAGDHLVHHCPTWQWATGEELKVKAYLPTGKQFLVTKNVPCYKRCKQMEYSDELEAIIEEDDGDGGWVDTYHNTGITGITEAVKEITLENKDNIRLQDCSALCEEEEDEDEGEAADMEEYEESGLLETDEATLDTRKIVEACKAKTDAGGEDAILQTRTYDLYITYDKYYQTPRLWLFGYDEQRQPLTVEHMYEDISQDHVKKTVTIENHPHLPPPPMCSVHPCRHAEVMKKIIETVAEGGGELGVHMYPSLYVRLVAKWLLTIFFLRNLV

SEQ ID NO: 19492 - protein, 398 aa, Homo sapiens
MESVLSKYEDQITIFTDYLEEYPDTDELVWILGKQHLLKTEKSKLLSDISARLWFTYRRKFSPIGGTGPSSDAGWGCMLRCGQMMLAQALICRHLGRDWSWEKQKEQPKEYQRILQCFLDRKDCCYSIHQMAQMGVGEGKSIGEWFGPNTVAQVLKKLALFDEWNSLAVYVSMDNTVVIEDIKKMCRVLPLSADTAGDRPPDSLTASNQSKGTSAYCSAWKPLLLIVPLRLGINQINPVYVDAFKECFKMPQSLGALGGKPNNAYYFIGFLGDELIFLDPHTTQTFVDTEENGTVNDQTFHCLQSPQRMNILNLDPSVALGFFCKEEKDFDNWCSLVQKEILKENLRMFELVQKHPSHWPPFVPPAKPEVTTTGAEFIDSTEQLEEFDLEEDFEILSV

SEQ ID NO: 19493 - protein, 336 aa, Homo sapiens
MESVLSKYEDQITIFTDYLEEYPDTDELVWILGKQHLLKTEKSKLLSDISARLWFTYRRKFSPIGGTGPSSDAGWGCMLRCGQMMLAQALICRHLGRDWSWEKQKEQPKEYQRILQCFLDRKDCCYSIHQMAQMGVGEGKSIGEWFGPNTVAQVLKKLALFDEWNSLAVYVSMDNTVVIEDIKKMCRVLPLSADTAGDRPPDSLTASNQSDELIFLDPHTTQTFVDTEENGTVNDQTFHCLQSPQRMNILNLDPSVALGFFCKEEKDFDNWCSLVQKEILKENLRMFELVQKHPSHWPPFVPPAKPEVTTTGAEFIDSTEQLEEFDLEEDFEILSV

SEQ ID NO: 19494 - protein, 321 aa, Homo sapiens
MLRCGQMMLAQALICRHLGRDWSWEKQKEQPKEYQRILQCFLDRKDCCYSIHQMAQMGVGEGKSIGEWFGPNTVAQVLKKLALFDEWNSLAVYVSMDNTVVIEDIKKMCRVLPLSADTAGDRPPDSLTASNQSKGTSAYCSAWKPLLLIVPLRLGINQINPVYVDAFKECFKMPQSLGALGGKPNNAYYFIGFLGDELIFLDPHTTQTFVDTEENGTVNDQTFHCLQSPQRMNILNLDPSVALGFFCKEEKDFDNWCSLVQKEILKENLRMFELVQKHPSHWPPFVPPAKPEVTTTGAEFIDSTEQLEEFDLEEDFEILSV

SEQ ID NO: 19495 - protein, 374 aa, Homo sapiens
MESVLSKYEDQITIFTDYLEEYPDTDELVWILGKQHLLKTGGTGPSSDAGWGCMLRCGQMMLAQALICRHLGRDWSWEKQKEQPKEYQRILQCFLDRKDCCYSIHQMAQMGVGEGKSIGEWFGPNTVAQVLKKLALFDEWNSLAVYVSMDNTVVIEDIKKMCRVLPLSADTAGDRPPDSLTASNQSKGTSAYCSAWKPLLLIVPLRLGINQINPVYVDAFKECFKMPQSLGALGGKPNNAYYFIGFLGDELIFLDPHTTQTFVDTEENGTVNDQTFHCLQSPQRMNILNLDPSVALGFFCKEEKDFDNWCSLVQKEILKENLRMFELVQKHPSHWPPFVPPAKPEVTTTGAEFIDSTEQLEEFDLEEDFEILSV

SEQ ID NO: 19496 - protein, 474 aa, Homo sapiens
MNSVSPAAAQYRSSSPEDARRRPEARRPRGPRGPDPNGLGPSGASGPALGSPGAGPSEPDEVDKFKAKFLTAWNNVKYGWVVKSRTSFSKISSIHLCGRRYRFEGEGDIQRFQRDFVSRLWLTYRRDFPPLPGGCLTSDCGWGCMLRSGQMMLAQGLLLHFLPRDWTWAEGMGLGPPELSGSASPSRYHGPARWMPPRWAQGAPELEQERRHRQIVSWFADHPRAPFGLHRLVELGQSSGKKAGDWYGPSLVAHILRKAVESCSDVTRLVVYVSQDCTVYKADVARLVARPDPTAEWKSVVILVPVRLGGETLNPVYVPCVKELLRCELCLGIMGGKPRHSLYFIGYQDDFLLYLDPHYCQPTVDVSQADFPLESFHCTSPRKMAFAKMDPSCTVGFYAGDRKEFETLCSELTRVLSSSSATERYPMFTLAEGHAQDHSLDDLCSQLAQPTLRLPRTGRLLRAKRPSSEDFVFL

SEQ ID NO: 19497 - protein, 141 aa, Homo sapiens
MGGKPRHSLYFIGYQDDFLLYLDPHYCQPTVDVSQADFPLESFHCTSPRKMAFAKMDPSCTVGFYAGDRKEFETLCSELTRVLSSSSATERYPMFTLAEGHAQDHSLDDLCSQLAQPTLRLPRTGRLLRAKRPSSEDFVFL

SEQ ID NO: 19498 - protein, 375 aa, Homo sapiens
MAALRDAEIQKDVQTYYGQVLKRSADLQTNGCVTTARPVPKHIREALQNVHEEVALRYYGCGLVIPEHLENCWILDLGSGSGRDCYVLSQLVGEKGHVTGIDMTKGQVEVAEKYLDYHMEKYGFQASNVTFIHGYIEKLGEAGIKNESHDIVVSNCVINLVPDKQQVLQEAYRVLKHGGELYFSDVYTSLELPEEIRTHKVLWGECLGGALYWKELAVLAQKIGFCPPRLVTANLITIQNKELERVIGDCRFVSATFRLFKHSKTGPTKRCQVIYNGGITGHEKELMFDANFTFKEGEIVEVDEETAAILKNSRFAQDFLIRPIGEKLPTSGGCSALELKDIITDPFKLAEESDSMKSRCVPDAAGGCCGTKKSC

SEQ ID NO: 19499 - protein, 279 aa, Homo sapiens
MAALRDAEIQKDVQTYYGQVLKRSADLQTNGCVTTARPVPKHIREALQNVHEEVALRSNCVINLVPDKQQVLQEAYRVLKHGGELYFSDVYTSLELPEEIRTHKVLWGECLGGALYWKELAVLAQKIGFCPPRLVTANLITIQNKELERVIGDCRFVSATFRLFKHSKTGPTKRCQVIYNGGITGHEKELMFDANFTFKEGEIVEVDEETAAILKNSRFAQDFLIRPIGEKLPTSGGCSALELKDIITDPFKLAEESDSMKSRCVPDAAGGCCGTKKSC

SEQ ID NO: 19500 - protein, 722 aa, Homo sapiens
MAVRERAAAAMAALERRVPSLDDFAGQSWSSWVERADLPAADGAELEESSKNTKKLDAMTLIKEDMSIFGHCPAHDDFYLVVCNHCSQVVKPQAFQKHCERRHGPLSKLYGRAPPPPPAPASSQKCHVVNGQGPACRAPGSTKTSSREKGQGSRSRGHQPPEKTQKDNLCQPGGLTKDSPGKPPMAPPSKEPPGRENIEIIPSEGSSHWAEGSPPEKEPSGTRLPPKTHRKMARKECDLNRQCGVINPETKKICTRLLTCKIHSVHQRREVQGRAKDFDVLVAELKANSRKGESPKEKSPGRKEQVLERPSQELPSSVQVVAAVAAPSSTFSVRAKQTYPYCALPRSRASSESELDDEGPCGGDGDPGLFPFPMPRGGTQASSEESEEEGTSDDLHPPPDCHYATRPPRPQAFCTFGSRLVSPGCYVFSRRLDRFCSALSSMLERHLSTHMWKKIPPAAEPPAHLVNSPLSAPLSPSSTGTCPRLPGPTLRPACPASMPPTKDNLVPSYPAGSPSVAAACSQAECMGGSQAITSPLPANTPSPSFSKLPPSKASKSSKGKDGVEVEAPSRKRKLSPGPTTLKRTCILEPTGKGKPSGCRGLSAKTKTALSMGLNGTMGPRVKRAGPLDCRGSPHQLPTPVKASQLENRGAAGHPAKALPTNCLSEEEVAKKRKNLATYCRPVKAKHCQAGAPADVACSVRRKKPGPALAFEEKCSTLKSKAH

SEQ ID NO: 19501 - protein, 724 aa, Homo sapiens
MFDTTPHSGRSTPSSSPSLRKRLQLLPPSRPPPEPEPGTMVEKGSDSSSEKGGVPGTPSTQSLGSRNFIRNSKKMQSWYSMLSPTYKQRNEDFRKLFSKLPEAERLIVDYSCALQREILLQGRLYLSENWICFYSNIFRWETTISIQLKEVTCLKKEKTAKLIPNAIQICTESEKHFFTSFGARDRCFLLIFRLWQNALLEKTLSPRELWHLVHQCYGSELGLTSEDEDYVSPLQLNGLGTPKEVGDVIALSDITSSGAADRSQEPSPVGSRRGHVTPNLSRASSDADHGAEEDKEEQVDSQPDASSSQTVTPVAEPPSTEPTQPDGPTTLGPLDLLPSEELLTDTSNSSSSTGEEADLAALLPDLSGRLLINSVFHVGAERLQQMLFSDSPFLQGFLQQCKFTDVTLSPWSGDSKCHQRRVLTYTIPISNPLGPKSASVVETQTLFRRGPQAGGCVVDSEVLTQGIPYQDYFYTAHRYCILGLARNKARLRVSSEIRYRKQPWSLVKSLIEKNSWSGIEDYFHHLERELAKAEKLSLEEGGKDARGLLSGLRRRKRPLSWRAHGDGPQHPDPDPCARAGIHTSGSLSSRFSEPSVDQGPGAGIPSALVLISIVICVSLIILIALNVLLFYRLWSLERTAHTFESWHSLALAKGKFPQTATEWAEILALQKQFHSVEVHKWRQILRASVELLDEMKFSLEKLHQGITVSDPPFDTQPRPDDSFS

SEQ ID NO: 19502 - protein, 713 aa, Homo sapiens
MFDTTPHSGRSTPSSSPSLRKRLQLLPPSRPPPEPEPGTMVEKGSDSSSEKGGVPGTPSTQSLGSRNFIRNSKMLSPTYKQRNEDFRKLFSKLPEAERLIVDYSCALQREILLQGRLYLSENWICFYSNIFRWETTISIQLKEVTCLKKEKTAKLIPNAIQICTESEKHFFTSFGARDRCFLLIFRLWQNALLEKTLSPRELWHLVHQCYGSELGLTSEDEDYVSPLQLNGLGTPKEVGDVIALSDITSSGAADRSQEPSPVGSRRGHVTPNLSRASSDADHGAEEDKEEQVDSQPDASSSQTVTPVAEPPSTEPTQPDGPTTLGPLDLLPSEELLTDTSNSSSSTGEEADLAALLPDLSGRLLINSVFHVGAERLQQMLFSDSPFLQGFLQQCKFTDVTLSPWSGDSKCHQRRVLTYTIPISNPLGPKSASVVETQTLFRRGPQAGGCVVDSEVLTQGIPYQDYFYTAHRYCILGLARNKARLRVSSEIRYRKQPWSLVKSLIEKNSWSGIEDYFHHLERELAKAEKLSLEEGGKDARGLLSGLRRRKRPLSWRAHGDGPQHPDPDPCARAGIHTSGSLSSRFSEPSVDQGPGAGIPSALVLISIVLIILIALNVLLFYRLWSLERTAHTFESWHSLALAKGKFPQTATEWAEILALQKQFHSVEVHKWRQILRASVELLDEMKFSLEKLHQGITVSDPPFDTQPRPDDSFS

SEQ ID NO: 19503 - protein, 720 aa, Homo sapiens
MFDTTPHSGRSTPSSSPSLRKRLQLLPPSRPPPEPEPGTMVEKGSDSSSEKGGVPGTPSTQSLGSRNFIRNSKKMQSWYSMLSPTYKQRNEDFRKLFSKLPEAERLIVDYSCALQREILLQGRLYLSENWICFYSNIFRWETTISIQLKEVTCLKKEKTAKLIPNAIQICTESEKHFFTSFGARDRCFLLIFRLWQNALLEKTLSPRELWHLVHQCYGSELGLTSEDEDYVSPLQLNGLGTPKEVGDVIALSDITSSGAADRSQEPSPVGSRRGHVTPNLSRASSDADHGAEEDKEEQVDSQPDASSSQTVTPVAEPPSTEPTQPDGPTTLGPLDLLPSEELLTDTSNSSSSTGEEADLAALLPDLSGRLLINSVFHVGAERLQQMLFSDSPFLQGFLQQCKFTDVTLSPWSGDSKCHQRRVLTYTIPISNPLGPKSASVVETQTLFRRGPQAGGCVVDSEVLTQGIPYQDYFYTAHRYCILGLARNKARLRVSSEIRYRKQPWSLVKSLIEKNSWSGIEDYFHHLERELAKAEKLSLEEGGKDARGLLSGLRRRKRPLSWRAHGDGPQHPDPDPCARAGIHTSGSLSSRFSEPSVDQGPGAGIPSALVLISIVLIILIALNVLLFYRLWSLERTAHTFESWHSLALAKGKFPQTATEWAEILALQKQFHSVEVHKWRQILRASVELLDEMKFSLEKLHQGITVSDPPFDTQPRPDDSFS

SEQ ID NO: 19504 - protein, 295 aa, Homo sapiens
MSKSTKLCGKTSCPRSNIFCNLLDKIVKRPSLQFLGQWGYHCYEPRIYRSLAKILRYVDLDGFDALLTDYIAFVEKSGYRFEVSFNLDFTEICVNTILYWVFARKGNPDFVELLLKKTKDYVQDRSCNLALIWRTFTPVYCPSPLSGITPLFYVAQTRQSNIFKILLQYGILEREKNPINIVLTIVLYPSRVRVMVDRELADIHEDAKTCLVLCSRVLSVISVKEIKTQLSLGRHPIISNWFDYIPSTRYKDPCELLHLCRLTIRNQLLTNNMLPDGIFSLLIPARLQNYLNLEI

SEQ ID NO: 19505 - protein, 587 aa, Homo sapiens
MDNYTSDEDIDEDFDTQLIIQQSLQDIYKPGTAQHAPKDESLHSFLSADYKKIVETIEKVGKEDALSHLTKYHSAFGEADEIGWIPLHKAAVQLNRKILEITLSASDPSLWEQTTHNGETPLFLAVSSCLLENATFLLLNGCNPNAKNFEGNSPLLAAVLRDCYDMAALLINYGADVNLRCANERTALHEAAKLGREDMVKLMLVSGAHPDPQSTYGFTPLALAAQSGHTEIMEMLLRKGKIFCLASDSSSILLEAASGGNPDAVALLLEYGADANIPKNSGHLPIHVAADRGHLLALKILIPVTDLAAIKQSGISPVHCAAAGAHPQCLELLIQAGFDVNFMLDQRINKHYDDHRKSALYFAVSNSDLSSVKLLLSAGALPNQDPVNCLQIALRMGNYELISLLLRHGANVNYFCRVNPLHFPSALQYTLKDEVMLRMLLNYGYDTERCFDCPHGDKVHPSYTVEGWTSTVIKDTKFCEVITLSWLQHLSGKVVRVMLDYVDQVRICSKLKAVLQKQGIWSEIHFILTNPRSLKHLCRLKIRKCMGRLHLRCPVFMSFLPLPNRLKAYVLYKEYDLYGQGIFTGTW

SEQ ID NO: 19506 - protein, 302 aa, Homo sapiens
MLKCILKFFLRALKILIPVTDLAAIKQSGISPVHCAAAGAHPQCLELLIQAGFDVNFMLDQRINKHYDDHRKSALYFAVSNSDLSSVKLLLSAGALPNQDPVNCLQIALRMGNYELISLLLRHGANVNYFCRVNPLHFPSALQYTLKDEVMLRMLLNYGYDTERCFDCPHGDKVHPSYTVEGWTSTVIKDTKFCEVITLSWLQHLSGKVVRVMLDYVDQVRICSKLKAVLQKQGIWSEIHFILTNPRSLKHLCRLKIRKCMGRLHLRCPVFMSFLPLPNRLKAYVLYKEYDLYGQGIFTGTW

SEQ ID NO: 19507 - protein, 587 aa, Homo sapiens
MDNYTSDEDIDEDFDTQLIIQQSLQDIYKPGTAQHAPKDESLHSFLSADYKKIVETIEKGKEDALSHLTKYHSAFGEADEIGWIPLHKAAVQLNRKILEITLSASDPSLWEQTTHNGETPLFLAVSSCLLENATFLLLNGCNPNAKNFEGNSPLLAAVLRDCYDMAALLINYGADVNLRCANERTALHEAAKLGREDMVKLMLVSGAHPDPQSTYGFTPLALAAQSGHTEIMEMLLRKGANAHGQASDSSSILLEAASGGNPDAVALLLEYGADANIPKNSGHLPIHVAADRGHLLALKILIPVTDLAAIKQSGISPVHCAAAGAHPQCLELLIQAGFDVNFMLDQRINKHYDDHRKSALYFAVSNSDLSSVKLLLSAGALPNQDPVNCLQIALRMGNYELISLLLRHGANVNYFCRVNPLHFPSALQYTLKDEVMLRMLLNYGYDTERCFDCPHGDKVHPSYTVEGWTSTVIKDTKFCEVITLSWLQHLSGKVVRVMLDYVDQVRICSKLKAVLQKQGIWSEIHFILTNPRSLKHLCRLKIRKCMGRLHLRCPVFMSFLPLPNRLKAYVLYKEYDLYGQGIFTGTW

SEQ ID NO: 19508 - protein, 142 aa, Homo sapiens
MFACAKLACTPSLIRAGSRVAYRPISASVLSRPEASRTGEGSTVFNGAQNGVSQLIQREFQTSAISRDIDTAAKFIGAGAATVGVAGSGAGIGTVFGSLIIGYARNPSLKQQLFSYAILGFALSEAMGLFCLMVAFLILFAM

SEQ ID NO: 19509 - protein, 1844 aa, Homo sapiens
MVGVLAMAAAAAPPPVKDCEIEPCKKRKKDDDTSTCKTITKYLSPLGKTRDRVFAPPKPSNILDYFRKTSPTNEKTQLGKECKIKSPESVPVDSNKDCTTPLEMFSNVEFKKKRKRVNLSHQLNNIKTENEAPIEISSDDSKEDYSLNNDFVESSTSVLRYKKQVEVLAENIQDTKSQPNTMTSLQNSKKVNPKQGTTKNDFKKLRKRKCRDVVDLSESLPLAEELNLLKKDGKDTKQMENTTSHANSRDNVTEAAQLNDSIITVSYEEFLKSHKENKVEEIPDSTMSICVPSETVDEIVKSGYISESENSEISQQVRFKTVTVLAQVHPIPPKKTGKIPRIFLKQKQFEMENSLSDPENEQTVQKRKSNVVIQEEELELAVLEAGSSEAVKPKCTLEERQQFMKAFRQPASDALKNGVKKSSDKQKDLNEKCLYEVGRDDNSKKIMENSGIQMVSKNGNLQLHTDKGSFLKEKNKKLKKKNKKTLDTGAIPGKNREGNTQKKETTFFLKEKQYQNRMSLRQRKTEFFKSSTLFNNESLVYEDIANDDLLKVSSLCNNNKLSRKTSIPVKDIKLTQSKAESEASLLNVSTPKSTRRSGRISSTPTTETIRGIDSDDVQDNSQLKASTQKAANLSEKHSLYTAELITVPFDSESPIRMKFTRISTPKKSKKKSNKRSEKSEATDGGFTSQIRKASNTSKNISKAKQLIEKAKALHISRSKVTEEIAIPLRRSSRHQTLPERKKLSETEDSVIIIDSSPTALKHPEKNQKKLQCLNDVLGKKLNTSTKNVPGKMKVAPLFLVRKAQKAADPVPSFDESSQDTSEKSQDCDVQCKAKRDFLMSGLPDLLKRQIAKKAAALDVYNAVSTSFQRVVHVQQKDDGCCLWHLKPPSCPLLTKFKELNTKVIDLSKCGIALGEFSTLNSKLKSGNSAAVFMRTRKEFTEEVRNLLLEEIRWSNPEFSLKKYFPLLLKKQIEHQVLSSECHSKQELEADVSHKETKRKLVEAENSKSKRKKPNEYSKNLEKTNRKSEELSKRNNSSGIKLDSSKDSGTEDMLWTEKYQPQTASELIGNELAIKKLHSWLKDWKRRAELEERQNLKGKRDEKHEDFSGGIDFKGSSDDEEESRLCNTVLITGPTGVGKTAAVYACAQELGFKIFEVNASSQRSGRQILSQLKEATQSHQVDKQGVNSQKPCFFNSYYIGKSPKKISSPKKVVTSPRKVPPPSPKSSGPKRALPPKTLANYFKVSPKPKNNEEIGMLLENNKGIKNSFEQKQITQTKSTNATNSNVKDVGAEEPSRKNATSLILFEEVDVIFDEDAGFLNAIKTFMATTKRPVILTTSDPTFSLMFDGCFEEIKFSTPSLLNVASYLQMICLTENFRTDVKDFVTLLTANTCDIRKSILYLQFWIRSGGGVLEERPLTLYRGNSRNVQLVCSEHGLDNKIYPKNTKKKRVDLPKCDSGCAETLFGLKNIFSPSEDLFSFLKHKITMKEEWHKFIQLLTEFQMRNVDFLYSNLEFILPLPVDTIPETKNFCGPSVTVDASAATKSMNCLARKHSEREQPLKKSQKKKQKKTLVILDDSDLFDTDLDFPDQSISLSSVSSSSNAEESKTGDEESKARDKGNNPETKKSIPCPPKTTAGKKCSALVSHCLNSLSEFMDNMSFLDALLTDVREQNKYGRNDFSWTNGKVTSGLCDEFSLESNDGWTSQSSGELKAAAEALSFTKCSSAISKALETLNSCKKLGRDPTNDLTFYVSQKRNNVYFSQSAANLDNAWKRISVIKSVFSSRSLLYVGNRQASIIEYLPTLRNICKTEKLKEQGKSKRRFLHYFEGIHLDIPKETVNTLAADFP

SEQ ID NO: 19510 - protein, 1204 aa, Homo sapiens
MVGVLAMAAAAAPPPVKDCEIEPCKKRKKDDDTSTCKTITKYLSPLGKTRDRVFAPPKPSNILDYFRKTSPTNEKTQLGKECKIKSPESVPVDSNKDCTTPLEMFSNVEFKKKRKRVNLSHQLNNIKTENEAPIEISSDDSKEDYSLNNDFVESSTSVLRYKKQVEVLAENIQDTKSQPNTMTSLQNSKKVNPKQGTTKNDFKKLRKRKCRDVVDLSESLPLAEELNLLKKDGKDTKQMENTTSHANSRDNVTEAAQLNDSIITVSYEEFLKSHKENKVEEIPDSTMSICVPSETVDEIVKSGYISESENSEISQQVRFKTVTVLAQVHPIPPKKTGKIPRIFLKQKQFEMENSLSDPENEQTVQKRKSNVVIQEEELELAVLEAGSSEAVKPKCTLEERQQFMKAFRQPASDALKNGVKKSSDKQKDLNEKCLYEVGRDDNSKKIMENSGIQMVSKNGNLQLHTDKGSFLKEKNKKLKKKNKKTLDTGAIPGKNREGNTQKKETTFFLKEKQYQNRMSLRQRKTEFFKSSTLFNNESLVYEDIANDDLLKVSSLCNNNKLSRKTSIPVKDIKLTQSKAESEASLLNVSTPKSTRRSGRISSTPTTETIRGIDSDDVQDNSQLKASTQKAANLSEKHSLYTAELITVPFDSESPIRMKFTRISTPKKSKKKSNKRSEKSEATDGGFTSQIRKASNTSKNISKAKQLIEKAKALHISRSKVTEEIAIPLRRSSRHQTLPERKKLSETEDSVIIIDSSPTALKHPEKNQKKLQCLNDVLGKKLNTSTKNVPGKMKVAPLFLVRKAQKAADPVPSFDESSQDTSEKSQDCDVQCKAKRDFLMSGLPDLLKRQIAKKAAALDVYNAVSTSFQRVVHVQQKDDGCCLWHLKPPSCPLLTKFKELNTKVIDLSKCGIALGEFSTLNSKLKSGNSAAVFMRTRKEFTEEVRNLLLEEIRWSNPEFSLKKYFPLLLKKQIEHQVLSSECHSKQELEADVSHKETKRKLVEAENSKSKRKKPNEYSKNLEKTNRKSEELSKRNNSSGIKLDSSKDSGTEDMLWTEKYQPQTASELIGNELAIKKLHSWLKDWKRRAELEERQNLKGKRDEKHEDFSGGIDFKGSSDDEEESRLCNTVLITGPTGVGKTAAVYACAQELGFKIFEVNASSQRSGRQILSQLKEATQSHQVDKQGVNSQKPCFFNSYYIGKSPKK

SEQ ID NO: 19511 - protein, 453 aa, Homo sapiens
MARETFPFTSSMLRSLRLQQEWLEWEDRRRAAAQQCRSRRCPSSPRARLTRPHRSCRDPAVHQALFSGNLQQVQALFQDEEAANMIVETVSNQLAWSAEQGFWVLTPKTKQTAPLAIATARGYTDCARHLIRQGAELDARVGGRAALHEACARAQFDCVRLLLTFGAKANVLTEEGTTPLHLCTIPESLQCAKLLLEAGATVNLAAGESQETPLHVAAARGLEQHVALYLEHGADVGLRTSQGETALNTACAGAEGPGSCRRHQAAARRLLEAGADARAAGRKRHTPLHNACANGCGGLAELLLRYGARAEVPNGAGHTPMDCALQAVQDSPNWEPEVLFAALLDYGAQPVRPEMLKHCANFPRALEVLLNAYPCVPSCETWVEAVLPELWKEHEAFYSSALCMVNQPRQLQHLARLAVRARLGSRCRQGATRLPLPPLLRDYLLLRVEGCIQ

SEQ ID NO: 19512 - protein, 475 aa, Homo sapiens
MAASALRGLPVAGGGESSESEDDGWEIGYLDRTSQKLKRLLPIEEKKEKFKKAMTIGDVSLVQELLDSGISVDSNFQYGWTPLMYAASVANAELVRVLLDRGANASFEKDKQSILITACSAHGSEEQILKCVELLLSRNADPNVACRRLMTPIMYAARDGHTQVVALLVAHGAEVNTQDENGYTALTWAARQGHKNIVLKLLELGANKMLQTKDGKMPSEIAKRNKHHEIFNLLSFTLNPLEGKLQQLTKEDTICKILTTDSDREKDHIFSSYTAFGDLEVFLHGLGLEHMTDLLKERDITLRHLLTMREDEFTKNGITSKDQQKILAALKELQVEEIQFGELSEETKLEISGDEFLNFLLKLNKQCGHLITAVQNVITELPVNSQKITLEWASPQNFTSVCEELVNNVEDLSEKVCKLKDLIQKLQNERENDPTHIQLREEVSTWNSRILKRTAITICGFGFLLFICKLTFQRK

SEQ ID NO: 19513 - protein, 466 aa, Homo sapiens
MAASALRGLPVAGGGESSESEDDGWEIGYLDRTSQKLKRLLPIEEKKEKFKKAMTIGDVSLVQELLDSGISVDSNFQYGWTPLMYAASVANAELVRVLLDRGANASFEKDKQSILITACSAHGSEEQILKCVELLLSRNADPNVACRRLMTPIMYAARDGHTQVVALLVAHGAEVNTQDENGYTALTWAARQGHKNIVLKLLELGANKMLQTKDGKMPSEIAKRNKHHEIFNLLSFTLNPLEGKLQQLTKEDTICKILTTDSDREKDHIFSSYTAFGDLEVFLHGLGLEHMTDLLKERDITLRHLLTMREDEFTKNGITSKDQQKILAALKELQVEEIQFGELSEETKLEISGDEFLNFLLKLNKQCGHLITAVQNVITELPVNSQKNFTSVCEELVNNVEDLSEKVCKLKDLIQKLQNERENDPTHIQLREEVSTWNSRILKRTAITICGFGFLLFICKLTFQRK

SEQ ID NO: 19514 - protein, 329 aa, Homo sapiens
MSVLEENRPFAQQLSNVYFTILSLFCFKLFVKISLAILSHFYIVKGNRKEAARIAAEFYGVTQGQGSWADRSPLHEAASQGRLLALRTLLSQGYNVNAVTLDHVTPLHEACLGDHVACARTLLEAGANVNAITIDGVTPLFNACSQGSPSCAELLLEYGAKAQLESCLPSPTHEAASKGHHECLDILISWGIDVDQEIPHLGTPLYVACMSQQFHCIWKLLYAGADVQKGKYWDTPLHAAAQQSSTEIVNLLLEFGADINAKNTELLRPIDVATSSSMVERILLQHEATPSSLYQLCRLCIRSYIGKPRLHLIPQLQLPTLLKNFLQYR

SEQ ID NO: 19515 - protein, 276 aa, Homo sapiens
MPLCNGGNLAVTGSWADRSPLHEAASQGRLLALRTLLSQGYNVNAVTLDHVTPLHEACLGDHVACARTLLEAGANVNAITIDGVTPLFNACSQGSPSCAELLLEYGAKAQLESCLPSPTHEAASKGHHECLDILISWGIDVDQEIPHLGTPLYVACMSQQFHCIWKLLYAGADVQKGKYWDTPLHAAAQQSSTEIVNLLLEFGADINAKNTELLRPIDVATSSSMVERILLQHEATPSSLYQLCRLCIRSYIGKPRLHLIPQLQLPTLLKNFLQYR

SEQ ID NO: 19516 - protein, 236 aa, Homo sapiens
MESSAKMESGGAGQQPQPQPQQPFLPPAACFFATAAAAAAAAAAAAAQSAQQQQQQQQQQQQAPQLRPAADGQPSGGGHKSAPKQVKRQRSSSPELMRCKRRLNFSGFGYSLPQQQPAAVARRNERERNRVKLVNLGFATLREHVPNGAANKKMSKVETLRSAVEYIRALQQLLDEHDAVSAAFQAGVLSPTISPNYSNDLNSMAGSPVSSYSSDEGSYDPLSPEEQELLDFTNWF

SEQ ID NO: 19517 - protein, 372 aa, Homo sapiens
MAAPVPWACCAVLAAAAAVVYAQRHSPQEAPHVQYERLGSDVTLPCGTANWDAAVTWRVNGTDLAPDLLNGSQLVLHGLELGHSGLYACFHRDSWHLRHQVLLHVGLPPREPVLSCRSNTYPKGFYCSWHLPTPTYIPNTFNVTVLHGSKIMVCEKDPALKNRCHIRYMHLFSTIKYKVSISVSNALGHNATAITFDEFTIVKPDPPENVVARPVPSNPRRLEVTWQTPSTWPDPESFPLKFFLRYRPLILDQWQHVELSDGTAHTITDAYAGKEYIIQVAAKDNEIGTWSDWSVAAHATPWTEEPRHLTTEAQAAETTTSTTSSLAPPPTTKICDPGELGSGGGPSAPFLVSVPITLALAAAAATASSLLI

SEQ ID NO: 19518 - protein, 346 aa, Homo sapiens
MARKSNLPVLLVPFLLCQALVRCSSPLPLVVNTWPFKNATEAAWRALASGGSALDAVESGCAMCEREQCDGSVGFGGSPDELGETTLDAMIMDGTTMDVGAVGDLRRIKNAIGVARKVLEHTTHTLLVGESATTFAQSMGFINEDLSTTASQALHSDWLARNCQPNYWRNVIPDPSKYCGPYKPPGILKQDIPIHKETEDDRGHDTIGMVVIHKTGHIAAGTSTNGIKFKIHGRVGDSPIPGAGAYADDTAGAAAATGNGDILMRFLPSYQAVEYMRRGEDPTIACQKVISRIQKHFPEFFGAVICANVTGSYGAACNKLSTFTQFSFMVYNSEKNQPTEEKVDCI

SEQ ID NO: 19519 - protein, 461 aa, Homo sapiens
MEKKCTLNFLVLLPFFMILVTAELEESPEDSIQLGVTRNKIMTAQYECYQKIMQDPIQQAEGVYCNRTWDGWLCWNDVAAGTESMQLCPDYFQDFDPSEKVTKICDQDGNWFRHPASNRTWTNYTQCNVNTHEKVKTALNLFYLTIIGHGLSIASLLISLGIFFYFKSLSCQRITLHKNLFFSFVCNSVVTIIHLTAVANNQALVATNPVSCKVSQFIHLYLMGCNYFWMLCEGIYLHTLIVVAVFAEKQHLMWYYFLGWGFPLIPACIHAIARSLYYNDNCWISSDTHLLYIIHGPICAALLVNLFFLLNIVRVLITKLKVTHQAESNLYMKAVRATLILVPLLGIEFVLIPWRPEGKIAEEVYDYIMHILMHFQGLLVSTIFCFFNGEVQAILRRNWNQYKIQFGNSFSNSEALRSASYTVSTISDGPGYSHDCPSEHLNGKSIHDIENVLLKPENLYN

SEQ ID NO: 19520 - protein, 474 aa, Homo sapiens [sequence omitted]

SEQ ID NO: 19521 - protein, 490 aa, Homo sapiens [sequence omitted]

SEQ ID NO: 19522 - protein, 427 aa, Homo sapiens [sequence omitted]

SEQ ID NO: 19523 - protein, 443 aa, Homo sapiens
MMDAQYKCYDRMQQLPAYQGEGPYCNRTWDGWLCWDDTPAGVLSYQFCPDYFPDFDPSEKVTKYCDEKGVWFKHPENNRTWSNYTMCNAFTPEKLKNAYVLYYLAIVGHSLSIFTLVISLGIFVFFRKLTTIFPLNWKYRKALSLGCQRVTLHKNMFLTYILNSMIIIIHLVEVVPNGELVRRDPVSCKILHFFHQYMMACNYFWMLCEGIYLHTLIVVAVFTEKQRLRWYYLLGWGFPLVPTTIHAITRAVYFNDNCWLSVETHLLYIIHGPVMAALVVNFFFLLNIVRVLVTKMRETHEAESHMYLKAVKATMILVPLLGIQFVVFPWRPSNKMLGKIYDYVMHSLIHFQGFFVATIYCFCNNEVQTTVKRQWAQFKIQWNQRWGRRPSNRSARAAAAAAEAGDIPIYICHQEPRNEPANNQGEESAEIIPLNIIEQESSA

SEQ ID NO: 19524 - protein, 274 aa, Homo sapiens
MRFTFTSRCLALFLLLNHPTPILPAFSNQTYPTIEPKPFLYVVGRKKMMDAQYKCYDRMQQLPAYQGEGPYCNRTWDGWLCWDDTPAGVLSYQFCPDYFPDFDPSEKVTKYCDEKGVWFKHPENNRTWSNYTMCNAFTPEKLKNAYVLYYLAIVGHSLSIFTLVISLGIFVFFRSLGCQRVTLHKNMFLTYILNSMIIIIHLVEVVPNGELVRRDPVSCKILHFFHQYMMACNYFWMLCEGIYLHTLIVVAVFTEKQRLRWYYLLGWAPAFHRD

SEQ ID NO: 19525 - protein, 290 aa, Homo sapiens
MRFTFTSRCLALFLLLNHPTPILPAFSNQTYPTIEPKPFLYVVGRKKMMDAQYKCYDRMQQLPAYQGEGPYCNRTWDGWLCWDDTPAGVLSYQFCPDYFPDFDPSEKVTKYCDEKGVWFKHPENNRTWSNYTMCNAFTPEKLKNAYVLYYLAIVGHSLSIFTLVISLGIFVFFRKLTTIFPLNWKYRKALSLGCQRVTLHKNMFLTYILNSMIIIIHLVEVVPNGELVRRDPVSCKILHFFHQYMMACNYFWMLCEGIYLHTLIVVAVFTEKQRLRWYYLLGWAPAFHRD

SEQ ID NO: 19526 - protein, 392 aa, Homo sapiens
MAAAALGQIWARKLLSVPWLLCGPRRYASSSFKAADLQLEMTQKPHKKPGPGEPLVFGKTFTDHMLMVEWNDKGWGQPRIQPFQNLTLHPASSSLHYSLQLFEGMKAFKGKDQQVRLFRPWLNMDRMLRSAMRLCLPSFDKLELLECIRRLIEVDKDWVPDAAGTSLYVRPVLIGNEPSLGVSQPTRALLFVILCPVGAYFPGGSVTPVSLLADPAFIRAWVGGVGNYKLGGNYGPTVLVQQEALKRGCEQVLWLYGPDHQLTEVGTMNIFVYWTHEDGVLELVTPPLNGVILPGVVRQSLLDMAQTWGEFRVVERTITMKQLLRALEEGRVREVFGSGTACQVCPVHRILYKDRNLHIPTMENGPELILRFQKELKEIQYGIRAHEWMFPV

SEQ ID NO: 19527 - protein, 300 aa, Homo sapiens
MAAAALGQLFEGMKAFKGKDQQVRLFRPWLNMDRMLRSAMRLCLPSFDKLELLECIRRLIEVDKDWVPDAAGTSLYVRPVLIGNEPSLGVSQPTRALLFVILCPVGAYFPGGSVTPVSLLADPAFIRAWVGGVGNYKLGGNYGPTVLVQQEALKRGCEQVLWLYGPDHQLTEVGTMNIFVYWTHEDGVLELVTPPLNGVILPGVVRQSLLDMAQTWGEFRVVERTITMKQLLRALEEGRVREVFGSGTACQVCPVHRILYKDRNLHIPTMENGPELILRFQKELKEIQYGIRAHEWMFPV

SEQ ID NO: 19528 - protein, 134 aa, Homo sapiens
MIPVRGLWYCYLQVKKVRLREAERLGPKSQCPAECGAASWISWVLQHQQLLASEWATKDGRGTWGSKPSCTVPALSATSQLLQLGRLNSDLQFVRQRAKKSVSSPSLLQFWCCLSRLSFHALNQKINSTNINIT

SEQ ID NO: 19529 - protein, 467 aa, Homo sapiens
MDRRKKPLDVTASSLVDLKAELFRKQEEFKQEKLLKDSGVFGKPKTTNKKPSIWSKQNVGVSNRAEKDAEQKIEEQKTLDKAREKLEEKAKLYEKMTKGDFIDEEVEDMYLVDFTQKIIDKRKEMEASGAHRDSQKAGERDDDEENLPEGEIPPPQDPSEEWVDYVDSLGRSRRCMRKDLPDLLEMDKNLQGRLFISPANEKTLLSEDMRKELQRQQWEEEEREALKRPMGPVHYEDIRENEARQLGVGYFAFARDKELRNKQMKTLEMLREQTTDQRTKRENIKEKRKAILEARLAKLRQKKMKKSKEGGTEEENRDGDVIGPLPPEPEAVPTPRPAAQSSKVEVIVQERKDTKPGVPHIREWDRGKEFSFGYWSKRQSDLRAERDPEFAPPSDYFVGQKRTGFSSSQAWSRPGPAQSDPGQCPDQSHGPSPEHTSPTPAPDNPPQAPTVTFKTLDDMISYYKQVT

SEQ ID NO: 19530 - protein, 128 aa, Homo sapiens
MYKSWTLGDPKEKEGVGNILEETKRTQNNTEQASRAINSPLQSPYTDSMKALAISSHWFLPQIHTLPPITKATRHRWPPACCGRRGGQTTLPPLTPIVRACESMERSCPGNYPMQHERKVMQRHPTLR

SEQ ID NO: 19531 - protein, 104 aa, Homo sapiens
MYKSWTLGDPKEKEGVGNILEETKRTQNNTEQASRAINSPLQSPYTDSMKALAISSHWFLPQIHTLPPITKATRHRWPPACCGRRGGQTTLPPLTPIVRASNTQ

SEQ ID NO: 19532 - protein, 167 aa, Homo sapiens
MPSQSACPVLSTAPGTPCDLRKHLLNMVSEEKRSPQLSAKTWRRGLRLQKRRNALFLPEGDICVVGSTSGARALIPETSKLERSGTVIAYCNLELLASSDPPVWASQSTGMTGMSYRSQPQLGFKSTPPAHSSVFHHSVKAPKEDQAQEAASRPLTSQDGWNPNIKK

SEQ ID NO: 19533 - protein, 68 aa, Homo sapiens
MCLYCWDIEPSQVNPEGPRQHHPSEVTERQLANKRIQNMQHLKKEKRRLNKRFSRPSPIPEPGLLWSS

SEQ ID NO: 19534 - protein, 153 aa, Homo sapiens
MEPLYQAGSILMTVNTLQGKKMIESGLQSGDFSLSQSWPSCLPPPADLEILQQKVAGVQRELEDFKKEALKSIHYLEDAFCEMNGALVQQEEQAARVRQRLREEEDRGIVRNKVLTFLLPREKQLREHCKRLEDLLLDRGRDALRATKKSQAD

SEQ ID NO: 19535 - protein, 199 aa, Homo sapiens
MEDAAAPGRTEGVLERQGAPPAAGQGGALVELTPTPGGLALVSPYHTHRAGDPLDLVALAEQVQKADEFIRANATNKLTVIAEQIQHLQEQARKVLEDAHRDANLHHVACNIVKKPGNIYYLYKRESGQQYFSIISPKEWGTSCPHDFLGAYKLQHDLSWTPYEDIEKQDAKISMMDTLLSQSVALPPCTEPNFQGLTH

SEQ ID NO: 19536 - protein, 201 aa, Homo sapiens
MEADIQLMRLIQEMRAEIHKLEKENQALRMKLTASSQRASGSGRESGDEREEEAPGQSPATLQGAVSTDAAPAVQEHQGNVMIVRRYSISSSVCSSAVNDPWKSGKSHPKSGILEGQRTLKSLACSPIKKQDMEEKVFATDSLTSNRTSQRASPEHVCGCRDKTKAVSFLLPMDMSSYSKNSSSLKHSPNQATNQLSIIAE

SEQ ID NO: 19537 - protein, 274 aa, Homo sapiens
MPRAEPRATLGEQEKAGLPLGAWRLYLLRHFRKQTELRRSGSRDVTGALLVAAAVASEAVGSLRVAEGGPNTLLLQVLRSWPWCNKELKTMEERKVKRRSPKSFSAHCTQVVNAKKNAIPVSKSTGFSNPASQSTSQRPKLKRVMKEKTKPQGGEGKGAQSTPIQHSFLTDVSDVQEMERGLLSLLNDFHSGKLQAFGNECSIEQMEHVRGMQEKLARLNLELYGELEELPEDKRKTASDSNLDRLLSDLEELNSSIQKLHLADAQDVPNTSAS

SEQ ID NO: 19538 - protein, 200 aa, Homo sapiens
MDDKKKKRSPKPCLAQPAQAPGTLRRVPVPTSHSGSLALGLPHLPSPKQRAKFKRVGKEKCRPVLAGGGSGSAGTPLQHSFLTEVTDVYEMEGGLLNLLNDFHSGRLQAFGKECSFEQLEHVREMQEKLARLHFSLDVCGEEEDDEEEEDGVTEGLPEEQKKTMADRNLDQLLSNLEDLSNSIQKLHLAENAEPEEQSAA

SEQ ID NO: 19539 - protein, 241 aa, Homo sapiens
MDDKKKKRSPKPCLAQPAQAPGTLRRVPVPTSHSGSLALGLPHLPSPKQRAKFKRVGKEKCRPVLAGGGSGSAGTPLQHSFLTEVTDVYEMEGGLLNLLNDFHSGRLQAFGKECSFEQLEHVREMQEKLARLHFSLDVCGEEEDDEEEEDGVTEGLPEEQKKTMADRNLDQLLSNLEDLSNSMYPFQGTRLCVCVPERSVSSSPALQEYSHTTNFPTSCSPVRFSHRLPKPRYRNLEFPQN

SEQ ID NO: 19540 - protein, 92 aa, Homo sapiens
MKLCVTVLSLLVLVAAFCSLALSAPMGSDPPTACCFSYTARKLPRNFVVDYYETSSLCSQPAVVFQTKRGKQVCADPSESWVQEYVYDLELN

SEQ ID NO: 19541 - protein, 87 aa, Homo sapiens
MKLCVTVLSLLVLVAAFCSLALSAPMGSDPPTACCFSYTARKLPRNFVVDYYETSSLCSQPAVVGKQVCADPSESWVQEYVYDLELN

SEQ ID NO: 19542 - protein, 96 aa, Homo sapiens
MKLCVTVLSLLVLVAAFCSLALSAPMGSDPPTACCFSYTARKLPRNFVVDYYETSSLCSQPAVVAAPGRIPSTRAAPHGPWSGRGRCLPQARDKAR

SEQ ID NO: 19543 - protein, 103 aa, Homo sapiens
MKLCVTVLSLLVLVAAFCSLALSAPMGSDPPTACCFSYTARKLPRNFVVDYYETSSLCSQPAVVEWKLQGVCFQCCSGKDPIHQSCPTWTMVRQRKMPTTGKG

SEQ ID NO: 19544 - protein, 64 aa, Homo sapiens
MKLCVTVLSLLVLVAAFCSLALSAPMGSDPPTACCFSYTARKLPRNFVVDYYETSSLCSQPAVV

SEQ ID NO: 19545 - protein, 86 aa, Homo sapiens
MKLCVTVLSLLVLVAAFCSLALSAPMGSDPPTACCFSYTARKLPRNFVVDYYETSSLCSQPAVVAAPHGPWSGRGRCLPQARDKAR

SEQ ID NO: 19546 - protein, 47 aa, Homo sapiens
MKLCVTVLSLLVLVAAFCSLALSAPKASKSALTPVSPGSRSTCMTWN

SEQ ID NO: 19547 - protein, 52 aa, Homo sapiens
MKLCVTVLSLLVLVAAFCSLALSAPNSKPKEASKSALTPVSPGSRSTCMTWN

SEQ ID NO: 19548 - protein, 68 aa, Homo sapiens
MKLCVTVLSLLVLVAAFCSLALSAPTKSSEWKLQGVCFQCCSGKDPIHQSCPTWTMVRQRKMPTTGKG

SEQ ID NO: 19549 - protein, 103 aa, Homo sapiens
MKLCVTVLSLLVLVAAFCSLALSAPMGSDPPTACCFSYTARKLPRNFVVDYYETSSLCSQPAVVYRESASSAAPGRIPSTRAAPHGPWSGRGRCLPQARDKAR

SEQ ID NO: 19550 - protein, 235 aa, Homo sapiens
MRRSMKRRRRRRPVAPATAARGGDFRAEDGAGLEAREEKVVYSRSQLSLADSTKALGDAFKLFMPRSTEFMSSDAELWSFLCSLKHQFSPHILRSKDVYGYSSCRALVPDPPGPPTARGQARRPVPRAAARRRRRGARAAAARRRKPRPPPPPPPPPEESCPAKPVAPGPCFGGRTLEEIWRAATPTLTTFPTIRVGSDVWGERSLAAARRRARQVLRVNLEPMVRLRRFPVPRA

SEQ ID NO: 19551 - protein, 320 aa, Homo sapiens
MRRSMKRRRRRRPVAPATAARGGDFRAEDGAGLEAREEKVVYSRSQLSLADSTKALGDAFKLFMPRSTEFMSSDAELWSFLCSLKHQFSPHILRSKDVYGYSPYSPRPGAPAGSARSGQEEAPRSPGGRCPQEEAPAATPTAAAPRGELPGQARGPRALLRGPHLGGDLEGGHPDADHLPHHPRRQRRVGRAQPGGSAAQGAPGPASEPGTHGEAPPLPGAPGMRCGLQGASCRPRPWDRPSARRNEQVSVECLQIRPGPRPPMHFTREEVAGWLSLSRAAARSSWTLGQVCPLLPPVPGLRREGTAGPAGEVPFFLTTD

SEQ ID NO: 19552 - protein, 419 aa, Homo sapiens
MAKPAATAAAASEELSQVPDEELLRWSKEELARRLRRAEGEKVGLMLEHGGLMRDVNRRLQQHLLEIRGLKDVNQRLQDDNQELRELCCFLDDDRQKGRKLAREWQRFGRHAAGAVWHEVARSQQKLRELEARQEALLRENLELKELVLLLDEERAALAATGAASGGGGGGGGAGSRSSIDSQASLSGPLSGGAPGAGARDVGDGSSTSSAGSGGSPDHHHHVPPPLLPPGPHKAPDGKAGATRRSLDDLSAPPHHRSIPNGLHDPSSTYIRQLESKVRLLEGDKLLAQQAGSGEFRTLRKGFSPYHSESQLASLPPSYQDSLQNGPACPAPELPSPPSAGYSPAGQKPEAVVHAMKVLEVHENLDRQLQDSCEEDLSEKEKAIVREMCNVVWRKLGDAASSKPSIRQHLSGNQFKGPL

SEQ ID NO: 19553 - protein, 501 aa, Homo sapiens
MPFGCVTLGDKKNYNQPSEVTDRYDLGQVIKTEEFCEIFRAKDKTTGKLHTCKKFQKRDGRKVRKAAKNEIGILKMVKHPNILQLVDVFVTRKEYFIFLELATGREVFDWILDQGYYSERDTSNVVRQVLEAVAYLHSLKIVHRNLKLENLVYYNRLKNSKIVISDFHLAKLENGLIKEPCGTPEYLAPEVVGRQRYGRPVDCWAIGVIMYILLSGNPPFYEEVEEDDYENHDKNLFRKILAGDYEFDSPYWDDISQAAKDLVTRLMEVEQDQRITAEEAISHEWISGNAASDKNIKDGVCAQIEKNFARAKWKKAVRVTTLMKRLRAPEQSSTAAAQSASATDTATPGAAGGATAAAASGATSAPEGDAARAAKSDNVAPADRSATPATDGSATPATDGSVTPATDGSITPATDGSVTPATDRSATPATDGRATPATEESTVPTTQSSAMLATKAAATPEPAMAQPDSTAPEGATGQAPPSSKGEEAAGYAQESQREEAS

SEQ ID NO: 19554 - protein, 473 aa, Homo sapiens
MPFGCVTLGDKKNYNQPSEVTDRYDLGQVIKTEEFCEIFRAKDKTTGKLHTCKKFQKRDGRKVRKAAKNEIGILKMVKHPNILQLVDVFVTRKEYFIFLELATGREVFDWILDQGYYSERDTSNVVRQVLEAVAYLHSLKIVHRNLKLENLVYYNRLKNSKIVISDFHLAKLENGLIKEPCGTPEYLGNPPFYEEVEEDDYENHDKNLFRKILAGDYEFDSPYWDDISQAAKDLVTRLMEVEQDQRITAEEAISHEWISGNAASDKNIKDGVCAQIEKNFARAKWKKAVRVTTLMKRLRAPEQSSTAAAQSASATDTATPGAAGGATAAAASGATSAPEGDAARAAKSDNVAPADRSATPATDGSATPATDGSVTPATDGSITPATDGSVTPATDRSATPATDGRATPATEESTVPTTQSSAMLATKAAATPEPAMAQPDSTAPEGATGQAPPSSKGEEAAGYAQESQREEAS

SEQ ID NO: 19555 - protein, 470 aa, Homo sapiens
MPFGCVTLGDKKNYNQPSEVTDRYDLGQVIKTEEFCEIFRAKDKTTGKLHTCKKFQKRDGRKVRKAAKNEIGILKMVKHPNILQLVDVFVTRKEYFIFLELATGREVFDWILDQGYYSERDTSNVVRQVLEAVAYLHSLKIVHRNLKLENLVYYNRLKNSKIVISDFHLAKLENGLIKEPCGTPEYLAPEVVGRQRYGRPVDCWAIGVIMYILLSGNPPFYEEVEEDDYENHDKNLFRKILAGDYEFDSPYWDDISQAAKDLVTRLMEVEQDQRITAEEAISHEWISGNAASDKNIKDGVCAQIEKNFARAKWKKAVRVTTLMKRLRAPEQSSTAAAQSASATDTATPGAADRSATPATDGSATPATDGSVTPATDGSITPATDGSVTPATDRSATPATDGRATPATEESTVPTTQSSAMLATKAAATPEPAMAQPDSTAPEGATGQAPPSSKGEEAAGYAQESQREEAS

SEQ ID NO: 19556 - protein, 293 aa, Homo sapiens
MSSASGLRRGHPAGGEENMTETDAFYKREMFDPAEKYKMDHRRRGIALIFNHERFFWHLTLPERRGTCADRDNLTRRFSDLGFEVKCFNDLKAEELLLKIHEVSTVSHADADCFVCVFLSHGEGNHIYAYDAKIEIQTLTGLFKGDKCHSLVGKPKIFIIQACRGNQHDVPVIPLDVVDNQTEKLDTNITEVDAASVYTLPAGADFLMCYSVAEGYYSHRETVNGSWYIQDLCEMLGKYGSSLEFTELLTLVNRKVSQRRVDFCKDPSAIGKKQVPCFASMLTKKLHFFPKSN

SEQ ID NO: 19557 - protein, 204 aa, Homo sapiens
MSSASGLRRGHPAVSTVSHADADCFVCVFLSHGEGNHIYAYDAKIEIQTLTGLFKGDKCHSLVGKPKIFIIQACRGNQHDVPVIPLDVVDNQTEKLDTNITEVDAASVYTLPAGADFLMCYSVAEGYYSHRETVNGSWYIQDLCEMLGKYGSSLEFTELLTLVNRKVSQRRVDFCKDPSAIGKKQVPCFASMLTKKLHFFPKSN

SEQ ID NO: 19558 - protein, 1249 aa, Homo sapiens
MVEAAPPGPGPLRRTFLVPEIKSLDQYDFSRAKAAASLAWVLRAAFGGAEHVPPELWEPFYTDQYAQEHVKPPVTRLLLSAELYCRAWRQALPQLETPPNPSALLALLARRGTVPALPERPVREADLRHQPILMGAHLAVIDALMAAFAFEWTKTLPGPLALTSLEHKLLFWVDTTVRRLQEKTEQEAAQRASPAAPADGAAPAQPSIRYRKDRVVARRAPCFPTVTSLQDLASGAALAATIHCYCPQLLRLEEVCLKDPMSVADSLYNLQLVQDFCASRLPRGCPLSLEDLLYVPPPLKVNLVVMLAELFMCFEVLKPDFVQVKDLPDGHAASPRGTEASPPQNNSGSSSPVFTFRHPLLSSGGPQSPLRGSTGSLKSSPSMSHMEALGKAWNRQLSRPLSQAVSFSTPFGLDSDVDVVMGDPVLLRSVSSDSLGPPRPAPARTPTQPPPEPGDLPTIEEALQIIHSAEPRLLPDGAADGSFYLHSPEGPSKPSLASPYLPEGTSKPLSDRPTKAPVYMPHPETPSKPSPCLVGEASKPPAPSEGSPKAVASSPAATNSEVKMTSFAERKKQLVKAEAEAGAGSPTSTPAPPEALSSEMSELSARLEEKRRAIEAQKRRIEAIFAKHRQRLGKSAFLQVQPREASGEAEAEAEEADSGPVPGGERPAGEGQGEPTSRPKAVTFSPDLGPVPHEGLGEYNRAVSKLSAALSSLQRDMQRLTDQQQRLLAPPEAPGSAPPPAAWVIPGPTTGPKAASPSPARRVPATRRSPGPGPSQSPRSPKHTRPAELRLAPLTRVLTPPHDVDSLPHLRKFSPSQVPVQTRSSILLAEETPPEEPAARPGLIEIPLGSLADPAAEDEGDGSPAGAEDSLEEEASSEGEPRVGLGFFYKDEDKPEDEMAQKRASLLERQQRRAEEARRRKQWQEVEKEQRREEAARLAQEEAPGPAPLVSAVPMATPAPAARAPAEEEVGPRKGDFTRQEYERRAQLKLMDDLDKVLRPRAAGSGGPGRGGRRATRPRSGCCDDSALARSPARGLLGSRLSKIYSQSTLSLSTVANEAHNNLGVKRPTSRAPSPSGLMSPSRLPGSRERDWENGSNASSPASVPEYTGPRLYKEPSAKSNKFIIHNALSHCCLAGKVNEPQKNRILEEIEKSKANHFLILFRDSSCQFRALYTLSGETEELSRLAGYGPRTVTPAMVEGIYKYNSDRKRFTQIPAKTMSMSVDAFTIQGHLWQGKKPTTPKKGGGTPK

SEQ ID NO: 19559 - protein, 1276 aa, Homo sapiens
MVEAAPPGPGPLRRTFLVPEIKSLDQYDFSRAKAAASLAWVLRAAFGGAEHVPPELWEPFYTDQYAQEHVKPPVTRLLLSAELYCRAWRQALPQLETPPNPSALLALLARRGTVPALPERPVREADLRHQPILMGAHLAVIDALMAAFAFEWTKTLPGPLALTSLEHKLLFWVDTTVRRLQEKTEQEAAQRASPAAPADGAAPAQPSCPTRWYWKLVPHAIAFCLKESGSKPPMIRYRKDRVVARRAPCFPTVTSLQDLASGAALAATIHCYCPQLLRLEEVCLKDPMSVADSLYNLQLVQDFCASRLPRGCPLSLEDLLYVPPPLKVNLVVMLAELFMCFEVLKPDFVQVKDLPDGHAASPRGTEASPPQNNSGSSSPVFTFRHPLLSSGGPQSPLRGSTGSLKSSPSMSHMEALGKAWNRQLSRPLSQAVSFSTPFGLDSDVDVVMGDPVLLRSVSSDSLGPPRPAPARTPTQPPPEPGDLPTIEEALQIIHSAEPRLLPDGAADGSFYLHSPEGPSKPSLASPYLPEGTSKPLSDRPTKAPVYMPHPETPSKPSPCLVGEASKPPAPSEGSPKAVASSPAATNSEVKMTSFAERKKQLVKAEAEAGAGSPTSTPAPPEALSSEMSELSARLEEKRRAIEAQKRRIEAIFAKHRQRLGKSAFLQVQPREASGEAEAEAEEADSGPVPGGERPAGEGQGEPTSRPKAVTFSPDLGPVPHEGLGEYNRAVSKLSAALSSLQRDMQRLTDQQQRLLAPPEAPGSAPPPAAWVIPGPTTGPKAASPSPARRVPATRRSPGPGPSQSPRSPKHTRPAELRLAPLTRVLTPPHDVDSLPHLRKFSPSQVPVQTRSSILLAEETPPEEPAARPGLIEIPLGSLADPAAEDEGDGSPAGAEDSLEEEASSEGEPRVGLGFFYKDEDKPEDEMAQKRASLLERQQRRAEEARRRKQWQEVEKEQRREEAARLAQEEAPGPAPLVSAVPMATPAPAARAPAEEEVGPRKGDFTRQEYERRAQLKLMDDLDKVLRPRAAGSGGPGRGGRRATRPRSGCCDDSALARSPARGLLGSRLSKIYSQSTLSLSTVANEAHNNLGVKRPTSRAPSPSGLMSPSRLPGSRERDWENGSNASSPASVPEYTGPRLYKEPSAKSNKFIIHNALSHCCLAGKVNEPQKNRILEEIEKSKANHFLILFRDSSCQFRALYTLSGETEELSRLAGYGPRTVTPAMVEGIYKYNSDRKRFTQIPAKTMSMSVDAFTIQGHLWQGKKPTTPKKGGGTPK

SEQ ID NO: 19560 - protein, 303 aa, Homo sapiens
MADDQGCIEEQGVEDSANEDSVDAKPDRSSFVPSLFSKKKKNVTMRSIKTTRDRVPTYQYNMNFEKLGKCIIINNKNFDKVTGMGVRNGTDKDAEALFKCFRSLGFDVIVYNDCSCAKMQDLLKKASEEDHTNAACFACILLSHGEENVIYGKDGVTPIKDLTAHFRGDRCKTLLEKPKLFFIQACRGTELDDGIQADSGPINDTDANPRYKIPVEADFLFAYSTVPGYYSWRSPGRGSWFVQALCSILEEHGKDLEIMQILTRVNDRVARHFESQSDDPHFHEKKQIPCVVSMLTKELYFSQ

SEQ ID NO: 19561 - protein, 253 aa, Homo sapiens
MADDQGCIEEQGVEDSANEDSVDAKPDRSSFVPSLFSKKKKNVTMRSIKTTRDRVPTYQYNMNFEKLGKCIIINNKNFDKVTGMGVRNGTDKDAEALFKCFRSLGFDVIVYNDCSCAKMQDLLKKASEEDHTNAACFACILLSHGEENMESCSVTQAGVQRRDLGRLQPPPPRLAEGPSLMMASRPTRGPSMTQMLILDTRSQWKLTSSSPIPRFQAITRGGAQEEAPGLCKPSAPSWRSTEKTWKSCRSSPG

SEQ ID NO: 19562 - protein, 336 aa, Homo sapiens
MDCVGWPPGRKWHLEKNTSCGGSSGICASYVTQMADDQGCIEEQGVEDSANEDSVDAKPDRSSFVPSLFSKKKKNVTMRSIKTTRDRVPTYQYNMNFEKLGKCIIINNKNFDKVTGMGVRNGTDKDAEALFKCFRSLGFDVIVYNDCSCAKMQDLLKKASEEDHTNAACFACILLSHGEENVIYGKDGVTPIKDLTAHFRGDRCKTLLEKPKLFFIQACRGTELDDGIQADSGPINDTDANPRYKIPVEADFLFAYSTVPGYYSWRSPGRGSWFVQALCSILEEHGKDLEIMQILTRVNDRVARHFESQSDDPHFHEKKQIPCVVSMLTKELYFSQ

SEQ ID NO: 19563 - protein, 278 aa, Homo sapiens
MQRGLFSDGDTSKKKKNVTMRSIKTTRDRVPTYQYNMNFEKLGKCIIINNKNFDKVTGMGVRNGTDKDAEALFKCFRSLGFDVIVYNDCSCAKMQDLLKKASEEDHTNAACFACILLSHGEENVIYGKDGVTPIKDLTAHFRGDRCKTLLEKPKLFFIQACRGTELDDGIQADSGPINDTDANPRYKIPVEADFLFAYSTVPGYYSWRSPGRGSWFVQALCSILEEHGKDLEIMQILTRVNDRVARHFESQSDDPHFHEKKQIPCVVSMLTKELYFSQ

SEQ ID NO: 19564 - protein, 162 aa, Homo sapiens
MGLETEKADVQLFMDDDSYSHHSGLEYADPEKFADSDQDRDPHRLNSHLKLGFEDVIAEPVTTHSFDKVWICSHALFEISKYVMYKFLTVFLAIPLAFIAGILFATLSCLHIWILMPFVKTCLMVLPSVQTIWKSVTDVIIAPLCTSVGRCFSSVSLQLSQD

SEQ ID NO: 19565 - protein, 149 aa, Homo sapiens
MDDDSYSHHSGLEYADPEKFADSDQDRDPHRLNSHLKLGFEDVIAEPVTTHSFDKVWICSHALFEISKYVMYKFLTVFLAIPLAFIAGILFATLSCLHIWILMPFVKTCLMVLPSVQTIWKSVTDVIIAPLCTSVGRCFSSVSLQLSQD

SEQ ID NO: 19566 - protein, 112 aa, Homo sapiens
MGLETEKADVQLFMDDDSYSHHSGLEYADPEKFADSDQDRDPHRLNSHLKDFNAFCKDLPNGSAFSADNMEECDRCYHCSIVYERRTMLLFCQPATEPGLNTWTPGLEIGIL

SEQ ID NO: 19567 - protein, 416 aa, Homo sapiens
MDEADRRLLRRCRLRLVEELQVDQLWDALLSRELFRPHMIEDIQRAGSGSRRDQARQLIIDLETRGSQALPLFISCLEDTGQDMLASFLRTNRQAAKLSKPTLENLTPVVLRPEIRKPEVLRPETPRPVDIGSGGFGDVGALESLRGNADLAYILSMEPCGHCLIINNVNFCRESGLRTRTGSNIDCEKLRRRFSSLHFMVEVKGDLTAKKMVLALLELAQQDHGALDCCVVVILSHGCQASHLQFPGAVYGTDGCPVSVEKIVNIFNGTSCPSLGGKPKLFFIQACGGEQKDHGFEVASTSPEDESPGSNPEPDATPFQEGLRTFDQLDAISSLPTPSDIFVSYSTFPGFVSWRDPKSGSWYVETLDDIFEQWAHSEDLQSLLLRVANAVSVKGIYKQMPGCFNFLRKKLFFKTS

SEQ ID NO: 19568 - protein, 266 aa, Homo sapiens
MDEADRRLLRRCRLRLVEELQVDQLWDALLSRELFRPHMIEDIQRAGSGSRRDQARQLIIDLETRGSQALPLFISCLEDTGQDMLASFLRTNRQAAKLSKPTLENLTPVVLRPEIRKPEVLRPETPRPVDIGSGGFGDVEQKDHGFEVASTSPEDESPGSNPEPDATPFQEGLRTFDQLDAISSLPTPSDIFVSYSTFPGFVSWRDPKSGSWYVETLDDIFEQWAHSEDLQSLLLRVANAVSVKGIYKQMPGCFNFLRKKLFFKTS

SEQ ID NO: 19569 - protein, 154 aa, Homo sapiens
MDEADRRLLRRCRLRLVEELQVDQLWDALLSRELFRPHMIEDIQRAGSGSRRDQARQLIIDLETRGSQALPLFISCLEDTGQDMLASFLRTNRQAAKLSKPTLENLTPVVLRPEIRKPEVLRPETPRPVDIGSGGFGDVGALESLRGNADLTVL

SEQ ID NO: 19570 - protein, 333 aa, Homo sapiens
MLASFLRTNRQAAKLSKPTLENLTPVVLRPEIRKPEVLRPETPRPVDIGSGGFGDVGALESLRGNADLAYILSMEPCGHCLIINNVNFCRESGLRTRTGSNIDCEKLRRRFSSLHFMVEVKGDLTAKKMVLALLELAQQDHGALDCCVVVILSHGCQASHLQFPGAVYGTDGCPVSVEKIVNIFNGTSCPSLGGKPKLFFIQACGGEQKDHGFEVASTSPEDESPGSNPEPDATPFQEGLRTFDQLDAISSLPTPSDIFVSYSTFPGFVSWRDPKSGSWYVETLDDIFEQWAHSEDLQSLLLRVANAVSVKGIYKQMPGCFNFLRKKLFFKTS

SEQ ID NO: 19571 - protein, 226 aa, Homo sapiens
MKVLILACLVALALARETIESLSSSEESITEYKQKVEKVKHEDQQQGEDEHQDKIYPSFQPQPLIYPFVEPIPYGFLPQNILPLAQPAVVLPVPQPEIMEVPKAKDTVYTKGRVMPVLKSPTIPFFDPQIPKLTDLENLHLPLPLLQPLMQQVPQPIPQTLALPPQPLWSVPQPKVLPIPQQVVPYPQRAVPVQALLLNQELLLNPTHQIYPVTQPLAPVHNPISV

SEQ ID NO: 19572 - protein, 323 aa, Homo sapiens
MGSRVSREDFEWVYTDQPHADRRREILAKYPEIKSLMKPDPNLIWIIIMMVLTQLGAFYIVKDLDWKWVIFGAYAFGSCINHSMTLAIHEIAHNAAFGNCKAMWNRWFGMFANLPIGIPYSISFKRYHMDHHRYLGADGVDVDIPTDFEGWFFCTAFRKFIWVILQPLFYAFRPLFINPKPITYLEVINTVAQVTFDILIYYFLGIKSLVYMLAASLLGLGLHPISGHFIAEHYMFLKGHETYSYYGPLNLLTFNVGYHNEHHDFPNIPGKSLPLVRKIAAEYYDNLPHYNSWIKVLYDFVMDDTISPYSRMKRHQKGEMVLE

SEQ ID NO: 19573 - protein, 396 aa, Homo sapiens
MSATDRMGPRAVPGLRLALLLLLVLGTPKSGVQGQEGLDFPEYDGVDRVINVNAKNYKNVFKKYEVLALLYHEPPEDDKASQRQFEMEELILELAAQVLEDKGVGFGLVDSEKDAAVAKKLGLTEVDSMYVFKGDEVIEYDGEFSADTIVEFLLDVLEDPVELIEGERELQAFENIEDEIKLIGYFKSKDSEHYKAFEDAAEEFHPYIPFFATFDSKVAKKLTLKLNEIDFYEAFMEEPVTIPDKPNSEEEIVNFVEEHRRSTLRKLKPESMYETWEDDMDGIHIVAFAEEADPDGFEFLETLKAVAQDNTENPDLSIIWIDPDDFPLLVPYWEKTFDIDLSAPQIGVVNVTDADSVWMEMDDEEDLPSAEELEDWLEDVLEGEINTEDDDDDDDD

SEQ ID NO: 19574 - protein, 98 aa, Homo sapiens
MHGAPRLTFPCASEYLWHAREKAYQDHRRKVQSAQPLVDTRAPLTFRHLHLKLKRLKLEEERLSVIERDNRLLLEKVASVMRTRGQTDSKNNSKHRRK

SEQ ID NO: 19575 - protein, 797 aa, Homo sapiens
MAALAYNLGKREINHYFSVRSAKVLALVAVLLLAACHLASRRYRGNDSCEYLLSSGRFLGEKVWQPHSCMMHKYKISEAKNCLVDKHIAFIGDSRIRQLFYSFVKIINPQFKEEGNKHENIPFEDKTASVKVDFLWHPEVNGSMKQCIKVWTEDSIAKPHVIVAGAATWSIKIHNGSSEALSQYKMNITSIAPLLEKLAKTSDVYWVLQDPVYEDLLSENRKMITNEKIDAYNEAAVSILNSSTRNSKSNVKMFSVSKLIAQETIMESLDGLHLPESSRETTAMILMNVYCNKILKPVDGSCCQPRPPVTLIQKLAACFFTLSIIGYLIFYIIHRNAHRKNKPCTDLESGEEKKNIINTPVSSLEILLQSFCKLGLIMAYFYMCDRANLFMKENKFYTHSSFFIPIIYILVLGVFYNENTKETKVLNREQTDEWKGWMQLVILIYHISGASTFLPVYMHIRVLVAAYLFQTGYGHFSYFWIKGDFGIYRVCQVLFRLNFLVVVLCIVMDRPYQFYYFVPLVTVWFMVIYVTLALWPQIIQKKANGNCFWHFGLLLKLGFLLLFICFLAYSQGAFEKIFSLWPLSKCFELKGNVYEWWFRWRLDRYVVFHGMLFAFIYLALQKRQILSEGKGEPLFSNKISNFLLFISVVSFLTYSIWASSCKNKAECNELHPSVSVVQILAFILIRNIPGYARSVYSSFFAWFGKISLELFICQYHIWLAADTRGILVLIPGNPMLNIIVSTFIFVCVAHEISQITNDLAQIIIPKDNSSLLKRLACIAAFFCGLLILSSIQDKSKH

SEQ ID NO: 19576 - protein, 261 aa, Homo sapiens
MRESALERGPVPEAPAGGPVHAVTVVTLLEKLASMLETLRERQGGLARRQGGLAGSVRRIQSGLGALSRSHDTTSNTLAQLLAKAERVSSHANAAQERAVRRAAQVQRLEANHGLLVARGKLHVLLFKEEGEVPASAFQKAPEPLGPADQSELGPEQLEAEVGESSDEEPVESRAQRLRRTGLQKVQSLRRALSGRKGPAAPPPTPVKPPRLGPGRSAEAQPEAQPALEPTLEPEPPQDTEEDPGRPGAAEEALLQMESVA

SEQ ID NO: 19577 - protein, 555 aa, Homo sapiens
MDVSSEHTKDPGGEGGDGESLAARPSKIKASSGPPTSPEPGELESEPEEEEEEQAASQGGTAADEQAEAPKGLTAAEAAGEEGPGEPGRPAEPQPEPEEPAEVGAEEPAQPEPGAGPEELEAEAGAEELEQAAEGKEVRFQASLPLTRIDEEEAAAAPEAETERVEGEEEDKEETQRDGAESKERDGEGRPAKSQEEGKRLYGRDEFEDLEWSEEVQKLQEQQLRSDLLDQYRSLLVERNRSQRYNLYLQHKIFEALRRKKGLEAAEVADRGAEAEAPEKEQAYLRHLGMLEELKKQQADDLQWYHQELGQLKRQCQEKLTRVEKEWRRFQALKKQVVMQAMGSCRMRGGRQAALREVEQIQALEDKKEKEMSAVRLENIQLKQSLVHFETRMRTQEDLTQGLLLIDFEQLKIENQTFNEKIEERNEELLKLRSKVTNSVQVITHVKEKLHFMDMENACKKTQLAEIEAQAALGRDILTKTKQAREGLRTDNIRLNQKCGLLGKDSLLRDLEEKVDKTELLHRRLESLKRHHASLTLSCRGVRQKIREAKAFLPS

SEQ ID NO: 19578 - protein, 94 aa, Homo sapiens
MRTLAILAAILLVALQAQAEPLQARADEVAAAPEQIAADIPEVVVSLAWDESLAPKHPGSRKNMACYCRIPACIAGERRYGTCIYQGRLWAFCC

SEQ ID NO: 19579 - protein, 534 aa, Homo sapiens
MISCAEQRSRQGEAGRGPAPVAPAFLPLWLPRGCSGILSVPAVAMHSAGTPRAESPMSRQEKDAELDRRIVALRKKNQALLRRYQEIQEDRRQAEQGGMAVTTPALLQPDGLTVTISQVPGEKRVVSRNWARGTCGPRVTNEMLEDEDAEDHGGTFCLGELVELAVTMENKAEGKRIVSEKPTRARNQGIEGSPGGRVTRSPPTQVAISSDSARKGSWEPWSRPVGEPPEAGWDYAQWKQEREQIDLARLARHRDAQGDWRRPWDLDKAKSTLQDCSQLRGEGPARAGSRRGPRSHQKLQPPPLLPDGKGRGGQASRPSVAPATGSKARGKERLTGRARRWDMKEDKEELEGQEGSQSTRETPSEEEQAQKQSGMEQGRLGSAPAASPALASPEGPKGESVASTASSVPCSPQEPDLAPLDLSLGGAGIPGPRESGCVLGLRPGAQESPVSWPEGSKQQPLGWSNHQAELEVQTCPEPQRGAGLPEPGEDRSGKSGAQQGLAPRSRPTRGGSQRSRGTAGVRRRTGRPGPAGRC

SEQ ID NO: 19580 - protein, 324 aa, Homo sapiens
MRHREGSWEPWSRPVGEPPEAGWDYAQWKQEREQIDLARLARHRDAQGDWRRPWDLDKAKSTLQDCSQLRGEGPARAGSRRGPRSHQKLQPPPLLPDGKGRGGQASRPSVAPATGSKARGKERLTGRARRWDMKEDKEELEGQEGSQSTRETPSEEEQAQKQSGMEQGRLGSAPAASPALASPEGPKGESVASTASSVPCSPQEPDLAPLDLSLGGAGIPGPRESGCVLGLRPGAQESPVSWPEGSKQQPLGWSNHQAELEVQTCPEPQRGAGLPEPGEDRSGKSGAQQGLAPRSRPTRGGSQRSRGTAGVRRRTGRPGPAGRC

SEQ ID NO: 19581 - protein, 257 aa, Homo sapiens
MPLACEHPVGVSSSVGNAGRAGVGTQAWGTTERTQHPGPAQHCPCGLRVFVLQEKRVVSRNWARGTCGPRVTNEMLEDEDAEDHGGTFCLGELVELAVTMENKAEGKRIVSEKPTRARNQGIEGSPGGRVTRSPPTQVAISSDSARKGSWEPWSRPVGEPPEAGWDYAQWKQEREQIDLARLARHRDAQGDWRRPWDLDKAKSTLQDCSQLRGEGPARAGSRRGEPTPTSSLPSLALFIFHPLVLSFLCLLVSYFQS

SEQ ID NO: 19582 - protein, 466 aa, Homo sapiens
MPLACEHPVGVSSSVGNAGRAGVGTQAWGTTERTQHPGPAQHCPCGLRVFVLQEKRVVSRNWARGTCGPRVTNEMLEDEDAEDHGGTFCLGELVELAVTMENKAEGKRIVSEKPTRARNQGIEGSPGGRVTRSPPTQVAISSDSARKGSWEPWSRPVGEPPEAGWDYAQWKQEREQIDLARLARHRDAQGDWRRPWDLDKAKSTLQDCSQLRGEGPARAGSRRGPRSHQKLQPPPLLPDGKGRGGQASRPSVAPATGSKARGKERLTGRARRWDMKEDKEELEGQEGSQSTRETPSEEEQAQKQSGMEQGRLGSAPAASPALASPEGPKGESVASTASSVPCSPQEPDLAPLDLSLGGAGIPGPRESGCVLGLRPGAQESPVSWPEGSKQQPLGWSNHQAELEVQTCPEPQRGAGLPEPGEDRSGKSGAQQGLAPRSRPTRGGSQRSRGTAGVRRRTGRPGPAGRC

SEQ ID NO: 19583 - protein, 299 aa, Homo sapiens
MTLSVLSRKDKERVIRRLLLQAPPGEFVNAFDDLCLLIRDEKLMHHQGECAGHQHCQKYSVPLCIDGNPVLLSHHNVMGDYRFFDHQSKLSFKYDLLQNQLKDIQSHGIIQNEAEYLRVVLLCALKLYVNDHYPKGNCNMLRKTVKSKEYLIACIEDHNYETGECWNGLWKSKWIFQVNPFLTQVTGRIFVQAHFFRCVNLHIEISKDLKESLEIVNQAQLALSFARLVEEQENKFQAAVLEELQELSNEALRKILRRDLPVTRTLIDWHRILSDLNLVMYPKLGYVIYSRSVLCNWII

SEQ ID NO: 19584 - protein, 385 aa, Homo sapiens
MWGFRLLRSPPLLLLLPQLGIGNASSCSQARTMNPGGSGGARCSLSAEVRRRQCLQLSTVPGADPQRSNELLLLAAAGEGLERQDLPGDPAKEEPQPPPQHHVLYFPGDVQNYHEIMTRHPENYQWENWSLENVATILAHRFPNSYIWVIKCSRMHLHKFSCYDNFVKSNMFGAPEHNTDFGAFKHLYMLLVNAFNLSQNSLSKKSLNVWNKDSIASNCRSSPSHTTNGCQGEKVRTCEKSDESAMSFYPPSLNDASFTLIGFSKGCVVLNQLLFELKEAKKDKNIDAFIKSIRTMYWLDGGHSGGSNTWVTYPEVLKEFAQTGIIVHTHVTPYQVRDPMRSWIGKEHKKFVQILGDLGMQVTSQIHFTKEAPSIENHFRVHEVF

SEQ ID NO: 19585 - protein, 829 aa, Homo sapiens
MGLPRGPLASLLLLQVCWLQCAASEPCRAVFREAEVTLEAGGAEQEPGQALGKVFMGCPGQEPALFSTDNDDFTVRNGETVQERRSLKERNPLKIFPSKRILRRHKRDWVVAPISVPENGKGPFPQRLNQLKSNKDRDTKIFYSITGPGADSPPEGVFAVEKETGWLLLNKPLDREEIAKYELFGHAVSENGASVEDPMNISIIVTDQNDHKPKFTQDTFRGSVLEGVLPGTSVMQVTATDEDDAIYTYNGVVAYSIHSQEPKDPHDLMFTIHRSTGTISVISSGLDREKVPEYTLTIQATDMDGDGSTTTAVAVVEILDANDNAPMFDPQKYEAHVPENAVGHEVQRLTVTDLDAPNSPAWRATYLIMGGDDGDHFTITTHPESNQGILTTRKGLDFEAKNQHTLYVEVTNEAPFVLKLPTSTATIVVHVEDVNEAPVFVPPSKVVEVQEGIPTGEPVCVYTAEDPDKENQKISYRILRDPAGWLAMDPDSGQVTAVGTLDREDEQFVRNNIYEVMVLAMDNGSPPTTGTGTLLLTLIDVNDHGPVPEPRQITICNQSPVRQVLNITDKDLSPHTSPFQAQLTDDSDIYWTAEVNEEGDTVVLSLKKFLKQDTYDVHLSLSDHGNKEQLTVIRATVCDCHGHVETCPGPWKGGFILPVLGAVLALLFLLLVLLLLVRKKRKIKEPLLLPEDDTRDNVFYYGEEGGGEEDQDYDITQLHRGLEARPEVVLRNDVAPTIIPTPMYRPRPANPDEIGNFIIENLKAANTDPTAPPYDTLLVFDYEGSGSDAASLSSLTSSASDQDQDYDYLNEWGSRFKKLADMYGGGEDD

SEQ ID NO: 19586 - protein, 784 aa, Homo sapiens
MGLPRGPLASLLLLQVCWLQCAASEPCRAVFREAEVTLEAGGAEQEPGQALGKVFMGCPGQEPALFSTDNDDFTVRNGETVQERRSLKERNPLKIFPSKRILRRHKRDWVVAPISVPENGKGPFPQRLNQLKSNKDRDTKIFYSITGPGADSPPEGVFAVEKETGWLLLNKPLDREEIAKYELFGHAVSENGASVEDPMNISIIVTDQNDHKPKFTQDTFRGSVLEGVLPGTSVMQVTATDEDDAIYTYNGVVAYSIHSQEPKDPHDLMFTIHRSTGTISVISSGLDREKVPEYTLTIQATDMDGDGSTTTAVAVVEILDANDNAPMFDPQKYEAHVPENAVGHEVQRLTVTDLDAPNSPAWRATYLIMGGDDGDHFTITTHPESNQGILTTRKGLDFEAKNQHTLYVEVTNEAPFVLKLPTSTATIVVHVEDVNEAPVFVPPSKVVEVQEGIPTGEPVCVYTAEDPDKENQKISYRILRDPAGWLAMDPDSGQVTAVGTLDREDEQFVRNNIYEVMVLAMDNGSPPTTGTGTLLLTLIDVNDHGPVPEPRQITICNQSPVRQVLNITDKDLSPHTSPFQAQLTDDSDIYWTAEVNEEGDTVVLSLKKFLKQDTYDVHLSLSDHGNKEQLTVIRATVCDCHGHVETCPGPWKGGFILPVLGAVLALLFLLLVLLLLVRKKRKIKEPLLLPEDDTRDNVFYYGEEGGGEEDQDYDITQLHRGLEARPEVVLRNDVAPTIIPTPMYRPRPANPDEIGNFIIEGRGERGSQRGNGGLQLARGRTRRS

SEQ ID NO: 19587 - protein, 266 aa, Homo sapiens
MPPRGPASELLLLRLLLLGAATAAPLAPRPSKEELTRCLAEVVTEVLTVGQVQRGPCTALLHKELCGTEPHGCASTEEKGLLLGDFKKQEAGKMRSSQEVRDEEEEEVAERTHKSEVQEQAIRMQGHRQLHQEEDEEEEKEERKRGPMETFEDLWQRHLENGGDLQKRVAEKASDKETAQFQAEEKGVRVLGGDRSLWQGAERGGGERREDLPHHHHHHHQPEAEPRQEKEEASEREEKEVEQLEHLRDELKKVTETLGEQLRREG

SEQ ID NO: 19588 - protein, 327 aa, Homo sapiens
MVRCDRGLQMLLTTAGAFAAFSLMAIAIGTDYWLYSSAHICNGTNLTMDDGPPPRRARGDLTHSGLWRVCCIEGIYKGHCFRINHFPEDNDYDHDSSEYLLRIVRASSVFPILSTILLLLGGLCIGAGRIYSRKNNIVLSAGILFVAAGLSNIIGIIVYISSNTGDPSDKRDEDKKNHYNYGWSFYFGALSFIVAETVGVLAVNIYIEKNKELRFKTKREFLKASSSSPYARMPSYRYRRRRSRSSSRSTEASPSRDVSPMGLKITGAIPMGELSMYTLSREPLKVTTAASYSPDQEASFLQVHDFFQQDLKEGFHVSMLNRRTTPV

SEQ ID NO: 19589 - protein, 275 aa, Homo sapiens
MSHCSSRALTLLSSVFGACGLLLVGIAVSTDYWLYMEEGTVLPQNQTTEVKMALHAGLWRVCFFAGREKGRCVASEYFLEPEINLVTENTENILKTVRTATPFPMVSLFLVFTAFVISNIGHIRPQRTILAFVSGIFFILSGLSLVVGLVLYISSINDEVMNRPSSSEQYFHYRYGWSFAFAASSFLLKEGAGVMSVYLFTKRYAEEEMYRPHPAFYRPRLSDCSDYSGQFLQPEAWRRGRSPSDISSDVSIQMTQNYPPAIKYPDHLHISTSPC

SEQ ID NO: 19590 - protein, 334 aa, Homo sapiens
MEAAHFFEGTEKLLEVWFSRQQPDANQGSGDLRTIPRSEWDILLKDVQCSIISVTKTDKQEAYVLSESSMFVSKRRFILKTCGTTLLLKALVPLLKLARDYSGFDSIQSFFYSRKNFMKPSHQGYPHRNFQEEIEFLNAIFPNGAAYCMGRMNSDCWYLYTLDFPESRVISQPDQTLEILMSELDPAVMDQFYMKDGVTAKDVTRESGIRDLIPGSVIDATMFNPCGYSMNGMKSDGTYWTIHITPEPEFSYVSFETNLSQTSYDDLIRKVVEVFKPGKFVTTLFVNQSSKCRTVLASPQKIEGFKRLDCQSAMFNDYNFVFTSFAKKQQQQQS

SEQ ID NO: 19591 - protein, 186 aa, Homo sapiens
MGRMNSDCWYLYTLDFPESRVISQPDQTLEILMSELDPAVMDQFYMKDGVTAKDVTRESGIRDLIPGSVIDATMFNPCGYSMNGMKSDGTYWTIHITPEPEFSYVSFETNLSQTSYDDLIRKVVEVFKPGKFVTTLFVNQSSKCRTVLASPQKIEGFKRLDCQSAMFNDYNFVFTSFAKKQQQQQS

SEQ ID NO: 19592 - protein, 395 aa, Homo sapiens
MLPAVGSADEEEDPAEEDCPELVPIETTQSEEEEKSGLGAKIPVTIITGYLGAGKTTLLNYILTEQHSKRVAVILNEFGEGSALEKSLAVSQGGELYEEWLELRNGCLCCSVKDSGLRAIENLMQKKGKFDYILLETTGLADPGAVASMFWVDAELGSDIYLDGIITIVDSKYGLKHLTEEKPDGLINEATRQVALADAILINKTDLVPEEDVKKLRTTIRSINGLGQILETQRSRVDLSNVLDLHAFDSLSGISLQKKLQHVPGTQPHLDQSIVTITFEVPGNAKEEHLNMFIQNLLWEKNVRNKDNHCMEVIRLKGLVSIKDKSQQVIVQGVHELYDLEETPVSWKDDTERTNRLVLLGRNLDKDILKQLFIATVTETEKQWTTRFQEDQVCT

SEQ ID NO: 19593 - protein, 359 aa, Homo sapiens
MYFKRAARAFPVLLTGAGKTTLLNYILTEQHSKRVAVILNEFGEGSALEKSLAVSQGGELYEEWLELRNGCLCCSVKDSGLRAIENLMQKKGKFDYILLETTGLADPGAVASMFWVDAELGSDIYLDGIITIVDSKYGLKHLTEEKPDGLINEATRQVALADAILINKTDLVPEEDVKKLRTTIRSINGLGQILETQRSRVDLSNVLDLHAFDSLSGISLQKKLQHVPGTQPHLDQSIVTITFEVPGNAKEEHLNMFIQNLLWEKNVRNKDNHCMEVIRLKGLVSIKDKSQQVIVQGVHELYDLEETPVSWKDDTERTNRLVLLGRNLDKDILKQLFIATVTETEKQWTTRFQEDQVCT

SEQ ID NO: 19594 - protein, 376 aa, Homo sapiens
MLPAVGSADEEEDPAEEDCPELVPIETTQSEEEEKSGLGAKIPVTIITGYLGAGKTTLLNYILTEQHSKRVAVILNEFGEGSALEKSLAVSQGGELYEEWLELRNGCLCCSVKDSGLRAIENLMQKKGKFDYILLETTGLADPGAVASMFWVDAELGSDIYLDGIITIVDSKYGLKHLTEEKPDGLINEATRQVALADAILINKTDLVPEEDVKKLRTTIRSINGLGQILETQRSSLQKKLQHVPGTQPHLDQSIVTITFEVPGNAKEEHLNMFIQNLLWEKNVRNKDNHCMEVIRLKGLVSIKDKSQQVIVQGVHELYDLEETPVSWKDDTERTNRLVLLGRNLDKDILKQLFIATVTETEKQWTTRFQEDQVCT

SEQ ID NO: 19595 - protein, 113 aa, Homo sapiens
MLPAVGSADEEEDPAEEDCPELVPIETTQSEEEEKSGLGAKIPVTIITGYLGAGKTTLLNYILTEQHSKRVAVILNEFGEGSALEKSLAVSQGGELYEEWLELRNGCLCCSVK

SEQ ID NO: 19596 - protein, 1130 aa, Homo sapiens
MRCLAPRPAGSYLSEPQGSSQCATMELGPLEGGYLELLNSDADPLCLYHFYDQMDLAGEEEIELYSEPDTDTINCDQFSRLLCDMEGDEETREAYANIAELDQYVFQDSQLEGLSKDIFKHIGPDEVIGESMEMPAEVGQKSQKRPFPEELPADLKHWKPAEPPTVVTGSLLVRPVSDCSTLPCLPLPALFNQEPASGQMRLEKTDQIPMPFSSSSLSCLNLPEGPIQFVPTISTLPHGLWQISEAGTGVSSIFIYHGEVPQASQVPPPSGFTVHGLPTSPDRPGSTSPFAPSATDLPSMPEPALTSRANMTEHKTSPTQCPAAGEVSNKLPKWPEPVEQFYRSLQDTYGAEPAGPDGILVEVDLVQARLERSSSKSLERELATPDWAERQLAQGGLAEVLLAAKEHRRPRETRVIAVLGKAGQGKSYWAGAVSRAWACGRLPQYDFVFSVPCHCLNRPGDAYGLQDLLFSLGPQPLVAADEVFSHILKRPDRVLLILDGFEELEAQDGFLHSTCGPAPAEPCSLRGLLAGLFQKKLLRGCTLLLTARPRGRLVQSLSKADALFELSGFSMEQAQAYVMRYFESSGMTEHQDRALTLLRDRPLLLSHSHSPTLCRAVCQLSEALLELGEDAKLPSTLTGLYVGLLGRAALDSPPGALAELAKLAWELGRRHQSTLQEDQFPSADVRTWAMAKGLVQHPPRAAESELAFPSFLLQCFLGALWLALSGEIKDKELPQYLALTPRKKRPYDNWLEGVPRFLAGLIFQPPARCLGALLGPSAAASVDRKQKVLARYLKRLQPGTLRARQLLELLHCAHEAEEAGIWQHVVQELPGRLSFLGTRLTPPDAHVLGKALEAAGQDFSLDLRSTGICPSGLGSLVGLSCVTRFRAALSDTVALWESLQQHGETKLLQAAEEKFTIEPFKAKSLKDVEDLGKLVQTQRTRSSSEDTAGELPAVRDLKKLEFALGPVSGPQAFPKLVRILTAFSSLQHLDLDALSENKIGDEGVSQLSATFPQLKSLETLNLSQNNITDLGAYKLAEALPSLAASLLRLSLYNNCICDVGAESLARVLPDMVSLRVMDVQYNKFTAAGAQQLAASLRRCPHVETLAMWTPTIPFSVQEHLQQQDSRISLR

SEQ ID NO: 19597 - protein, 883 aa, Homo sapiens
MRCLAPRPAGSYLSEPQGSSQCATMELGPLEGGYLELLNSDADPLCLYHFYDQMDLAGEEEIELYSEPDTDTINCDQFSRLLCDMEGDEETREAYANIAELDQYVFQDSQLEGLSKDIFKHIGPDEVIGESMEMPAEVGQKSQKRPFPEELPADLKHWKPVPFSSSSLSCLNLPEGPIQFVPTISTLPHGLWQISEAGTGVSSIFIYHGEVPQASQVPPPSGFTVHGLPTSPDRPGSTSPFAPSATDLPSMPEPALTSRANMTEHKTSPTQCPAAGEVSNKLPKWPEPVEQFYRSLQDTYGAEPAGPDGILVEVDLVQARLERSSSKSLERELATPDWAERQLAQGGLAEVLLAAKEHRRPRETRVIAVLGKAGQGKSYWAGAVSRAWACGRLPQYDFVFSVPCHCLNRPGDAYGLQDLLFSLGPQPLVAADEVFSHILKRPDRVLLILDGFEELEAQDGFLHSTCGPAPAEPCSLRGLLAGLFQKKLLRGCTLLLTARPRGRLVQSLSKADALFELSGFSMEQAQAYVMRYFESSGMTEHQDRALTLLRDRPLLLSHSHSPTLCRAVCQLSEALLELGEDAKLPSTLTGLYVGLLGRAALDSPPGALAELAKLAWELGRRHQSTLQEDQFPSADVRTWAMAKGLVQHPPRAAESELAFPSFLLQCFLGALWLALSGEIKDKELPQYLALTPRKKRPYDNWLEGVPRFLAGLIFQPPARCLGALLGPSAAASVDRKQKVLARYLKRLQPGTLRARQLLELLHCAHEAEEAGIWQHVVQELPGRLSFLGTRLTPPDAHVLGKALEAAGQDFSLDLRSTGICPSGLGSLVGLSCVTRFRWGEGLGRDILVLGINCGLGAKPSALWGPFSMQSSRVGQNGFSPFLR

SEQ ID NO: 19598 - protein, 546 aa, Homo sapiens
MRCLAPRPAGSYLSEPQGSSQCATMELGPLEGGYLELLNSDADPLCLYHFYDQMDLAGEEEIELYSEPDTDTINCDQFSRLLCDMEGDEETREAYANIAELDQYVFQDSQLEGLSKDIFKHIGPDEVIGESMEMPAEVGQKSQKRPFPEELPADLKHWKPVPFSSSSLSCLNLPEGPIQFVPTISTLPHGLWQISEAGTGVSSIFIYHGEVPQASQVPPPSGFTVHGLPTSPDRPGSTSPFAPSATDLPSMPEPALTSRANMTEHKTSPTQCPAAGEVSNKLPKWPGLAWSPCLGLRPSLHRAALSDTVALWESLQQHGETKLLQAAEEKFTIEPFKAKSLKDVEDLGKLVQTQRTRSSSEDTAGELPAVRDLKKLEFALGPVSGPQAFPKLVRILTAFSSLQHLDLDALSENKIGDEGVSQLSATFPQLKSLETLNLSQNNITDLGAYKLAEALPSLAASLLRLSLYNNCICDVGAESLARVLPDMVSLRVMDVQYNKFTAAGAQQLAASLRRCPHVETLAMWTPTIPFSVQEHLQQQDSRISLR

SEQ ID NO: 19599 - protein, 932 aa, Homo sapiens
MRCLAPRPAGSYLSEPQGSSQCATMELGPLEGGYLELLNSDADPLCLYHFYDQMDLAGEEEIELYSEPDTDTINCDQFSRLLCDMEGDEETREAYANIAELDQYVFQDSQLEGLSKDIFKHIGPDEVIGESMEMPAEVGQKSQKRPFPEELPADLKHWKPAEPPTVVTGSLLVRPVSDCSTLPCLPLPALFNQEPASGQMRLEKTDQIPMPFSSSSLSCLNLPEGPIQFVPTISTLPHGLWQISEAGTGVSSIFIYHGEVPQASQVPPPSGFTVHGLPTSPDRPGSTSPFAPSATDLPSMPEPALTSRANMTEHKTSPTQCPAAGEVSNKLPKWPEPVEQFYRSLQDTYGAEPAGPDGILVEVDLVQARLERSSSKSLERELATPDWAERQLAQGGLAEVLLAAKEHRRPRETRVIAVLGKAGQGKSYWAGAVSRAWACGRLPQYDFVFSVPCHCLNRPGDAYGLQDLLFSLGPQPLVAADEVFSHILKRPDRVLLILDGFEELEAQDGFLHSTCGPAPAEPCSLRGLLAGLFQKKLLRGCTLLLTARPRGRLVQSLSKADALFELSGFSMEQAQAYVMRYFESSGMTEHQDRALTLLRDRPLLLSHSHSPTLCRAVCQLSEALLELGEDAKLPSTLTGLYVGLLGRAALDSPPGALAELAKLAWELGRRHQSTLQEDQFPSADVRTWAMAKGLVQHPPRAAESELAFPSFLLQCFLGALWLALSGEIKDKELPQYLALTPRKKRPYDNWLEGVPRFLAGLIFQPPARCLGALLGPSAAASVDRKQKVLARYLKRLQPGTLRARQLLELLHCAHEAEEAGIWQHVVQELPGRLSFLGTRLTPPDAHVLGKALEAAGQDFSLDLRSTGICPSGLGSLVGLSCVTRFRWGEGLGRDILVLGINCGLGAKPSALWGPFSMQSSRVGQNGFSPFLR

SEQ ID NO: 19600 - protein, 362 aa, Homo sapiens
MVWPWVAMASRWGPLIGLAPCCLWLLGAVLLMDASARPANHSSTRERVANREENEILPPDHLNGVKLEMDGHLNRGFHQEVFLGKDLGGFDEDAEPRRSRRKLMVIFSKVDVNTDRKISAKEMQRWIMEKTAEHFQEAMEESKTHFRAVDPDGDGHVSWDEYKVKFLASKGHSEKEVADAIRLNEELKVDEETQEVLENLKDRWYQADSPPADLLLTEEEFLSFLHPEHSRGMLRFMVKEIVRDLDQDGDKQLSVPEFISLPVGTVENQQGQDIDDNWVKDRKKEFEELIDSNHDGIVTAEELESYMDPMNEYNALNEAKQMIAVADENQNHHLEPEEVLKYSEFFTGSKLVDYARSVHEEF

SEQ ID NO: 19601 - protein, 259 aa, Homo sapiens
MVIFSKVDVNTDRKISAKEMQRWIMEKTAEHFQEAMEESKTHFRAVDPDGDGHVSWDEYKVKFLASKGHSEKEVADAIRLNEELKVDEETQEVLENLKDRWYQADSPPADLLLTEEEFLSFLHPEHSRGMLRFMVKEIVRDLDQDGDKQLSVPEFISLPVGTVENQQGQDIDDNWVKDRKKEFEELIDSNHDGIVTAEELESYMDPMNEYNALNEAKQMIAVADENQNHHLEPEEVLKYSEFFTGSKLVDYARSVHEEF

SEQ ID NO: 19602 - protein, 254 aa, Homo sapiens
MVWPWVAMASRWGPLIGLAPCCLWLLGAVLLMDASARPANHSSTRERVANREENEILPPDHLNGVKLEMDGHLNRGFHQEVFLGKDLGGFDEDAEPRRSRRKLMVIFSKVDVNTDRKISAKEMQRWIMEKTAEHFQEAMEESKTHFRAVDPDGDGHVSWDEYKVKFLASKGHSEKEVADAIRLNEELKVDEESCAPLSTGSPGEPEGPLVPGGQPPCRPAADGGGVPVGPPPRAQPGNAQVHGEGDRPGPGPGR

SEQ ID NO: 19603 - protein, 202 aa, Homo sapiens
MVWPWVAMASRWGPLIGLAPCCLWLLGAVLLMDASARPANHSSTRERVANREENEILPPDHLNGVKLEMDGHLNRGFHQEVFLGKDLGGFDEDAEPRRSRRKLMVIFSKVDVNTDRKISAKEMQRWIMEKTAEHFQEAMEESKTHFRAVDPDGDGHVSWDEYKVKFLASKGHSEKEVADAIRLNEELKVDEERHGPPGPRAL

SEQ ID NO: 19604 - protein, 130 aa, Homo sapiens
MLRFMVKEIVRDLDQDGDKQLSVPEFISLPVGTVENQQGQDIDDNWVKDRKKEFEELIDSNHDGIVTAEELESYMDPMNEYNALNEAKQMIAVADENQNHHLEPEEVLKYSEFFTGSKLVDYARSVHEEF

SEQ ID NO: 19605 - protein, 348 aa, Homo sapiens
MVWPWVAMASRWGPLIGLAPCCLWLLGAVLLMDASARPANHSSTRERVANREENEILPPDHLNGVKLEMDGHLNRGFHQEVFLGKDLGGFDEDAEPRRSRRKLMVIFSKVDVNTDRKISAKEMQRWIMEKTAEHFQEAMEESKTHFRAVDPDGDGHVSWDEYKVKFLASKGHSEKEVADAIRLNEELKVDEETQEVLENLKDRWYQADSPPADLLLTEEEFLSFLHPEHSRGMLRFMVKEIVRDLDQDGDKQLSVPEFISLPVGTVENQQGQDIDDNWVKDRKKEFEELIDSNHDGIVTAEELENVPTLPLQPIGTLNSHFVRLAAELGGGKATLTCAPLARRATWTP

SEQ ID NO: 19606 - protein, 482 aa, Homo sapiens
MASFSAETNSTDLLSQPWNEPPVILSMVILSLTFLLGLPGNGLVLWVAGLKMQRTVNTIWFLHLTLADLLCCLSLPFSLAHLALQGQWPYGRFLCKLIPSIIVLNMFASVFLLTAISLDRCLVVFKPIWCQNHRNVGMACSICGCIWVVAFVMCIPVFVYREIFTTDNHNRCGYKFGLSSSLDYPDFYGDPLENRSLENIVQPPGEMNDRLDPSSFQTNDHPWTVPTVFQPQTFQRPSADSLPRGSARLTSQNLYSNVFKPADVVSPKIPSGFPIEDHETSPLDNSDAFLSTHLKLFPSASSNSFYESELPQGFQDYYNLGQFTDDDQVPTPLVAITITRLVVGFLLPSVIMIACYSFIVFRMQRGRFAKSQSKTFRVAVVVVAVFLVCWTPYHIFGVLSLLTDPETPLGKTLMSWDHVCIALASANSCFNPFLYALLGKDFRKKARQSIQGILEAAFSEELTRSTHCPSNNVISERNSTTV

SEQ ID NO: 19607 - protein, 1712 aa, Homo sapiens
MERNVLTTFSQEMSQLILNEMPKAEYSSLFNDFVESEFFLIDGDSLLITCICEISFKPGQNLHFFYLVERYLVDLISKGGQFTIVFFKDAEYAYFNFPELLSLRTALILHLQKNTTIDVRTTFSRCLSKEWGSFLEESYPYFLIVADEGLNDLQTQLFNFLIIHSWARKVNVVLSSGQESDVLCLYAYLLPSMYRHQIFSWKNKQNIKDAYTTLLNQLERFKLSALAPLFGSLKWNNITEEAHKTVSLLTQVWPEGSDIRRVFCVTSCSLSLRMYHRFLGNREPSSGQETEIQQVNSNCLTLQEMEDLCKLHCLTVVFLLHLPLSQRACARVITSHWAEDMKPLLQMKKWCEYFILRNIHTFEFWNLNLIHLSDLNDELLLKNIAFYYENENVKGLHLNLGDTIMKDYEYLWNTVSKLVRDFEVGQPFPLRTTKVCFLEKKPSPIKDSSNEMVPNLGFIPTSSFVVDKFAGDILKDLPFLKSDDPIVTSLVKQKEFDELVHWHSHKPLSDDYDRSRCQFDEKSRDPRVLRSVQKYHVFQRFYGNSLETVSSKIIVTQTIKSKKDFSGPKSKKAHETKAEIIARENKKRLFAREEQKEEQKWNALSFSIEEQLKENLHSGIKSLEDFLKSCKSSCVKLQVEMVGLTACLKAWKEHCRSEEGKTTKDLSIAVQVMKRIHSLMEKYSELLQEDDRQLIARCLKYLGFDELASSLHPAQDAENDVKVKKRNKYSVGIGPARFQLQYMGHYLIRDERKDPDPRVQDFIPDTWQRELLDVVDKNESAVIVAPTSSGKTYASYYCMEKVLKESDDGVVVYVAPTKALVNQVAATVQNRFTKNLPSGEVLCGVFTREYRHDALNCQVLITVPACFEILLLAPHRQNWVKKIRYVIFDEVHCLGGEIGAEIWEHLLVMIRCPFLALSATISNPEHLTEWLQSVKWYWKQEDKIIENNTASKRHVGRQAGFPKDYLQVKQSYKVRLVLYGERYNDLEKHVCSIKHGDIHFDHFHPCAALTTDHIERYGFPPDLTLSPRESIQLYDAMFQIWKSWPRAQELCPENFIHFNNKLVIKKMDARKYEESLKAELTSWIKNGNVEQARMVLQNLSPEADLSPENMITMFPLLVEKLRKMEKLPALFFLFKLGAVENAAESVSTFLKKKQETKRPPKADKEAHVMANKLRKVKKSIEKQKIIDEKSQKKTRNVDQSLIHEAEHDNLVKCLEKNLEIPQDCTYADQKAVDTETLQKVFGRVKFERKGEELKALAERGIGYHHSAMSFKEKQLVEILFRKGYLRVVTATGTLALGVNMPCKSVVFAQNSVYLDALNYRQMSGRAGRRGQDLMGDVYFFDIPFPKIGKLIKSNVPELRGHFPLSITLVLRLMLLASKGDDPEDAKAKVLSVLKHSLLSFKQPRVMDMLKLYFLFSLQFLVKEGYLDQEGNPMGFAGLVSHLHYHEPSNLVFVSFLVNGLFHDLCQPTRKGSKHFSQDVMEKLVLVLAHLFGRRYFPPKFQDAHFEFYQSKVFLDDLPEDFSDALDEYNMKIMEDFTTFLRIVSKLADMNQEYQLPLSKIKFTGKECEDSQLVSHLMSCKEGRVAISPFVCLSGNFDDDLLRLETPNHVTLGTIGVNRSQAPVLLSQKFDNRGRKMSLNAYALDFYKHGSLIGLVQDNRMNEGDAYYLLKDFALTIKSISVSLRELCENEDDNVVLAFEQLSTTFWEKLNKV

SEQ ID NO: 19608 - protein, 1706 aa, Homo sapiens
MGSKDHAVFFREMTQLILNEMPKAGYSSILNDFVESNFFVIDGDSLLVTCLGVKSFKWGQNLHFFYLVECYLVDLLSNGGQFTIVFFKDAEYAYFDFPELLSLRTALILHLQHNTNIDVQTEFSGCLSQDWKLFLEQHYPYFLIVSEEGLSDLQTYLFNFLIIHSWGMKVNVVLSSGHESDTLRFYAYTMESTDRNQTFSKENETVIQSAYKSLIQHLEEIRVLVLATHFEHLKWNDMMEEAYQTLFLLQHLWSEGSDIQRVLCVTSCSLSLRMYHRVLVHSNCLSLQEVEDFCRLRCLCVAFQLHLPLSQRACSRVITCSWIRNSDSFLKMNKWCEYFILSNLNVFGCWNLNLNHVSDLYDEQLLKNIAFYYEFESTQEPHLNLGDSIRRDYEDLWNVVSHLVKEFNVGKSFPLRTTRRHFLRQEKSVIQEISLEKMPSVGFIPMTSAVIDEFVGDMMKDLPILKSDDPVVPSLFKQKTSDELLHWHAQRLLSDDYDRIKCHVDEQSRDPHVLDFLKKIQDYQQFYGKSLESISTKVIVTQTTRPKEDSSGASGEILQNTKPHQITKKSKKKSFLKEDQNKAQQNDDLLFSIEEEMKNNLHSGIRKLEDYLTSCASNSVKFGVEMLGLIACFKAWKKHCRGEGKISKDLSIAVQMMKRIHSLLERYPEILEAEHHQYIAKCLKYLGFNDLANSLDPTLIGDDKNKKKYSIDIGPARFQLQYMGHYLIRDERKDRDPRVQDFIPNAWQQELLDVVDKNESAVIVAPTSSGKTYASYYCMEKVLRESDVGVVVYVAPAKSLVGQVAATVENRFTKTLPAGRTLCGAFTRDYCHNVLNCQVLITVPECFEILLLAPHRQKWVERIRYVIFDEVHYLGREVGAKFWELLLVIIRCPFLVLSATINNPNLLTKWLQSVKQYWKQADKIMEEKCISEKQADKCLNFLQDHSYKNQSYEVRLVLYGERYNDLEKHICSVKHDDVYFDHFHPCAALTTDIIEKYGFPPDLTLTPQESIQLYDTMAQVWETWPRAQELCPEEFILFKNKIVIKKLDARKYEENLKAELTNWIKNGQVKKVKRVLKNLSPDSLSSSKDMVKMFPLLVEKLRQMDKLPAIFFLFKNDDVGKRAGSVCTFLEKTETKSHPHTECHSYVFAIDEVLEKVRKTQKRITKKNPKKAEKLERKKVYRAEYINFLENLKILEISEDCTYADVKALHTEITRNKDSTLERVLPRVRFTRHGKELKALAQRGIGYHHSSMYFKEKEFVEILFVKGLIRVVTATETLALGIHMPCKSVVFAQDSVYLDALNYRQMSGRAGRRGQDLLGNVYFFDIPLPKIKRLLASSVPELRGQFPLSITLVLRLMLLASKGDDPEDAKAKVLSVLKHSLLSFKRRRAMETLKLYFLFSLQLLIKEDYLNKKGNPKKFAGLASYLHGHEPSNLVFVNFLKRGLFHNLCKPAWKGSQQFSQDVMEKLVLVLANLFGRKYIPAKFQNANLSFSQSKVILAELPEDFKAALYEYNLAVMKDFASFLLIASKSVNMKKEHQLPLSRIKFTGKECEDSQLVSHLMSCKKGRVAISPFVCLSGNTDNDLLRPETINQVILRTVGVSGTQAPLLWPWKLDNRGRRMPLNAYVLNFYKHNCLTRLDQKNGMRMGQLLKCLKDFAFNIQAISDSLSELCENKRDNVVLAFKQLSQTFYEKLQEMQIQMSQNHLE

SEQ ID NO: 19609 - protein, 1308 aa, Homo sapiens
MGSKDHAVFFREMTQLILNEMPKAGYSSILNDFVESNFFVIDGDSLLVTCLGVKSFKWGQNLHFFYLVECYLVDLLSNGGQFTIVFFKDAEYAYFDFPELLSLRTALILHLQHNTNIDVQTEFSGCLSQDWKLFLEQHYPYFLIVSEEGLSDLQTYLFNFLIIHSWGMKVNVVLSSGHESDTLRFYAYTMESTDRNQTFSKENETVIQSAYKSLIQHLEEIRVLVLATHFEHLKWNDMMEEAYQTLFLLQHLWSEGSDIQRVLCVTSCSLSLRMYHRVLVHSNCLSLQEVEDFCRLRCLCVAFQLHLPLSQRACSRVITCSWIRNSDSFLKMNKWCEYFILSNLNVFGCWNLNLNHVSDLYDEQLLKNIAFYYEFESTQEPHLNLGDSIRRDYEDLWNVVSHLVKEFNVGKSFPLRTTRRHFLRQEKSVIQEISLEKMPSVGFIPMTSAVIDEFVGDMMKDLPILKSDDPVVPSLFKQKTSDELLHWHAQRLLSDDYDRIKCHVDEQSRDPHVLDFLKKIQDYQQFYGKSLESISTKVIVTQTTRPKEDSSGASGEILQNTKPHQITKKSKKKSFLKEDQNKAQQNDDLLFSIEEEMKNNLHSGIRKLEDYLTSCASNSVKFGVEMLGLIACFKAWKKHCRGEGKISKDLSIAVQMMKRIHSLLERYPEILEAEHHQYIAKCLKYLGFNDLANSLDPTLIGDDKNKKKYSIDIGPARFQLQYMGHYLIRDERKDRDPRVQDFIPNAWQQELLDVVDKNESAVIVAPTSSGKTYASYYCMEKVLRESDVGVVVYVAPAKSLVGQVAATVENRFTKTLPAGRTLCGAFTRDYCHNVLNCQVLITVPECFEILLLAPHRQKWVERIRYVIFDEVHYLGREVGAKFWELLLVIIRCPFLVLSATINNPNLLTKWLQSVKQYWKQADKIMEEKCISEKQADKCLNFLQDHSYKNQSYEVRLVLYGERYNDLEKHICSVKHDDVYFDHFHPCAALTTDIIEKYGFPPDLTLTPQESIQLYDTMAQVWETWPRAQELCPEEFILFKNKIVIKKLDARKYEENLKAELTNWIKNGQVKKVKRVLKNLSPDSLSSSKDMVKMFPLLVEKLRQMDKLPAIFFLFKNDDVGKRAGSVCTFLEKTETKSHPHTECHSYVFAIDEVLEKVRKTQKRISTKKNPKKAEKLERKKVYRAEYINFLENLKILEISEDCTYADVKALHTEITRNKDSTLERVLPRVRFTRHGKELKALAQRGIGYHHSSMYFKEKEFVEILFVKGLIRVVTATETLALGIHMPCKSVVFAQDSVYLDALNYRQIM

SEQ ID NO: 19610 - protein, 215 aa, Homo sapiens
MPFHPVTAALMYRGIYTVPNLLSEQRPVDIPEDELEEIREAFKVFDRDGNGFISKQELGTAMRSLGYMPNEVELEVIIQRLDMDGDGQVDFEEFVTLLGPKLSTSGIPEKFHGTDFDTVFWKCDMQKLTVDELKRLLYDTFCEHLSMKDIENIIMTEEESHLGTAEECPVDVETCSNQQIRQTCVRKSLICAFAIAFIISVMLIAANQVLRSGMK

SEQ ID NO: 19611 - protein, 436 aa, Homo sapiens
MQGTPGGGTRPGPSPVDRRTLLVFSFILAAALGQMNFTGDQVLRVLAKDEKQLSLLGDLEGLKPQKVDFWRGPARPSLPVDMRVPFSELKDIKAYLESHGLAYSIMIKDIQVLLDEERQAMAKSRRLERSTNSFSYSSYHTLEEIYSWIDNFVMEHSDIVSKIQIGNSFENQSILVLKFSTGGSRHPAIWIDTGIHSREWITHATGIWTANKIVSDYGKDRVLTDILNAMDIFIELVTNPDGFAFTHSMNRLWRKNKSIRPGIFCIGVDLNRNWKSGFGGNGSNSNPCSETYHGPSPQSEPEVAAIVNFITAHGNFKALISIHSYSQMLMYPYGRLLEPVSNQRELYDLAKDAVEALYKVHGIEYIFGSISTTLYVASGITVDWAYDSGIKYAFSFELRDTGQYGFLLPATQIIPTAQETWMALRTIMEHTLNHPY

SEQ ID NO: 19612 - protein, 351 aa, Homo sapiens
MQGTPGGGTRPGPSPVDRRTLLVFSFILAAALGQMNFTGDQVLRVLAKDEKQLSLLGDLEGLKPQKVDFWRGPARPSLPVDMRVPFSELKDIKAYLESHGLAYSIMIKDIQVLLDEERQAMAKSRRLERSTNSFSYSSYHTLEEIYSWIDNFVMEHSDIVSKIQIGNSFENQSILVLKFSTGGSRHPAIWIDTGIHSREWITHATGIWTANKIVSDYGKDRVLTDILNAMDIFIELVTNPDGFAFTHSMNRLWRKNKSIRPGIFCIGVDLNRNWKSGFGGNGSNSNPCSETYHGPSPQSEPEVAAIVNFITAHGNFKALISIHSYSQMLMYPYGRLLEPVSNQRELVRLAA

SEQ ID NO: 19613 - protein, 403 aa, Homo sapiens
MQGTPGGGTRPGPSPVDRRTLLVFSFILAAALGQMNFTGDQVLRVLAKDEKQLSLLGDLEGLKPQKVDFWRGPARPSLPVDMRVPFSELKDIKAYLESHGLAYSIMIKDIQVLLDEERQAMAKSRRLERSTNSFSYSSYHTLEEIYSWIDNFVMEHSDIVSKIQIGNSFENQSILVLKFSTGGSRHPAIWIDTGIHSREWITHATGIWTANKIVSDYGKDRVLTDILNAMDIFIELVTNPDGFAFTHSMNRLWRKNKSIRPGIFCIGVDLNRNWKSGFGGNGSNSNPCSETYHGPSPQSEPEVAAIVNFITAHGNFKALISIHSYSQMLMYPYGRLLEPVSNQRELMWPVGSPSTGPMTVASSTPSALSSGTLGSMASCCRPHRSSPRPRRRGWRFGPSWSTP

SEQ ID NO: 19614 - protein, 251 aa, Homo sapiens
MELSAIGEQVFAVESIRKKRVRKGKVEYLVKWKGWPPKYSTWEPEEHILDPRLVMAYEEKEERDRASGYRKRGPKPKRLLLQRLYSMDLRSSHKAKGKEKLCFSLTCPLGSGSPEGVVKAGAPELVDKGPLVPTLPFPLRKPRKAHKYLRLSRKKFPPRGPNLESHSHRRELFLQEPPAPDVLQAAGEWEPAAQPPEEEADADLAEGPPPWTPALPSSEVTVTDITANSITVTFREAQAAEGFFRDRSGKF

SEQ ID NO: 19615 - protein, 2506 aa, Homo sapiens
MARFGDEMPARYGGGGSGAAAGVVVGSGGGRGAGGSRQGGQPGAQRMYKQSMAQRARTMALYNPIPVRQNCLTVNRSLFLFSEDNVVRKYAKKITEWPPFEYMILATIIANCIVLALEQHLPDDDKTPMSERLDDTEPYFIGIFCFEAGIKIIALGFAFHKGSYLRNGWNVMDFVVVLTGILATVGTEFDLRTLRAVRVLRPLKLVSGIPSLQVVLKSIMKAMIPLLQIGLLLFFAILIFAIIGLEFYMGKFHTTCFEEGTDDIQGESPAPCGTEEPARTCPNGTKCQPYWEGPNNGITQFDNILFAVLTVFQCITMEGWTDLLYNSNDASGNTWNWLYFIPLIIIGSFFMLNLVLGVLSGEFAKERERVENRRAFLKLRRQQQIERELNGYMEWISKAEEVILAEDETDGEQRHPFDALRRTTIKKSKTDLLNPEEAEDQLADIASVGSPFARASIKSAKLENSTFFHKKERRMRFYIRRMVKTQAFYWTVLSLVALNTLCVAIVHYNQPEWLSDFLYYAEFIFLGLFMSEMFIKMYGLGTRPYFHSSFNCFDCGVIIGSIFEVIWAVIKPGTSFGISVLRALRLLRIFKVTKYWASLRNLVVSLLNSMKSIISLLFLLFLFIVVFALLGMQLFGGQFNFDEGTPPTNFDTFPAAIMTVFQILTGEDWNEVMYDGIKSQGGVQGGMVFSIYFIVLTLFGNYTLLNVFLAIAVDNLANAQELTKDEQEEEEAANQKLALQKAKEVAEVSPLSAANMSIAVKEQQKNQKPAKSVWEQRTSEMRKQNLLASREALYNEMDPDERWKAAYTRHLRPDMKTHLDRPLVVDPQENRNNNTNKSRAAEPTVDQRLGQQRAEDFLRKQARYHDRARDPSGSAGLDARRPWAGSQEAELSREGPYGRESDHHAREGSLEQPGFWEGEAERGKAGDPHRRHVHRQGGSRESRSGSPRTGADGEHRRHRAHRRPGEEGPEDKAERRARHREGSRPARGGEGEGEGPDGGERRRRHRHGAPATYEGDARREDKERRHRRRKENQGSGVPVSGPNLSTTRPIQQDLGRQDPPLAEDIDNMKNNKLATAESAAPHGSLGHAGLPQSPAKMGNSTDPGPMLAIPAMATNPQNAASRRTPNNPGNPSNPGPPKTPENSLIVTNPSGTQTNSAKTARKPDHTTVDIPPACPPPLNHTVVQVNKNANPDPLPKKEEEKKEEEEDDRGEDGPKPMPPYSSMFILSTTNPLRRLCHYILNLRYFEMCILMVIAMSSIALAAEDPVQPNAPRNNVLRYFDYVFTGVFTFEMVIKMIDLGLVLHQGAYFRDLWNILDFIVVSGALVAFAFTGNSKGKDINTIKSLRVLRVLRPLKTIKRLPKLKAVFDCVVNSLKNVFNILIVYMLFMFIFAVVAVQLFKGKFFHCTDESKEFEKDCRGKYLLYEKNEVKARDREWKKYEFHYDNVLWALLTLFTVSTGEGWPQVLKHSVDATFENQGPSPGYRMEMSIFYVVYFVVFPFFFVNIFVALIIITFQEQGDKMMEEYSLEKNERACIDFAISAKPLTRHMPQNKQSFQYRMWQFVVSPPFEYTIMAMIALNTIVLMMKFYGASVAYENALRVFNIVFTSLFSLECVLKVMAFGILNYFRDAWNIFDFVTVLGSITDILVTEFGNNFINLSFLRLFRAARLIKLLRQGYTIRILLWTFVQSFKALPYVCLLIAMLFFIYAIIGMQVFGNIGIDVEDEDSDEDEFQITEHNNFRTFFQALMLLFRSATGEAWHNIMLSCLSGKPCDKNSGILTRECGNEFAYFYFVSFIFLCSFLMLNLFVAVIMDNFEYLTRDSSILGPHHLDEYVRVWAEYDPAAWGRMPYLDMYQMLRHMSPPLGLGKKCPARVAYKRLLRMDLPVADDNTVHFNSTLMALIRTALDIKIAKGGADKQQMDAELRKEMMAIWPNLSQKTLDLLVTPHKSTDLTVGKIYAAMMIMEYYRQSKAKKLQAMREEQDRTPLMFQRMEPPSPTQEGGPGQNALPSTQLDPGGALMAHESGLKESPSWVTQRAQEMFQKTGTWSPEQGPPTDMPNSQPNSQSVEMREMGRDGYSDSEHYLPMEGQGRAASMPRLPAENQRRRGRPRGNNLSTISDTSPMKRSASVLGPKARRLDDYSLERVPPEENQRHHQRRRDRSHRASERSLGRYTDVDTGLGTDLSMTTQSGDLPSKERDQERGRPKDRKHRQHHHHHHHHHHPPPPDKDRYAQERPDHGRARARDQRWSRSPSEGREHMAHRQGSSSVSGSPAPSTSGTSTPRRGRRQLPQTPSTPRPHVSYSPVIRKAGGSGPPQQQQQQQQQQQQQAVARPGRAATSGPRRYPGPTAEPLAGDRPPTGGHSSGRSPRMERRVPGPARSESPRACRHGGARWPASGPHVSEGPPGPRHHGYYRGSDYDEADGPGSGGGEEAMAGAYDAPPPVRHASSGATGRSPRTPRASGPACASPSRHGRRLPNGYYPAHGLARPRGPGSRKGLHEPYSESDDDWC

SEQ ID NO: 19616 - protein, 2266 aa, Homo sapiens
MARFGDEMPARYGGGGSGAAAGVVVGSGGGRGAGGSRQGGQPGAQRMYKQSMAQRARTMALYNPIPVRQNCLTVNRSLFLFSEDNVVRKYAKKITEWPPFEYMILATIIANCIVLALEQHLPDDDKTPMSERLDDTEPYFIGIFCFEAGIKIIALGFAFHKGSYLRNGWNVMDFVVVLTGILATVGTEFDLRTLRAVRVLRPLKLVSGIPSLQVVLKSIMKAMIPLLQIGLLLFFAILIFAIIGLEFYMGKFHTTCFEEGTDDIQGESPAPCGTEEPARTCPNGTKCQPYWEGPNNGITQFDNILFAVLTVFQCITMEGWTDLLYNSNDASGNTWNWLYFIPLIIIGSFFMLNLVLGVLSGEFAKERERVENRRAFLKLRRQQQIERELNGYMEWISKAEEVILAEDETDGEQRHPFDGALRRTTIKKSKTDLLNPEEAEDQLADIASVGSPFARASIKSAKLENSTFFHKKERRMRFYIRRMVKTQAFYWTVLSLVALNTLCVAIVHYNQPEWLSDFLYYAEFIFLGLFMSEMFIKMYGLGTRPYFHSSFNCFDCGVIIGSIFEVIWAVIKPGTSFGISVLRALRLLRIFKVTKYWASLRNLVVSLLNSMKSIISLLFLLFLFIVVFALLGMQLFGGQFNFDEGTPPTNFDTFPAAIMTVFQILTGEDWNEVMYDGIKSQGGVQGGMVFSIYFIVLTLFGNYTLLNVFLAIAVDNLANAQELTKVEADEQEEEEAANQKLALQKAKEVAEVSPLSAANMSIAVKEQQKNQKPAKSVWEQRTSEMRKQNLLASREALYNEMDPDERWKAAYTRHLRPDMKTHLDRPLVVDPQENRNNNTNKSRAAEPTVDQRLGQQRAEDFLRKQARYHDRARDPSGSAGLDARRPWAGSQEAELSREGPYGRESDHHAREGSLEQPGFWEGEAERGKAGDPHRRHVHRQGGSRESRSGSPRTGADGEHRRHRAHRRPGEEGPEDKAERRARHREGSRPARGGEGEGEGPDGGERRRRHRHGAPATYEGDARREDKERRHRRRKENQGSGVPVSGPNLSTTRPIQQDLGRQDPPLAEDIDNMKNNKLATAESAAPHGSLGHAGLPQSPAKMGNSTDPGPMLAIPAMATNPQNAASRRTPNNPGNPSNPGPPKTPENSLIVTNPSGTQTNSAKTARKPDHTTVDIPPACPPPLNHTVVQVNKNANPDPLPKKEEEKKEEEEDDRGEDGPKPMPPYSSMFILSTTNPLRRLCHYILNLRYFEMCILMVIAMSSIALAAEDPVQPNAPRNNVLRYFDYVFTGVFTFEMVIKMIDLGLVLHQGAYFRDLWNILDFIVVSGALVAFAFTGNSKGKDINTIKSLRVLRVLRPLKTIKRLPKLKAVFDCVVNSLKNVFNILIVYMLFMFIFAVVAVQLFKGKFFHCTDESKEFEKDCRGKYLLYEKNEVKARDREWKKYEFHYDNVLWALLTLFTVSTGEGWPQVLKHSVDATFENQGPSPGYRMEMSIFYVVYFVVFPFFFVNIFVALIIITFQEQGDKMMEEYSLEKNERACIDFAISAKPLTRHMPQNKQSFQYRMWQFVVSPPFEYTIMAMIALNTIVLMMKFYGASVAYENALRVFNIVFTSLFSLECVLKVMAFGILNYFRDAWNIFDFVTVLGSITDILVTEFGNPNNFINLSFLRLFRAARLIKLLRQGYTIRILLWTFVQSFKALPYVCLLIAMLFFIYAIIGMQVFGNIGIDVEDEDSDEDEFQITEHNNFRTFFQALMLLFRSATGEAWHNIMLSCLSGKPCDKNSGILTRECGNEFAYFYFVSFIFLCSFLMLNLFVAVIMDNFEYLTRDSSILGPHHLDEYVRVWAEYDPAAWGRMPYLDMYQMLRHMSPPLGLGKKCPARVAYKRLLRMDLPVADDNTVHFNSTLMALIRTALDIKIAKGGADKQQMDAELRKEMMAIWPNLSQKTLDLLVTPHKSTDLTVGKIYAAMMIMEYYRQSKAKKLQAMREEQDRTPLMFQRMEPPSPTQEGGPGQNALPSTQLDPGGALMAHESGLKESPSWVTQRAQEMFQKTGTWSPEQGPPTDMPNSQPNSQSVEMREMGRDGYSDSEHYLPMEGQGRAASMPRLPAENQRRRGRPRGNNLSTISDTSPMKRSASVLGPKARRLDDYSLERVPPEENQRHHQRRRDRSHRASERSLGRYTDVDTGLGTDLSMTTQSGDLPSKERDQERGRPKDRKHRQHHHHHHHHHHPPPPDKDRYAQERPDHGRARARDQRWSRSPSEGREHMAHRQ

SEQ ID NO: 19617 - protein, 2261 aa, Homo sapiens
MARFGDEMPARYGGGGSGAAAGVVVGSGGGRGAGGSRQGGQPGAQRMYKQSMAQRARTMALYNPIPVRQNCLTVNRSLFLFSEDNVVRKYAKKITEWPPFEYMILATIIANCIVLALEQHLPDDDKTPMSERLDDTEPYFIGIFCFEAGIKIIALGFAFHKGSYLRNGWNVMDFVVVLTGILATVGTEFDLRTLRAVRVLRPLKLVSGIPSLQVVLKSIMKAMIPLLQIGLLLFFAILIFAIIGLEFYMGKFHTTCFEEGTDDIQGESPAPCGTEEPARTCPNGTKCQPYWEGPNNGITQFDNILFAVLTVFQCITMEGWTDLLYNSNDASGNTWNWLYFIPLIIIGSFFMLNLVLGVLSGEFAKERERVENRRAFLKLRRQQQIERELNGYMEWISKAEEVILAEDETDGEQRHPFDGALRRTTIKKSKTDLLNPEEAEDQLADIASVGSPFARASIKSAKLENSTFFHKKERRMRFYIRRMVKTQAFYWTVLSLVALNTLCVAIVHYNQPEWLSDFLYYAEFIFLGLFMSEMFIKMYGLGTRPYFHSSFNCFDCGVIIGSIFEVIWAVIKPGTSFGISVLRALRLLRIFKVTKYWASLRNLVVSLLNSMKSIISLLFLLFLFIVVFALLGMQLFGGQFNFDEGTPPTNFDTFPAAIMTVFQILTGEDWNEVMYDGIKSQGGVQGGMVFSIYFIVLTLFGNYTLLNVFLAIAVDNLANAQELTKDEQEEEEAANQKLALQKAKEVAEVSPLSAANMSIAVKEQQKNQKPAKSVWEQRTSEMRKQNLLASREALYNEMDPDERWKAAYTRHLRPDMKTHLDRPLVVDPQENRNNNTNKSRAAEPTVDQRLGQQRAEDFLRKQARYHDRARDPSGSAGLDARRPWAGSQEAELSREGPYGRESDHHAREGSLEQPGFWEGEAERGKAGDPHRRHVHRQGGSRESRSGSPRTGADGEHRRHRAHRRPGEEGPEDKAERRARHREGSRPARGGEGEGEGPDGGERRRRHRHGAPATYEGDARREDKERRHRRRKENQGSGVPVSGPNLSTTRPIQQDLGRQDPPLAEDIDNMKNNKLATAESAAPHGSLGHAGLPQSPAKMGNSTDPGPMLAIPAMATNPQNAASRRTPNNPGNPSNPGPPKTPENSLIVTNPSGTQTNSAKTARKPDHTTVDIPPACPPPLNHTVVQVNKNANPDPLPKKEEEKKEEEEDDRGEDGPKPMPPYSSMFILSTTNPLRRLCHYILNLRYFEMCILMVIAMSSIALAAEDPVQPNAPRNNVLRYFDYVFTGVFTFEMVIKMIDLGLVLHQGAYFRDLWNILDFIVVSGALVAFAFTGNSKGKDINTIKSLRVLRVLRPLKTIKRLPKLKAVFDCVVNSLKNVFNILIVYMLFMFIFAVVAVQLFKGKFFHCTDESKEFEKDCRGKYLLYEKNEVKARDREWKKYEFHYDNVLWALLTLFTVSTGEGWPQVLKHSVDATFENQGPSPGYRMEMSIFYVVYFVVFPFFFVNIFVALIIITFQEQGDKMMEEYSLEKNERACIDFAISAKPLTRHMPQNKQSFQYRMWQFVVSPPFEYTIMAMIALNTIVLMMKFYGASVAYENALRVFNIVFTSLFSLECVLKVMAFGILNYFRDAWNIFDFVTVLGSITDILVTEFGNNFINLSFLRLFRAARLIKLLRQGYTIRILLWTFVQSFKALPYVCLLIAMLFFIYAIIGMQVFGNIGIDVEDEDSDEDEFQITEHNNFRTFFQALMLLFRSATGEAWHNIMLSCLSGKPCDKNSGILTRECGNEFAYFYFVSFIFLCSFLMLNLFVAVIMDNFEYLTRDSSILGPHHLDEYVRVWAEYDPAACGRIHYKDMYSLLRVISPPLGLGKKCPHRVACKRLLRMDLPVADDNTVHFNSTLMALIRTALDIKIAKGGADKQQMDAELRKEMMAIWPNLSQKTLDLLVTPHKSTDLTVGKIYAAMMIMEYYRQSKAKKLQAMREEQDRTPLMFQRMEPPSPTQEGGPGQNALPSTQLDPGGALMAHESGLKESPSWVTQRAQEMFQKTGTWSPEQGPPTDMPNSQPNSQSVEMREMGRDGYSDSEHYLPMEGQGRAASMPRLPAENQRRRGRPRGNNLSTISDTSPMKRSASVLGPKARRLDDYSLERVPPEENQRHHQRRRDRSHRASERSLGRYTDVDTGLGTDLSMTTQSGDLPSKERDQERGRPKDRKHRQHHHHHHHHHHPPPPDKDRYAQERPDHGRARARDQRWSRSPSEGREHMAHRQ

SEQ ID NO: 19618 - protein, 2505 aa, Homo sapiens
MARFGDEMPARYGGGGSGAAAGVVVGSGGGRGAGGSRQGGQPGAQRMYKQSMAQRARTMALYNPIPVRQNCLTVNRSLFLFSEDNVVRKYAKKITEWPPFEYMILATIIANCIVLALEQHLPDDDKTPMSERLDDTEPYFIGIFCFEAGIKIIALGFAFHKGSYLRNGWNVMDFVVVLTGILATVGTEFDLRTLRAVRVLRPLKLVSGIPSLQVVLKSIMKAMIPLLQIGLLLFFAILIFAIIGLEFYMGKFHTTCFEEGTDDIQGESPAPCGTEEPARTCPNGTKCQPYWEGPNNGITQFDNILFAVLTVFQCITMEGWTDLLYNSNDASGNTWNWLYFIPLIIIGSFFMLNLVLGVLSGEFAKERERVENRRAFLKLRRQQQIERELNGYMEWISKAEEVILAEDETDGEQRHPFDGALRRTTIKKSKTDLLNPEEAEDQLADIASVGSPFARASIKSAKLENSTFFHKKERRMRFYIRRMVKTQAFYWTVLSLVALNTLCVAIVHYNQPEWLSDFLYYAEFIFLGLFMSEMFIKMYGLGTRPYFHSSFNCFDCGVIIGSIFEVIWAVIKPGTSFGISVLRALRLLRIFKVTKYWASLRNLVVSLLNSMKSIISLLFLLFLFIVVFALLGMQLFGGQFNFDEGTPPTNFDTFPAAIMTVFQILTGEDWNEVMYDGIKSQGGVQGGMVFSIYFIVLTLFGNYTLLNVFLAIAVDNLANAQELTKDEQEEEEAANQKLALQKAKEVAEVSPLSAANMSIAVKEQQKNQKPAKSVWEQRTSEMRKQNLLASREALYNEMDPDERWKAAYTRHLRPDMKTHLDRPLVVDPQENRNNNTNKSRAAEPTVDQRLGQQRAEDFLRKQARYHDRARDPSGSAGLDARRPWAGSQEAELSREGPYGRESDHHAREGSLEQPGFWEGEAERGKAGDPHRRHVHRQGGSRESRSGSPRTGADGEHRRHRAHRRPGEEGPEDKAERRARHREGSRPARGGEGEGEGPDGGERRRRHRHGAPATYEGDARREDKERRHRRRKENQGSGVPVSGPNLSTTRPIQQDLGRQDPPLAEDIDNMKNNKLATAESAAPHGSLGHAGLPQSPAKMGNSTDPGPMLAIPAMATNPQNAASRRTPNNPGNPSNPGPPKTPENSLIVTNPSGTQTNSAKTARKPDHTTVDIPPACPPPLNHTVVQVNKNANPDPLPKKEEEKKEEEEDDRGEDGPKPMPPYSSMFILSTTNPLRRLCHYILNLRYFEMCILMVIAMSSIALAAEDPVQPNAPRNNVLRYFDYVFTGVFTFEMVIKMIDLGLVLHQGAYFRDLWNILDFIVVSGALVAFAFTGNSKGKDINTIKSLRVLRVLRPLKTIKRLPKLKAVFDCVVNSLKNVFNILIVYMLFMFIFAVVAVQLFKGKFFHCTDESKEFEKDCRGKYLLYEKNEVKARDREWKKYEFHYDNVLWALLTLFTVSTGEGWPQVLKHSVDATFENQGPSPGYRMEMSIFYVVYFVVFPFFFVNIFVALIIITFQEQGDKMMEEYSLEKNERACIDFAISAKPLTRHMPQNKQSFQYRMWQFVVSPPFEYTIMAMIALNTIVLMMKFYGASVAYENALRVFNIVFTSLFSLECVLKVMAFGILNYFRDAWNIFDFVTVLGSITDILVTEFGNNFINLSFLRLFRAARLIKLLRQGYTIRILLWTFVQSFKALPYVCLLIAMLFFIYAIIGMQVFGNIGIDVEDEDSDEDEFQITEHNNFRTFFQALMLLFRSATGEAWHNIMLSCLSGKPCDKNSGILTRECGNEFAYFYFVSFIFLCSFLMLNLFVAVIMDNFEYLTRDSSILGPHHLDEYVRVWAEYDPAACGRIHYKDMYSLLRVISPPLGLGKKCPHRVACKRLLRMDLPVADDNTVHFNSTLMALIRTALDIKIAKGGADKQQMDAELRKEMMAIWPNLSQKTLDLLVTPHKSTDLTVGKIYAAMMIMEYYRQSKAKKLQAMREEQDRTPLMFQRMEPPSPTQEGGPGQNALPSTQLDPGGALMAHESGLKESPSWVTQRAQEMFQKTGTWSPEQGPPTDMPNSQPNSQSVEMREMGRDGYSDSEHYLPMEGQGRAASMPRLPAENQRRRGRPRGNNLSTISDTSPMKRSASVLGPKARRLDDYSLERVPPEENQRHHQRRRDRSHRASERSLGRYTDVDTGLGTDLSMTTQSGDLPSKERDQERGRPKDRKHRQHHHHHHHHHHPPPPDKDRYAQERPDHGRARARDQRWSRSPSEGREHMAHRQGSSSVSGSPAPSTSGTSTPRRGRRQLPQTPSTPRPHVSYSPVIRKAGGSGPPQQQQQQQQQQQAVARPGRAATSGPRRYPGPTAEPLAGDRPPTGGHSSGRSPRMERRVPGPARSESPRACRHGGARWPASGPHVSEGPPGPRHHGYYRGSDYDEADGPGSGGGEEAMAGAYDAPPPVRHASSGATGRSPRTPRASGPACASPSRHGRRLPNGYYPAHGLARPRGPGSRKGLHEPYSESDDDWC

SEQ ID NO: 19619 - protein, 2249 aa, Homo sapiens
MARFGDEMPARYGGGGSGAAAGVVVGSGGGRGAGGSRQGGQPGAQRMYKQSMAQRARTMALYNPIPVRQNCLTVNRSLFLFSEDNVVRKYAKKITEWPPFEYMILATIIANCIVLALEQHLPDDDKTPMSERLDDTEPYFIGIFCFEAGIKIIALGFAFHKGSYLRNGWNVMDFVVVLTGILATVGTEFDLRTLRAVRVLRPLKLVSGIPSLQVVLKSIMKAMIPLLQIGLLLFFAILIFAIIGLEFYMGKFHTTCFEEGTDDIQGESPAPCGTEEPARTCPNGTKCQPYWEGPNNGITQFDNILFAVLTVFQCITMEGWTDLLYNSNDASGNTWNWLYFIPLIIIGSFFMLNLVLGVLSGEFAKERERVENRRAFLKLRRQQQIERELNGYMEWISKAEEVILAEDETDGEQRHPFDGALRRTTIKKSKTDLLNPEEAEDQLADIASVGSPFARASIKSAKLENSTFFHKKERRMRFYIRRMVKTQAFYWTVLSLVALNTLCVAIVHYNQPEWLSDFLYYAEFIFLGLFMSEMFIKMYGLGTRPYFHSSFNCFDCGVIIGSIFEVIWAVIKPGTSFGISVLRALRLLRIFKVTKYWASLRNLVVSLLNSMKSIISLLFLLFLFIVVFALLGMQLFGGQFNFDEGTPPTNFDTFPAAIMTVFQILTGEDWNEVMYDGIKSQGGVQGGMVFSIYFIVLTLFGNYTLLNVFLAIAVDNLANAQELTKDEQEEEEAANQKLALQKAKEVAEVSPLSAANMSIAVKEQQKNQKPAKSVWEQRTSEMRKQNLLASREALYNEMDPDERWKAAYTRHLRPDMKTHLDRPLVVDPQENRNNNTNKSRAAEPTVDQRLGQQRAEDFLRKQARYHDRARDPSGSAGLDARRPWAGSQEAELSREGPYGRESDHHAREGSLEQPGFWEGEAERGKAGDPHRRHVHRQGGSRESRSGSPRTGADGEHRRHRAHRRPGEEGPEDKAERRARHREGSRPARGGEGEGEGPDGGERRRRHRHGAPATYEGDARREDKERRHRRRKENQGSGVPVSGPNLSTTRPIQQDLGRQDPPLAEDIDNMKNNKLATAESAAPHGSLGHAGLPQSPAKMGNSTDPGPMLAIPAMATNPQNAASRRTPNNPGNPSNPGPPKTPENSLIVTNPSGTQTNSAKTARKPDHTTVDIPPACPPPLNHTVVQVNKNANPDPLPKKEEEKKEEEEDDRGEDGPKPMPPYSSMFILSTTNPLRRLCHYILNLRYFEMCILMVIAMSSIALAAEDPVQPNAPRNNVLRYFDYVFTGVFTFEMVIKMIDLGLVLHQGAYFRDLWNILDFIVVSGALVAFAFTGNSKGKDINTIKSLRVLRVLRPLKTIKRLPKLKAVFDCVVNSLKNVFNILIVYMLFMFIFAVVAVQLFKGKFFHCTDESKEFEKDCRGKYLLYEKNEVKARDREWKKYEFHYDNVLWALLTLFTVSTGEGWPQVLKHSVDATFENQGPSPGYRMEMSIFYVVYFVVFPFFFVNIFVALIIITFQEQGDKMMEEYSLEKNERACIDFAISAKPLTRHMPQNKQSFQYRMWQFVVSPPFEYTIMAMIALNTIVLMMKFYGASVAYENALRVFNIVFTSLFSLECVLKVMAFGILNYFRDAWNIFDFVTVLGSITDILVTEFGNNFINLSFLRLFRAARLIKLLRQGYTIRILLWTFVQSFKALPYVCLLIAMLFFIYAIIGMQVFGNIGIDVEDEDSDEDEFQITEHNNFRTFFQALMLLFRSATGEAWHNIMLSCLSGKPCDKNSGILTRECGNEFAYFYFVSFIFLCSFLMLNLFVAVIMDNFEYLTRDSSILGPHHLDEYVRVWAEYDPAAWGRMPYLDMYQMLRHMSPPLGLGKKCPARVAYKRLLRMDLPVADDNTVHFNSTLMALIRTALDIKIAKGGADKQQMDAELRKEMMAIWPNLSQKTLDLLVTPHKSTDLTVGKIYAAMMIMEYYRQSKAKKLQAMREEQDRTPLMFQRMEPPSPTQEGGPGQNALPSTQLDPGGALMAHESGLKESPSWVTQRAQEMFQKTGTWSPEQGPPTDMPNSQPNSQSVEMREMGRDGYSDSEHYLPMEGQGRAASMPRLPAENQTISDTSPMKRSASVLGPKARRLDDYSLERVPPEENQRHHQRRRDRSHRASERSLGRYTDVDTGLGTDLSMTTQSGDLPSKERDQERGRPKDRKHRQHHHHHHHHHHPPPPDKDRYAQERPDHGRARARDQRWSRSPSEGREHMAHRQ

SEQ ID NO: 19620 - protein, 2493 aa, Homo sapiens
MARFGDEMPARYGGGGSGAAAGVVVGSGGGRGAGGSRQGGQPGAQRMYKQSMAQRARTMALYNPIPVRQNCLTVNRSLFLFSEDNVVRKYAKKITEWPPFEYMILATIIANCIVLALEQHLPDDDKTPMSERLDDTEPYFIGIFCFEAGIKIIALGFAFHKGSYLRNGWNVMDFVVVLTGILATVGTEFDLRTLRAVRVLRPLKLVSGIPSLQVVLKSIMKAMIPLLQIGLLLFFAILIFAIIGLEFYMGKFHTTCFEEGTDDIQGESPAPCGTEEPARTCPNGTKCQPYWEGPNNGITQFDNILFAVLTVFQCITMEGWTDLLYNSNDASGNTWNWLYFIPLIIIGSFFMLNLVLGVLSGEFAKERERVENRRAFLKLRRQQQIERELNGYMEWISKAEEVILAEDETDGEQRHPFDGALRRTTIKKSKTDLLNPEEAEDQLADIASVGSPFARASIKSAKLENSTFFHKKERRMRFYIRRMVKTQAFYWTVLSLVALNTLCVAIVHYNQPEWLSDFLYYAEFIFLGLFMSEMFIKMYGLGTRPYFHSSFNCFDCGVIIGSIFEVIWAVIKPGTSFGISVLRALRLLRIFKVTKYWASLRNLVVSLLNSMKSIISLLFLLFLFIVVFALLGMQLFGGQFNFDEGTPPTNFDTFPAAIMTVFQILTGEDWNEVMYDGIKSQGGVQGGMVFSIYFIVLTLFGNYTLLNVFLAIAVDNLANAQELTKDEQEEEEAANQKLALQKAKEVAEVSPLSAANMSIAVKEQQKNQKPAKSVWEQRTSEMRKQNLLASREALYNEMDPDERWKAAYTRHLRPDMKTHLDRPLVVDPQENRNNNTNKSRAAEPTVDQRLGQQRAEDFLRKQARYHDRARDPSGSAGLDARRPWAGSQEAELSREGPYGRESDHHAREGSLEQPGFWEGEAERGKAGDPHRRHVHRQGGSRESRSGSPRTGADGEHRRHRAHRRPGEEGPEDKAERRARHREGSRPARGGEGEGEGPDGGERRRRHRHGAPATYEGDARREDKERRHRRRKENQGSGVPVSGPNLSTTRPIQQDLGRQDPPLAEDIDNMKNNKLATAESAAPHGSLGHAGLPQSPAKMGNSTDPGPMLAIPAMATNPQNAASRRTPNNPGNPSNPGPPKTPENSLIVTNPSGTQTNSAKTARKPDHTTVDIPPACPPPLNHTVVQVNKNANPDPLPKKEEEKKEEEEDDRGEDGPKPMPPYSSMFILSTTNPLRRLCHYILNLRYFEMCILMVIAMSSIALAAEDPVQPNAPRNNVLRYFDYVFTGVFTFEMVIKMIDLGLVLHQGAYFRDLWNILDFIVVSGALVAFAFTGNSKGKDINTIKSLRVLRVLRPLKTIKRLPKLKAVFDCVVNSLKNVFNILIVYMLFMFIFAVVAVQLFKGKFFHCTDESKEFEKDCRGKYLLYEKNEVKARDREWKKYEFHYDNVLWALLTLFTVSTGEGWPQVLKHSVDATFENQGPSPGYRMEMSIFYVVYFVVFPFFFVNIFVALIIITFQEQGDKMMEEYSLEKNERACIDFAISAKPLTRHMPQNKQSFQYRMWQFVVSPPFEYTIMAMIALNTIVLMMKFYGASVAYENALRVFNIVFTSLFSLECVLKVMAFGILNYFRDAWNIFDFVTVLGSITDILVTEFGNNFINLSFLRLFRAARLIKLLRQGYTIRILLWTFVQSFKALPYVCLLIAMLFFIYAIIGMQVFGNIGIDVEDEDSDEDEFQITEHNNFRTFFQALMLLFRSATGEAWHNIMLSCLSGKPCDKNSGILTRECGNEFAYFYFVSFIFLCSFLMLNLFVAVIMDNFEYLTRDSSILGPHHLDEYVRVWAEYDPAAWGRMPYLDMYQMLRHMSPPLGLGKKCPARVAYKRLLRMDLPVADDNTVHFNSTLMALIRTALDIKIAKGGADKQQMDAELRKEMMAIWPNLSQKTLDLLVTPHKSTDLTVGKIYAAMMIMEYYRQSKAKKLQAMREEQDRTPLMFQRMEPPSPTQEGGPGQNALPSTQLDPGGALMAHESGLKESPSWVTQRAQEMFQKTGTWSPEQGPPTDMPNSQPNSQSVEMREMGRDGYSDSEHYLPMEGQGRAASMPRLPAENQTISDTSPMKRSASVLGPKARRLDDYSLERVPPEENQRHHQRRRDRSHRASERSLGRYTDVDTGLGTDLSMTTQSGDLPSKERDQERGRPKDRKHRQHHHHHHHHHHPPPPDKDRYAQERPDHGRARARDQRWSRSPSEGREHMAHRQGSSSVSGSPAPSTSGTSTPRRGRRQLPQTPSTPRPHVSYSPVIRKAGGSGPPQQQQQQQQQQQAVARPGRAATSGPRRYPGPTAEPLAGDRPPTGGHSSGRSPRMERRVPGPARSESPRACRHGGARWPASGPHVSEGPPGPRHHGYYRGSDYDEADGPGSGGGEEAMAGAYDAPPPVRHASSGATGRSPRTPRASGPACASPSRHGRRLPNGYYPAHGLARPRGPGSRKGLHEPYSESDDDWC

SEQ ID NO: 19621 - protein, 1427 aa, Homo sapiens
MASWGGEKRGGAEGSPKPAVYATRKTPSVGSQGDQWYLGYPGDQWSSGFPYSWWKNSVGSESKHGEGALDQPQHDVRLEDLGELHRAARSGDVPGVEHILAPGDTGVDKRDRKKSIQQLVPEYKEKQTPESLPQNNNPDWHPTNLTLSDETCQRSKNLKVDDKCPSVSPSMPENQSATKELGQMNLTEREKMDTGVVLLSGNDTLHDLCQSQLPENKESKEAEQDSELTSEEEQERLKGCENKQPQKTSQEPEMAKDCDREDIPIYPVLPHVQKSEEMWIEQGKLEWKNQLKLVINELKQRFGEIYEKYKIPACPEEEPLLDNSTRGTDVKDIPFNLTNNIPGCEEEDASEISVSVVFETFPEQKEPSLKNIIHPYYHPYSGSQEHVCQSSSKFHLHENKLDCDNDNKPGIGHIFSTDKNFHNDASTKKARNPEVVMVEMKEDQEFDLQMTKNMNQNSDSGSTNNYKSLKPKLENLSSLPPDSDRTSEVYLHEELQQDMQKFKNEVNTLEEEFLALKKEDVQLHKDVEEEMEKHRSNSTELSGTLTDGTTVGNDDDGLNQQIPRKENGEHDRPADKTSNEKNEVKNQIYPEADFADSMEPSEIASEDCELSHSVYENFMLLIEQLRMEYKDSASLPRIQDTFCLCEHLLKLKNNHCDQLTVKLKQMENMVSVLQNELSETKKTKLQLELQKIEWEKELYDLRLALKQENEEKRNADMLYNKDSEQLRIKEEECGKVVETKQQLKWNLRRLVKELRTVRNNLDLVVQERNDAQKQLSEEQDARILQDQILTSKQKELEMARKKMNSEISHRHQKEKDLFHEDCMLQEEIALLRLEIDTIKNQNKQKEKKYFEDIEAVKEKNDNLQKIIKLNEETLTETILQYSGQLNNLTAENKILNSELENGKQNQERLEIEMESYRCRLAAAVRDCDQSQTARDLKLDFQRTRQEWVRLHDKMKVDMSGLQAKNEILSEKLSNAESKINSLQIQLHNTRDALGRESLILERVQRDLSQTQCQKKETEQMYQIEQSKLKKYIAKQESVEERLSQLQSENMLLRQQLDDAHKKANSQEKTSSTIQDQFHSAAKNLQAESEKQILSLQEKNKELMDEYNHLKERMDQCEKEKAGRKIDLTEAQETVPSRCLHLDAENEVLQLQQTLFSMKAIQKQCETLQKNKKQLKQEVVNLKSYMERNMLERGKAEWHKLLIEERARKEIEEKLNEAILTLQKQAAVSHEQLVQLREDNTTSIKTQMELTIKDLESEISRIKTSQADFNKTELERYKELYLEEVKVRESLSNELSRTNEMIAEVSTQLTVEKEQTRSRSLFTAYATRPVLESPCVGNLNDSEGLNRKHIPRKKRSALKDMESYLLKMQQKLQNDLTAEVAGSSQTGLHRIPQCSSFSSSSLHLLLCSICQPFFLILQLLLNMNLDPI

SEQ ID NO: 19622 - protein, 691 aa, Homo sapiens
MFNCRLALKQENEEKRNADMLYNKDSEQLRIKEEECGKVVETKQQLKWNLRRLVKELRTVRNNLDLVVQERNDAQKQLSEEQDARILQDQILTSKQKELEMARKKMNSEISHRHQKEKDLFHEDCMLQEEIALLRLEIDTIKNQNKQKEKKYFEDIEAVKEKNDNLQKIIKLNEETLTETILQYSGQLNNLTAENKILNSELENGKQNQERLEIEMESYRCRLAAAVRDCDQSQTARDLKLDFQRTRQEWVRLHDKMKVDMSGLQAKNEILSEKLSNAESKINSLQIQLHNTRDALGRESLILERVQRDLSQTQCQKKETEQMYQIEQSKLKKYIAKQESVEERLSQLQSENMLLRQQLDDAHKKANSQEKTSSTIQDQFHSAAKNLQAESEKQILSLQEKNKELMDEYNHLKERMDQCEKEKAGRKIDLTEAQETVPSRCLHLDAENEVLQLQQTLFSMKAIQKQCETLQKNKKQLKQEVVNLKSYMERNMLERGKAEWHKLLIEERARKEIEEKLNEAILTLQKQAAVSHEQLVQLREDNTTSIKTQMELTIKDLESEISRIKTSQADFNKTELERYKELYLEEVKVRESLSNELSRTNEMIAEVSTQLTVEKEQTRSRSLFTAYATRPVLESPCVGNLNDSEGLNRKHIPRKKRSALKDMESYLLKVSYLFSFGVQISDRILVCYLVK

SEQ ID NO: 19623 - protein, 1154 aa, Homo sapiens
MASWGGEKRGGAEGSPKPAVYATRKTPSVGSQGDQWYLGYPGDQWSSGFPYSWWKNSVGSESKHGEGALDQPQHDVRLEDLGELHRAARSGDVPGVEHILAPGDTGVDKRDRKKSIQQLVPEYKEKQTPESLPQNNNPDWHPTNLTLSDETCQRSKNLKVDDKCPSVSPSMPENQSATKELGQMNLTEREKMDTGVVLLSGNDTLHDLCQSQLPENKESKEAEQDSELTSEEEQERLKGCENKQPQVEEEMEKHRSNSTELSGTLTDGTTVGNDDDGLNQQIPRKENGEHDRPADKTSNEKNEVKNQIYPEADFADSMEPSEIASEDCELSHSVYENFMLLIEQLRMEYKDSASLPRIQDTFCLCEHLLKLKNNHCDQLTVKLKQMENMVSVLQNELSETKKTKLQLELQKIEWEKELYDLRLALKQENEEKRNADMLYNKDSEQLRIKEEECGKVVETKQQLKWNLRRLVKELRTVRNNLDLVVQERNDAQKQLSEEQDARILQDQILTSKQKELEMARKKMNSEISHRHQKEKDLFHEDCMLQEEIALLRLEIDTIKNQNKQKEKKYFEDIEAVKEKNDNLQKIIKLNEETLTETILQYSGQLNNLTAENKILNSELENGKQNQERLEIEMESYRCRLAAAVRDCDQSQTARDLKLDFQRTRQEWVRLHDKMKVDMSGLQAKNEILSEKLSNAESKINSLQIQLHNTRDALGRESLILERVQRDLSQTQCQKKETEQMYQIEQSKLKKYIAKQESVEERLSQLQSENMLLRQQLDDAHKKANSQEKTSSTIQDQFHSAAKNLQAESEKQILSLQEKNKELMDEYNHLKERMDQCEKEKAGRKVVMREFQQEWTDLLKQQPTSEATSRCHINLDETQDSKKKLGQIRSEIDLTEAQETVPSRCLHLDAENEVLQLQQTLFSMKAIQKQCETLQKNKKQLKQEVVNLKSYMERNMLERGKAEWHKLLIEERARKEIEEKLNEAILTLQKQAAVSHEQLVQLREDNTTSIKTQMELTIKDLESEISRIKTSQADFNKTELERYKELYLEEVKVRESLSNELSRTNEMIAEVSTQLTVEKEQTRSRSLFTAYATRPVLESPCVGNLNDSEGLNRKHIPRKKRSALKDMESYLLKVSYLFSFGVQISDRILVCYLVK

SEQ ID NO: 19624 - protein, 2339 aa, Homo sapiens [sequence omitted]

SEQ ID NO: 19625 - protein, 2237 aa, Homo sapiens
MVRFGDELGGRYGGPGGGERARGGGAGGAGGPGPGGLQPGQRVLYKQSIAQRARTMALYNPIPVKQNCFTVNRSLFVFSEDNVVRKYAKRITEWPPFEYMILATIIANCIVLALEQHLPDGDKTPMSERLDDTEPYFIGIFCFEAGIKIIALGFVFHKGSYLRNGWNVMDFVVVLTGILATAGTDFDLRTLRAVRVLRPLKLVSGIPSLQVVLKSIMKAMVPLLQIGLLLFFAILMFAIIGLEFYMGKFHKACFPNSTDAEPVGDFPCGKEAPARLCEGDTECREYWPGPNFGITNFDNILFAILTVFQCITMEGWTDILYNTNDAAGNTWNWLYFIPLIIIGSFFMLNLVLGVLSGEFAKERERVENRRAFLKLRRQQQIERELNGYLEWIFKAEEVMLAEEDRNAEEKSPLDVLKRAATKKSRNDLIHAEEGEDRFADLCAVGSPFARASLKSGKTESSSYFRRKEKMFRFFIRRMVKAQSFYWVVLCVVALNTLCVAMVHYNQPRRLTTTLYFAEFVFLGLFLTEMSLKMYGLGPRSYFRSSFNCFDFGVIVGSVFEVVWAAIKPGSSFGISVLRALRLLRIFKVTKYWSSLRNLVVSLLNSMKSIISLLFLLFLFIVVFALLGMQLFGGQFNFQDETPTTNFDTFPAAILTVFQILTGEDWNAVMYHGIESQGGVSKGMFSSFYFIVLTLFGNYTLLNVFLAIAVDNLANAQELTKDEEEMEEAANQKLALQKAKEVAEVSPMSAANISIAARQQNSAKARSVWEQRASQLRLQNLRASCEALYSEMDPEERLRFATTRHLRPDMKTHLDRPLVVELGRDGARGPVGGKARPEAAEAPEGVDPPRRHHRHRDKDKTPAAGDQDRAEAPKAESGEPGAREERPRPHRSHSKEAAGPPEARSERGRGPGPEGGRRHHRRGSPEEAAEREPRRHRAHRHQDPSKECAGAKGERRARHRGGPRAGPREAESGEEPARRHRARHKAQPAHEAVEKETTEKEATEKEAEIVEADKEKELRNHQPREPHCDLETSGTVTVGPMHTLPSTCLQKVEEQPEDADNQRNVTRMGSQPPDPNTIVHIPVMLTGPLGEATVVPSGNVDLESQAEGKKEVEADDVMRSGPRPIVPYSSMFCLSPTNLLRRFCHYIVTMRYFEVVILVVIALSSIALAAEDPVRTDSPRNNALKYLDYIFTGVFTFEMVIKMIDLGLLLHPGAYFRDLWNILDFIVVSGALVAFAFSGSKGKDINTIKSLRVLRVLRPLKTIKRLPKLKAVFDCVVNSLKNVLNILIVYMLFMFIFAVIAVQLFKGKFFYCTDESKELERDCRGQYLDYEKEEVEAQPRQWKKYDFHYDNVLWALLTLFTVSTGEGWPMVLKHSVDATYEEQGPSPGYRMELSIFYVVYFVVFPFFFVNIFVALIIITFQEQGDKVMSECSLEKNERACIDFAISAKPLTRYMPQNRQSFQYKTWTFVVSPPFEYFIMAMIALNTVVLMMKFYDAPYEYELMLKCLNIVFTSMFSMECVLKIIAFGVLNYFRDAWNVFDFVTVLGSITDILVTEIAETNNFINLSFLRLFRAARLIKLLRQGYTIRILLWTFVQSFKALPYVCLLIAMLFFIYAIIGMQVFGNIALDDDTSINRHNNFRTFLQALMLLFRSATGEAWHEIMLSCLSNQACDEQANATECGSDFAYFYFVSFIFLCSFLMLNLFVAVIMDNFEYLTRDSSILGPHHLDEFIRVWAEYDPAACGRISYNDMFEMLKHMSPPLGLGKKCPARVAYKRLVRMNMPISNEDMTVHFTSTLMALIRTALEIKLAPAGTKQHQCDAELRKEISVVWANLPQKTLDLLVPPHKPDEMTVGKVYAALMIFDFYKQNKTTRDQMQQAPGGLSQMGPVSLFHPLKATLEQTQPAVLRGARVFLRQKSSTSLSNGGAIQNQESGIKESVSWGTQRTQDAPHEARPPLERGHSTEIPVGRSGALAVDVQMQSITRRGPDGEPQPGLESQGRAASMPRLAAETQPVTDASPMKRSISTLAQRPRGTHLCSTTPDRPPPSQASSHHHHHRCHRRRDRKQRSLEKGPSLSADMDGAPSSAVGPGLPPGEGPTGCRRERERRQERGRSQERRQPSSSSSEKQRFYSCDRFGGREPPKPKPSLSSHPTSPTAGQEPGPHPQAGSAVGFPNTTPCCRETPSASPWPLALELALTLTWGSVWTVRPLSTPCLRTLSLSRRLWPPTRAAPPGLPTCPP

SEQ ID NO: 19626 - protein, 79 aa, Homo sapiens
MSEFWHKLGCCVVEKPQPKKKRRRIDRTMIGEPMNFVHLTHIGSGEMGAGDGLAMTGAVQEQMRSKGNRDRPWSNSRGL

SEQ ID NO: 19627 - protein, 38 aa, Homo sapiens
MSEFWHKLGCCVVEKPQPVSLPTPHPNPKSSQLLCAVR

SEQ ID NO: 19628 - protein, 316 aa, Homo sapiens
MSLGIMEEEDLAEYFRLQYGERLLQMLQKLPNVEGASESPSIWLLEKKKETEIMHQTMVQKKKMFQRRMETLNLRWEELGVKEAQLKAHIQKSEQFIQENDQKRIRAMKKANKERELKCQHMQELTKRKQEMVALRLEHQRLSAKLKDYYIFNKYLEKVVENSEFEEIHEVIARYKTLVSMRHDLMQSAQEGQEKIERAKARLARYMEEKDDEILQQNNELARLQMRFDRARSNVIFWESRWAHIQNTAAKKTLLLGTIKMATLNLFQIVSKHLKEVTEVALEDTHKQLDMIQQFIQDRSDIWAEVKKKEQQRVRI

SEQ ID NO: 19629 - protein, 242 aa, Homo sapiens
MSLGIMEEEDLAEYFRLQYGERLLQMLQKLPNVEGASESPSIWLLEKKKETEIMHQTMVQKKKMFQRRMETLNLRWEELGVKEAQLKAHIQKSEQFIQENDQKRIRAMKKANKERELKCQHMQELTKRKQEMVALRLEHQRLSAKLKDYYIFNKYLEKVVENSEESRWAHIQNTAAKKTLLLGTIKMATLNLFQIVSKHLKEVTEVALEDTHKQLDMIQQFIQDRSDIWAEVKKKEQQRVRI

SEQ ID NO: 19630 - protein, 373 aa, Homo sapiens
MWAAGRWGPTFPSSYAGFSADCRPRSRPSSDSCSVPMTGARGQGLEVVRSPSPPLPLSCSNSTRSLLSPLGHQSFQFDEDDGDGEDEEDVDDEEDVDEDAHDSEAKVASLRGMELQGCASTQVESENNQEEQKQVRLPESRLTPWEVWFIGKEKEERDRLQLKALEELNQQLEKRKEMEEREKRKIIAEEKHKEWVQKKNEQKRKEREQKINKEMEEKAAKELEKEYLQEKAKEKYQEWLKKKNAEECERKKKEKEKEKQQQAEIQEKKEIAEKKFQEWLENAKHKPRPAAKSYGYANGKLTGFYSGNSYPEPAFYNPIPWKPIHMPPPKEAKDLSGRKSKRPVISQPHKSSSLVIHKARSNLCLGTLCRIQR

SEQ ID NO: 19631 - protein, 229 aa, Homo sapiens
MWAAGRWGPTFPSSYAGFSADCRPRSRPSSDSCSVPMTGARGQGLEVVRSPSPPLPLSCSNSTRSLLSPLGHQSFQFDEDDGDGEDEEDVDDEEDVDEDAHDSEAKVASLRGMELQGCASTQVESENNQEEQKQVRLPESRLTPWEVWFIGKEKEERDRLQLKALEELNQQLEKRKEMEEREKRKIIAEEKHKEWVQKKNEQVRRGKWIHTLTSLLQNISSYYTSLPRF

SEQ ID NO: 19632 - protein, 141 aa, Homo sapiens
MAGEEINEDYPVEIHEYLSAFENSIGAVDEMLKTMMSVSRNELLQKLDPLEQAKVDLVSAYTLNSMFWVYLATQGVNPKEHPVKQELERIRVYMNRVKEITDKKKAGKLDRGAASRFVKNALWEPKSKNASKVANKGKSKS

SEQ ID NO: 19633 - protein, 88 aa, Homo sapiens
MALSTIVSQRKQIKRKAPRGFLKRVFKRKKPQLRLEKSGDLLVHLNCLLFVHRLAEESRTNACASKCRVINKEHVLAAAKVILKKSRG

SEQ ID NO: 19634 - protein, 103 aa, Homo sapiens
MALSTIVSQRKQIKRKAPRGFLKRVFKRKKPQLRLEKSGDLLVRFHPFSGWEWGTGEVHLNCLLFVHRLAEESRTNACASKCRVINKEHVLAAAKVILKKSRG

SEQ ID NO: 19635 - protein, 1113 aa, Homo sapiens
MESKAWESNNEDLLSSSGVTSNGGSSSSFFVSSIRGTIIENTSSAGTLTQVPFFPKYEVELDSPRKIIPSPGKEHFERVLEEYSHQVKDLQRRLNESNELHEKQKFYLRQSVIDLQTKLQEMQMERDAMADIRRRESQSQEDLRNQLQNTVHELEAAKCLKEDMLKDSNTQIEQLRKMMLSHEGVLQEIRSILVDFEEASGKKICEHDSMSTLHFRSLGSAISKILRELDTEISYLKGRIFPVEDQLEALKSESQNKIELLLQQHQDRIEQLISEHEVEITGLTEKASSARSQANSIQSQMEIIQEQARNQNSMYMRQLSDLESTVSQLRSELREAKRMYEDKTEELEKQLVLANSELTEARTERDQFSQESGNLDDQLQKLLADLHKREKELSLEKEQNKRLWDRDTGNSITIDHLRRELDNRNMEVQRLEALLKALKSECQGQMERQMAAIQGKNESLEKVSSLTAQLESTKEMLRKVVEELTAKKMTLESSERTISDLTTSLQEKERAIEATNAEITKLRSRVDLKLQELQHLKNEGDHLRNVQTECEALKLQMTEKDKVIEILRQQIENMTQLVGQHGRTAGAMQVEKAQLEKEINDRRMELKELKILKDKKDAKIRELEARVSDLELEKVKLVNAGSERLRAVKDIKQERDQLLNEVKTSRSELNNLSEEYEVLKRNFRNKSEEMEMTTNKLKMQLKSAQSELEQTRNTLKSMEGSDGHAMKVAMGMQKQITAKRGQIDALQSKIQFLEEAMTNANKEKHFLKEEKSKLSQELSTVATEKNKMAGELEVLRSQERRLKEKVTNMEVALDKASLQFAECQDIIQRQEQESVRLKLQHTLDIKELQGPGYTSNSSLKPRLLQPASVTRSHSNVPSSQSTASFLSHHSTKANTLKEDPTRDLKQLLQELRSVINEEPAVSLSKTEEDGRTSLGALEDRVRDCITESSLRSDMCHRSNNSLRDSTEGSKSSETLSREPVTLHAGDREDPSGCFTFTSAASPSVKNSASRSFNSSPKKSPVHSLLTSSVEGSIGSTSQYRSAKPIHSSDSVKDSQSPPIETTGKTCRKLQNRLESLQTLVEDLQLKNQAMSSMIRNQEKRIQKVKDQEKMLLK

SEQ ID NO: 19636 - protein, 533 aa, Homo sapiens
MESKAWESNNEDLLSSSGVTSNGGSSSSFFVSSIRGTIIENTSSAGTLTQVPFFPKYEVELDSPRKIIPSPGKEHFERVLEEYSHQVKDLQRRLNESNELHEKQKFYLRQSVIDLQTKLQEMQMERDAMADIRRRESQSQEDLRNQLQNTVHELEAAKCLKEDMLKDSNTQIEQLRKMMLSHEGVLQEIRSILVDFEEASGKKICEHDSMSTLHFRSLGSAISKILRELDTEISYLKGRIFPVEDQLEALKSESQNKIELLLQQHQDRIEQLISEHEVEITGLTEKASSARSQANSIQSQMEIIQEQARNQNSMYMRQLSDLESTVSQLRSELREAKRMYEDKTEELEKQLVLANSELTEARTERDQSSLRSDMCHRSNNSLRDSTEGSKSSETLSREPVTLHAGDREDPSGCFTFTSAASPSVKNSASRSFNSSPKKSPVHSLLTSSVEGSIGSTSQYRSAKPIHSSDSVKDSQSPPIETTGKTCRKLQNRLESLQTLVEDLQLKNQAMSSMIRNQEKRIQKVKDQEKMLLK

SEQ ID NO: 19637 - protein, 406 aa, Homo sapiens
MESKAWESNNEDLLSSSGVTSNGGSSSSFFVSSIRGTIIENTSSAGTLTQVPFFPKYEVELDSPRKIIPSPGKEHFERVLEEYSHQVKDLQRRLNESNELHEKQKFYLRQSVIDLQTKLQEMQMERDAMADIRRRESQSQEDLRNQLQNTVHELEAAKCLKEDMLKDSNTQIEQLRKMMLSHEGVLQEIRSILVDFEEASGKKICEHDSMSTLHFRSLGSAISKILRELDTEISYLKGRIFPVEDQLEALKSESQNKIELLLQQHQDRIEQLISEHEVEITGLTEKASSARSQANSIQSQMEIIQEQARNQNSMYMRQLSDLESTVSQLRSELREAKRMYEDKENLQNSPLRIWTSRSCHYWLCRFGFTLNFRFLTTKISPDVDSAFIFTTLKAVGAEFCIKKVMI

SEQ ID NO: 19638 - protein, 503 aa, Homo sapiens
MALRAKAEVCVAAPWLSLQRARALGTRAARAPRTVLPFEAMPQHPGNRWLRLLQIWREQGYEHLHLEMHQTFQELGPIFRYNLGGPRMVCVMLPEDVEKLQQVDSLHPCRMILEPWVAYRQHRGHKCGVFLLNGPEWRFNRLRLNPDVLSPKAVQRFLPMVDAVARDFSQALKKKVLQNARGSLTLDVQPSIFHYTIEASNLALFGERLGLVGHSPSSASLNFLHALEVMFKSTVQLMFMPRSLSRWISPKVWKEHFEAWDCIFQYGDNCIQKIYQELAFNRPQHYTGIVAELLLKAELSLEAIKANSMELTAGSVDTTAFPLLMTLFELARNPDVQQILRQESLAAAASISEHPQKATTELPLLRAALKETLRLYPVGLFLERVVSSDLVLQNYHIPAGTLVQVFLYSLGRNAALFPRPERYNPQRWLDIRGSGRNFHHVPFGFGMRQCLGRRLAEAEMLLLLHHVLKHFLVETLTQEDIKMVYSFILRPGTSPLLTFRAIN

SEQ ID NO: 19639 - protein, 2353 aa, Homo sapiens
MKQRKGQGSGGSRGRKKRGLSDISPSTSLPPLVEGQLRCFLKLTVNRVIWKIAKPPTCVLVRVRWWGETSDGTLFCPRDALQTEPKAVRTTTRYAIRCGPKQFTSYLTDMAVLVLEVITKLDGLPIGRVQINGLAQLSPTHQINGFFTIVSSTSKKLGELQVSLALEPLSETYDSYHPLPTTDMTENVLLSKQGFRENTEPSSTQFQVPSRPRDIHTIKIDGKELAANSSRSTTPRGKDHVCFAENPDTIKDSSFGLQHSLNSGQSLESVTLKGRAPRKQMSLLNSSEFQPQIRTVAKSHSDSCILSSNNLPTKDLLSALLEQGNKLRNAMVISAMKSSPETSMLLDQVHPPINEDSLRASTQIRAFSRNRFKDHIEDHLLPSTENTFWRHDTKADTRAIQLLLGSAELSQGNFWDGLGSPPDSPSPGSDVYCISELNDPQYDQSLLENLFYTAPKSDTSISDFLSEEDDIVPSKKISQSTALARSSKVLESSDHKLKKRSAGKRNRNLVEQQMLSETPEDAQTMTLSVDRLALLGRTHSVRIIIETMGVPPDSPQMTPGKKSYAGPPPKVTTAKKRTFFVEYHFPVGFSESGLGKTALITEVVRLASSKITDGKVKFQQRFVFPVQFGGPMIEHWWNSNLTFQIYVKKTPQKKPEVIGSVSLSLRAVIQSELLSFSDQLPVQQENGQSPFGPLKVTMELITDNKDFTGINTKLSGNTHYTPLCAPTSPNKALPELNQDMTCTKNPQNLNQIHEETAKKAQNLVLPNRKSPSPVAPHPSTFVATPASHNLVNQTNGTTKESALLLHVLLMVPDGKDFISGESEKQSPCNVYLNCKLFSTEEVTRSVIAWGTTQPVFNFSQVIPVSLSSKYLERLKNNVMVIETWNKVRSPGQDKLLGLVKLPLHQFYMSFKDAKISRLLLDAQYPVVAVDSYMPVIDVFSGHQNGSLRVFLAMGSSNQIMALQRLKNEEGTLPPFSPRPAHFLDQPTAASVAMAEDRGNGLMEHCFEIHIEMVKGLAPLQATVWGEADCYVQYYFPVQHSQSSVLKGPEFLENGITLKPFRTATTLCVPDPIFNSEHHHSLLLPAEVPVQRLLLSAFSAQGLVPGGGVQFEIWCRYYYPNVRDQKVAKGTLPLSRICAMVTTQHREDVGIQTFNLPLTPRIENRKELRNQSSGLLDVGLRYRRSPRTAEGVLAARTVSISVQIIRACGLQAAAKALAEREPALQFSATVGVNASVTTHLSFLPQGEQRRTHPVACSFCPEFSHHVEFTCNLVTQHCSGEACFLAELLEFAEVIFAVYHENTKSASDIISIESCKEYLLGVVKVPTKELLIKRSGITGWYPIILPEDGGLPHGLELMQKIVGGLELSISFTHRGDRERVLEAAEHLGWSFENSLKDFVRMDEGEPATVTISTPRLWLPIHCVLLAGHNHIHKNTYCYLRYKFYDHEAFWTPLKKPKESVNKKQIMVTFKASKRAEVTRGPSLLWYFREERLEIQVWRAYGNDSVERPHQTDSWIGSAYVDLARLGERSARTLTVSGVYPLFGRNASNLSGAALRVHVVLSSLSSHLEPTHELDSMDCSSHSESEQLPRRNDEVQLSPPEVISCHQKSPASTQVPCSSTTAEVRLTQEGPADLDGTFAVSILVERAMHLSLKGSPLTERKVSIPSCCVSFATADESSPVYTQVVENTDSPIWNFQQQSRLSKELLLDPQQTLVFKVWHKGDEERVIGFASVDLSPLLSGFQFVCGWYNITDFSGECQGQIKVAVSPLESLIHFKEERQARRGVETSKSLIPIYSPFSFPASDTYAAFSSHMARQTLDQLAHASSKELDFSSPGRSDTTRSQASRHEEHVQNIRRFHESLHLQGEAPLPCDDKLTTSPLSSQTSILTSLRKNLSELDQIQRYFRQKLTKPFLPLSPQTQTAISQHQESCRDHLGPGASSLDPGSQCILEKSSNLVLQVSSLITDLQTITRDSQAALSSHRARSRSNKATTLPDAQDTEALQERCTMPDEPLVRAPDKGTDSPSPPPLEETSNGGRMLHESLRHAVPITRMQSSEDTEAGPAYSDEDYEEDIIEPRTLNEITTVTDKTSPWSSVISDTSEVISPQPDEVQREGPSCPSPGPFCREELMVKSSFLSSPERAVNPHLPRQGSPSQSLVACECEASKARVGGESASANPQPIPCPTLSGAQQSSTFVGWSSPQTDQNKEPKSEAPAENEAATSELGDSADSFKKLPLNLASQSRRENHKGPPIDSSDIRQRQVTTGSETSTKQSLLLPGPIVVPNFFLPPQQLEASLRMLSLSATLPPAATTDQDKSEATRGALSQRPCRPRPNSLPLNLPEEETLRIARIFSSQYSQKD

SEQ ID NO: 19640 - protein, 1963 aa, Homo sapiens
MKQRKGQGSGGSRGRKKRGLSDISPSTSLPPLVEGQLRCFLKLTVNRVIWKIAKPPTCVLVRVRWWGETSDGTLFCPRDALQTEPKAVRTTTRYAIRCGPKQFTSYLTDMAVLVLEVITKLDGLPIGRVQINGLAQLSPTHQINGFFTIVSSTSKKLGELQVSLALEPLSETYDSYHPLPTTDMTENVLLSKQGFRENTEPSSTQFQVPSRPRDIHTIKIDGKELAANSSRSTTPRGKDHVCFAENPDTIKDSSFGLQHSLNSGQSLESVTLKGRAPRKQMSLLNSSEFQPQIRTVAKSHSDSCILSSNNLPTKDLLSALLEQGNKLRNAMVISAMKSSPETSMLLDQVHPPINEDSLRASTQIRAFSRNRFKDHIEDHLLPSTENTFWRHDTKADTRAIQLLLGSAELSQGNFWDGLGSPPDSPSPGSDVYCISELNDPQYDQSLLENLFYTAPKSDTSISDFLSEEDDIVPSKKISQSTALARSSKVLESSDHKLKKRSAGKRNRNLVEQQMLSETPEDAQTMTLSVDRLALLGRTHSVRIIIETMGVPPDSPQMTPGKKSYAGPPPKVTTAKKRTFFVEYHFPVGFSESGLGKTALITEVVRLASSKITDGKVKFQQRFVFPVQFGGPMIEHWWNSNLTFQIYVKKTPQKKPEVIGSVSLSLRAVIQSELLSFSDQLPVQQENGQSPFGPLKVTMELITDNKDFTGINTKLSGNTHYTPLCAPTSPNKALPELNQDMTCTKNPQNLNQIHEETAKKAQNLVLPNRKSPSPVAPHPSTFVATPASHNLVNQTNGTTKESALLLHVLLMVPDGKDFISGESEKQSPCNVYLNCKLFSTEEVTRSVIAWGTTQPVFNFSQVIPVSLSSKYLERLKNNVMVIETWNKVRSPGQDKLLGLVKLPLHQFYMSFKDAKISRLLLDAQYPVVAVDSYMPVIDVFSGHQNGSLRVFLAMGSSNQIMALQRLKNEEGTLPPFSPRPAHFLDQPTAASVAMAEDRGNGLMEHCFEIHIEMVKGLAPLQATVWGEADCYVQYYFPVQHSQSSVLKGPEFLENGITLKPFRTATTLCVPDPIFNSEHHHSLLLPAEVPVQRLLLSAFSAQGLVPGGGVQFEIWCRYYYPNVRDQKVAKGTLPLSRICAMVTTQHREDVGIQTFNLPLTPRIENRKELRNQSSGLLDVGLRYRRSPRTAEGVLAARTVSISVQIIRACGLQAAAKALAEREPALQFSATVGVNASVTTHLSFLPQGEQRRTHPVACSFCPEFSHHVEFTCNLVTQHCSGEACFLAELLEFAEVIFAVYHENTKSASDIISIESCKEYLLGVVKVPTKELLIKRSGITGWYPIILPEDGGLPHGLELMQKIVGGLELSISFTHRGDRERVLEAAEHLGWSFENSLKDFVRMDEGEPATVTISTPRLWLPIHCVLLAGHNHIHKNTYCYLRYKFYDHEAFWTPLKKPKESVNKKQIMVTFKASKRAEVTRGPSLLWYFREERLEIQVWRAYGNDSVERPHQTDSWIGSAYVDLARLGERSARTLTVSGVYPLFGRNASNLSGAALRVHVVLSSLSSHLEPTHELDSMDCSSHSESEQLPRRNDEVQLSPPEVISCHQKSPASTQVPCSSTTAEVRLTQEGPADLDGTFAVSILVERAMHLSLKGSPLTERKVSIPSCCVSFATADESSPVYTQVVENTDSPIWNFQQQSRLSKELLLDPQQTLVFKVWHKGDEERVIGFASVDLSPLLSGFQFVCGWYNITDFSGECQGQIKVAVSPLESLIHFKEERQARRGVETSKSLIPIYSPFSFPASDTYAAFSSHMARQTLDQLAHASSKELDFSSPGRSDTTRSQASRHEEHVQNIRRFHESLHLQGEAPLPCDDKLTTSPLSSQTSILTSLRKNLSELDQIQRYFRQKLTKPFLPLSPQTQTAISQHQESCRDHLGPGASSLDPGSQCILEKSSNLVLQVSSLITGSY

SEQ ID NO: 19641 - protein, 1888 aa, Homo sapiens
MKQRKGQGSGGSRGRKKRGLSDISPSTSLPPLVEGQLRCFLKLTVNRVIWKIAKPPTCVLVRVRWWGETSDGTLFCPRDALQTEPKAVRTTTRYAIRCGPKQFTSYLTDMAVLVLEVITKLDGLPIGRVQINGLAQLSPTHQINGFFTIVSSTSKKLGELQVSLALEPLSETYDSYHPLPTTDMTENVLLSKQGFRENTEPSSTQFQVPSRPRDIHTIKIDGKELAANSSRSTTPRGKDHVCFAENPDTIKDSSFGLQHSLNSGQSLESVTLKGRAPRKQMSLLNSSEFQPQIRTVAKSHSDSCILSSNNLPTKDLLSALLEQGNKLRNAMVISAMKSSPETSMLLDQVHPPINEDSLRASTQIRAFSRNRFKDHIEDHLLPSTENTFWRHDTKADTRAIQLLLGSAELSQGNFWDGLGSPPDSPSPGSDVYCISELNDPQYDQSLLENLFYTAPKSDTSISDFLSEEDDIVPSKKISQSTALARSSKVLESSDHKLKKRSAGKRNRNLVEQQMLSETPEDAQTMTLSVDRLALLGRTHSVRIIIETMGVPPDSPQMTPGKKSYAGPPPKVTTAKKRTFFVEYHFPVGFSESGLGKTALITEVVRLASSKITDGKVKFQQRFVFPVQFGGPMIEHWWNSNLTFQIYVKKTPQKKPEVIGSVSLSLRAVIQSELLSFSDQLPVQQENGQSPFGPLKVTMELITDNKDFTGINTKLSGNTHYTPLCAPTSPNKALPELNQDMTCTKNPQNLNQIHEETAKKAQNLVLPNRKSPSPVAPHPSTFVATPASHNLVNQTNGTTKESALLLHVLLMVPDGKDFISGESEKQSPCNVYLNCKLFSTEEVTRSVIAWGTTQPVFNFSQVIPVSLSSKYLERLKNNVMVIETWNKVRSPGQDKLLGLVKLPLHQFYMSFKDAKISRLLLDAQYPVVAVDSYMPVIDVFSGHQNGSLRVFLAMGSSNQIMALQRLKNEEGTLPPFSPRPAHFLDQPTAASVAMAEDRGNGLMEHCFEIHIEMVKGLAPLQATVWGEADCYVQYYFPVQHSQSSVLKGPEFLENGITLKPFRTATTLCVPDPIFNSEHHHSLLLPAEVPVQRLLLSAFSAQGLVPGGGVQFEIWCRYYYPNVRDQKVAKGTLPLSRICAMVTTQHREDVGIQTFNLPLTPRIENRKELRNQSSGLLDVGLRYRRSPRTAEGVLAARTVSISVQIIRACGLQAAAKALAEREPALQFSATVGVNASVTTHLSFLPQGEQRRTHPVACSFCPEFSHHVEFTCNLVTQHCSGEACFLAELLEFAEVIFAVYHENTKSASDIISIESCKEYLLGVVKVPTKELLIKRSGITGWYPIILPEDGGLPHGLELMQKIVGGLEHLGWSFENSLKDFVRMDEGEPATVTISTPRLWLPIHCVLLAGHNHIHKNTYCYLRYKFYDHEAFWTPLKKPKESVNKKQIMVTFKASKRAEVTRGPSLLWYFREERLEIQVWRAYGNDSVERPHQTDSWIGSAYVDLARLGERSARTLTVSGVYPLFGRNASNLSGAALRVHVVLSSLSSHLEPTHELDSMDCSSHSESEQLPRRNDEVQLSPPEVISCHQKSPASTQVPCSSTTAEVRLTQEGPADLDGTFAVSILVERAMHLSLKGSPLTERKVSIPSCCVSFATADESSPVYTQVVENTDSPIWNFQQQSRLSKELLLDPQQTLVFKVWHKGDEERVIGFASVDLSPLLSGFQFVCGWYNITDFSGECQGQIKVAVSPLESLIHFKEERQARRGVETSKSLIPIYSPFSFPASDTYAAFSSHMARQTLDQLAHASSKELDFSSPGRSDTTRSQASRHEEHVQNIRRFHESLHLQGEAPLPCDDKLTTSPLSSQTPEAWRRGDCLMWYRGSWRASGFGKKKT

SEQ ID NO: 19642 - protein, 1967 aa, Homo sapiens
MKQRKGQGSGGSRGRKKRGLSDISPSTSLPPLVEGQLRCFLKLTVNRVIWKIAKPPTCVLVRVRWWGETSDGTLFCPRDALQTEPKAVRTTTRYAIRCGPKQFTSYLTDMAVLVLEVITKLDGLPIGRVQINGLAQLSPTHQINGFFTIVSSTSKKLGELQVSLALEPLSETYDSYHPLPTTDMTENVLLSKQGFRENTEPSSTQFQVPSRPRDIHTIKIDGKELAANSSRSTTPRGKDHVCFAENPDTIKDSSFGLQHSLNSGQSLESVTLKGRAPRKQMSLLNSSEFQPQIRTVAKSHSDSCILSSNNLPTKDLLSALLEQGNKLRNAMVISAMKSSPETSMLLDQVHPPINEDSLRASTQIRAFSRNRFKDHIEDHLLPSTENTFWRHDTKADTRAIQLLLGSAELSQGNFWDGLGSPPDSPSPGSDVYCISELNDPQYDQSLLENLFYTAPKSDTSISDFLSEEDDIVPSKKISQSTALARSSKVLESSDHKLKKRSAGKRNRNLVEQQMLSETPEDAQTMTLSVDRLALLGRTHSVRIIIETMGVPPDSPQMTPGKKSYAGPPPKVTTAKKRTFFVEYHFPVGFSESGLGKTALITEVVRLASSKITDGKVKFQQRFVFPVQFGGPMIEHWWNSNLTFQIYVKKTPQKKPEVIGSVSLSLRAVIQSELLSFSDQLPVQQENGQSPFGPLKVTMELITDNKDFTGINTKLSGNTHYTPLCAPTSPNKALPELNQDMTCTKNPQNLNQIHEETAKKAQNLVLPNRKSPSPVAPHPSTFVATPASHNLVNQTNGTTKESALLLHVLLMVPDGKDFISGESEKQSPCNVYLNCKLFSTEEVTRSVIAWGTTQPVFNFSQVIPVSLSSKYLERLKNNVMVIETWNKVRSPGQDKLLGLVKLPLHQFYMSFKDAKISRLLLDAQYPVVAVDSYMPVIDVFSGHQNGSLRVFLAMGSSNQIMALQRLKNEEGTLPPFSPRPAHFLDQPTAASVAMAEDRGNGLMEHCFEIHIEMVKGLAPLQATVWGEADCYVQYYFPVQHSQSSVLKGPEFLENGITLKPFRTATTLCVPDPIFNSEHHHSLLLPAEVPVQRLLLSAFSAQGLVPGGGVQFEIWCRYYYPNVRDQKVAKGTLPLSRICAMVTTQHREDVGIQTFNLPLTPRIENRKELRNQSSGLLDVGLRYRRSPRTAEGVLAARTVSISVQIIRACGLQAAAKALAEREPALQFSATVGVNASVTTHLSFLPQGEQRRTHPVACSFCPEFSHHVEFTCNLVTQHCSGEACFLAELLEFAEVIFAVYHENTKSASDIISIESCKEYLLGVVKVPTKELLIKRSGITGWYPIILPEDGGLPHGLELMQKIVGGLELSISFTHRGDRERVLEAAEHLGWSFENSLKDFVRMDEGEPATVTISTPRLWLPIHCVLLAGHNHIHKNTYCYLRYKFYDHEAFWTPLKKPKESVNKKQIMVTFKASKRAEVTRGPSLLWYFREERLEIQVWRAYGNDSVERPHQTDSWIGSAYVDLARLGERSARTLTVSGVYPLFGRNASNLSGAALRVHVVLSSLSSHLEPTHELDSMDCSSHSESEQLPRRNDEVQLSPPEVISCHQKSPASTQVPCSSTTAEVRLTQEGPADLDGTFAVSILVERAMHLSLKGSPLTERKVSIPSCCVSFATADESSPVYTQVVENTDSPIWNFQQQSRLSKELLLDPQQTLVFKVWHKGDEERVIGFASVDLSPLLSGFQFVCGWYNITDFSGECQGQIKVAVSPLESLIHFKEERQARRGVETSKSLIPIYSPFSFPASDTYAAFSSHMARQTLDQLAHASSKELDFSSPGRSDTTRSQASRHEEHVQNIRRFHESLHLQGEAPLPCDDKLTTSPLSSQTSILTSLRKNLSELDQIQRYFRQKLTKPFLPLSPQTQTAISQHQESCRDHLGPGASSLDPGSQCILEKSSNLVLQVSSLITLPAPNDS

SEQ ID NO: 19643 - protein, 1921 aa, Homo sapiens
MKQRKGQGSGGSRGRKKRGLSDISPSTSLPPLVEGQLRCFLKLTVNRVIWKIAKPPTCVLVRVRWWGETSDGTLFCPRDALQTEPKAVRTTTRYAIRCGPKQFTSYLTDMAVLVLEVITKLDGLPIGRVQINGLAQLSPTHQINGFFTIVSSTSKKLGELQVSLALEPLSETYDSYHPLPTTDMTENVLLSKQGFRENTEPSSTQFQVPSRPRDIHTIKIDGKELAANSSRSTTPRGKDHVCFAENPDTIKDSSFGLQHSLNSGQSLESVTLKGRAPRKQMSLLNSSEFQPQIRTVAKSHSDSCILSSNNLPTKDLLSALLEQGNKLRNAMVISAMKSSPETSMLLDQVHPPINEDSLRASTQIRAFSRNRFKDHIEDHLLPSTENTFWRHDTKADTRAIQLLLGSAELSQGNFWDGLGSPPDSPSPGSDVYCISELNDPQYDQSLLENLFYTAPKSDTSISDFLSEEDDIVPSKKISQSTALARSSKVLESSDHKLKKRSAGKRNRNLVEQQMLSETPEDAQTMTLSVDRLALLGRTHSVRIIIETMGVPPDSPQMTPGKKSYAGPPPKVTTAKKRTFFVEYHFPVGFSESGLGKTALITEVVRLASSKITDGKVKFQQRFVFPVQFGGPMIEHWWNSNLTFQIYVKKTPQKKPEVIGSVSLSLRAVIQSELLSFSDQLPVQQENGQSPFGPLKVTMELITDNKDFTGINTKLSGNTHYTPLCAPTSPNKALPELNQDMTCTKNPQNLNQIHEETAKKAQNLVLPNRKSPSPVAPHPSTFVATPASHNLVNQTNGTTKESALLLHVLLMVPDGKDFISGESEKQSPCNVYLNCKLFSTEEVTRSVIAWGTTQPVFNFSQVIPVSLSSKYLERLKNNVMVIETWNKVRSPGQDKLLGLVKLPLHQFYMSFKDAKISRLLLDAQYPVVAVDSYMPVIDVFSGHQNGSLRVFLAMGSSNQIMALQRLKNEEGTLPPFSPRPAHFLDQPTAASVAMAEDRGNGLMEHCFEIHIEMVKGLAPLQATVWGEADCYVQYYFPVQHSQSSVLKGPEFLENGITLKPFRTATTLCVPDPIFNSEHHHSLLLPAEVPVQRLLLSAFSAQGLVPGGGVQFEIWCRYYYPNVRDQKVAKGTLPLSRICAMVTTQHREDVGIQTFNLPLTPRIENRKELRNQSSGLLDVGLRYRRSPRTAEGVLAARTVSISVQIIRACGLQAAAKALAEREPALQFSATVGVNASVTTHLSFLPQGEQRRTHPVACSFCPEFSHHVEFTCNLVTQHCSGEACFLAELLEFAEVIFAVYHENTKSASDIISIESCKEYLLGVVKVPTKELLIKRSGITGWYPIILPEDGGLPHGLELMQKIVGGLELSISFTHRGDRERVLEAAEHLGWSFENSLKDFVRMDEGEPATVTISTPRLWLPIHCVLLAGHNHIHKNTYCYLRYKFYDHEAFWTPLKKPKESVNKKQIMVTFKASKRAEVTRGPSLLWYFREERLEIQVWRAYGNDSVERPHQTDSWIGSAYVDLARLGERSARTLTVSGVYPLFGRNASNLSGAALRVHVVLSSLSSHLEPTHELDSMDCSSHSESEQLPRRNDEVQLSPPEVISCHQKSPASTQVPCSSTTAEVRLTQEGPADLDGTFAVSILVERAMHLSLKGSPLTERKVSIPSCCVSFATADESSPVYTQVVENTDSPIWNFQQQSRLSKELLLDPQQTLVFKVWHKGDEERVIGFASVDLSPLLSGFQFVCGWYNITDFSGECQGQIKVAVSPLESLIHFKEERQARRGVETSKSLIPIYSPFSFPASDTYAAFSSHMARQTLDQLAHASSKELDFSSPGRSDTTRSQASRHEEHVQNIRRFHESLHLQGEAPLPCDDKLTTSPLSSQTSILTSLRSSPSLSYPSALRLKRPSHSTRRAVGTILGQVPAA

SEQ ID NO: 19644 - protein, 207 aa, Homo sapiens
MQSGTHWRVLGLCLLSVGVWGQDGNEEMGGITQTPYKVSISGTTVILTCPQYPGSEILWQHNDKNIGGDEDDKNIGSDEDHLSLKEFSELEQSGYYVCYPRGSKPEDANFYLYLRARVCENCMEMDVMSVATIVIVDICITGGLLLLVYYWSKNRKAKAKPVTRGAGAGGRQRGQNKERPPPVPNPDYEPIRKGQRDLYSGLNQRRI

SEQ ID NO: 19645 - protein, 152 aa, Homo sapiens
MAQPESSADFGIAQQNNYYCYWQSLPSAIRVKQEFQPSQSYRYGNWYARQHGSYLLSGYSYGCAVDGNGKDCFSAHETPEHTAGTLVMPKETTPLAENQDEDPLEDPHLHLNIEESNQEFMVKSEELYDSLMNCHWQPLDTVHSEIPDETPK

SEQ ID NO: 19646 - protein, 65 aa, Homo sapiens
MPKETTPLAENQDEDPLEDPHLHLNIEESNQEFMVKSEELYDSLMNCHWQPLDTVHSEIPDETPK

SEQ ID NO: 19647 - protein, 1094 aa, Homo sapiens
MAESSSESDHFRCRDRLSPWAARSTHRGTRSLPTVEVTEKVNTITSTLQDTSRNLRQVDQMLGRYREYSNGQAGAIEHLKESLEQSIDQLRSQRLLRNSGGRSISVTSLSASDLDGGTGSELHHFPPTSPLKDYGDPQGIKRMRSRTGVRFVQETDDMTQLHGFHQSLRDLSSEQIRLGDDFNRELSRRSRSDAETKRALEELTEKLNEAQKQEVVSDRVERRLQELEREMRTERELVERRQDQLGLMSLQLQEALKKQEAKADEHEGAIKNKLRQTETEKNQLEQELELSRRLLNQSEGSRETLLHQVEELRTQLTKAEGDRKGLQHQVSQISKQQSNYQDEQGEDWRFRRGVEREKQDLEKQMSDLRVQLNFSAMASELEEVKRCMERKDKEKAHLASQVENLTRELENGEKQQLQMLDRLKEIQNHFDTCEAERKHADLQISELTRHAEDATKQAERYLSELQQSEALKEEAEKRREDLKLKAQESIRQWKLKHKKLERALEKQSETVDELTGKNNQILKEKDELKTQLYAALQQIENLRKELNDVLTKRALQEEELHSKEEKLRDIKSHQADLELEVKNSLDTIHRLESELKKQSKIQSQMKVEKAHLEEEIAELKKSQAQDKAKLLEMQESIKDLSAIRADLANKLAEEERAKKAVLKDLSDLTAQAKSRDEETATIITQLKLERDVHQRELKDLTSSLQSVKTKHEQNIQELMKHFKKEKSEAENHIRTLKAESLEEKNMAKIHRGQLEKLKSQCDRLTEELTQNENENKKLKLKYQCLKDQLEEREKHISIEEEHLRRMEEARLQLKDQLLCLETEQESILGVIGKEIDAACKTFSKDSVEKLKVFSSGPDIHYDPHRWLAESKTKLQWLCEELKERENREKNLRHQLMLCRQQLRNLTENKESELQCLFQQIERQEQLLDEIHREKRDLLEETQRKDEEMGSLQDRVIALETSTQVALDHLESVPEKLSLLEDFKDFRDSCSSSERTDGRYSKYRVRRNSLQHHQDDTKYRTKSFKGDRTFLEGSHTRGLDHSSSWQDHSRFLSSPRFSYVNSFTKRTVAPDSASNKEDATMNGTSSQPKKEEYGS

SEQ ID NO: 19648 - protein, 987 aa, Homo sapiens
MAESSSESDHFRCRDRLSPWAARSTHRGTRSLPTVEVTEKVNTITSTLQDTSRNLRQVDQMLGRYREYSNGQAGAIEHLKESLEQSIDQLRSQRLLRNSGGRSISVTSLSASDLDGGTGSELHHFPPTSPLKDYGDPQGIKRMRSRTGVRFVQETDDMTQLHGFHQSLRDLSSEQIRLGDDFNRELSRRSRSDAETKRALEELTEKLNEAQKQEVVSDRVERRLQELEREMRTERELVERRQDQLGLMSLQLQEALKKQEAKADEHEGAIKNKLRQTETEKNQLEQELELSRRLLNQSEGSRETLLHQVEELRTQLTKAEGDRKGLQHQVSQISKQQSNYQDEQGEDWRFRRGVEREKQDLEKQMSDLRVQLNFSAMASELEEVKRCMERKDKEKAHLASQVENLTRELENGEKQQLQMLDRLKEIQNHFDTCEAERKHADLQISELTRHAEDATKQAERYLSELQQSEALKEEAEKRREDLKLKAQESIRQWKLKHKKLERALEKQSETVDELTGKNNQILKEKDELKTQLYAALQQIENLRKELNDVLTKRALQEEELHSKEEKLRDIKSHQADLELEVKNSLDTIHRLESELKKQSKIQSQMKVEKAHLEEEIAELKKSQAQDKAKLLEMQESIKDLSAIRADLANKLAEEERAKKAVLKDLSDLTAQAKSRDEETATIITQLKLERDVHQRELKDLTSSLQSVKTKHEQNIQELMKHFKKEKSEAENHIRTLKAESLEEKNMAKIHRGQLEKLKSQCDRLTEELTQNENENKKLKLKYQCLKDQLEEREKHISIEEEHLRRMEEARLQLKDQLLCLETEQESILGVIGKEIDAACKTFSKDSVEKLKVFSSGPDIHYDPHRWLAESKTKLQWLCEELKERENREKNLRHQLMLCRQQLRNLTENKESELQCLFQQIERQEQLLDEIHREKRDLLEETQRKDEEMGSLQDRVIALETSTQVALDHLESVPEKLSLLEDFKDFRR

SEQ ID NO: 19649 - protein, 435 aa, Homo sapiens
MAESSSESDHFRCRDRLSPWAARSTHRGTRSLPTVEVTEKVNTITSTLQDTSRNLRQVDQMLGRYREYSNGQAGAIEHLKESLEQSIDQLRSQRLLRNSGGRSISVTSLSASDLDGGTGSELHHFPPTSPLKDYGDPQGIKRMRSRTGVRFVQETDDMTQLHGFHQSLRDLSSEQIRLGDDFNRELSRRSRSDAETKRALEELTEKLNEAQKQEVVSDRVERRLQELEREMRTERELVERRQDQLGLMSLQLQEALKKQEAKADEHEGAIKNKLRQTETEKNQLEQELELSRRLLNQSEGSRETLLHQVEELRTQLTKAEGDRKGLQHQVSQISKQQSNYQDEQGEDWRFRRGVEREKQDLEKQMSDLRVQLNFSAMASELEEVKRCMERKDKEKAHLASQVEHINRKCLLNLVQDLDCKDNEILTYSLQSPLHV

SEQ ID NO: 19650 - protein, 986 aa, Homo sapiens
MVSKSDQLLIVVSILEGRHFPKRPKHMLVVEAKFDGEQLATDPVDHTDQPEFATELAWEIDRKALHQHRLQRTPIKLQCFALDPVTSAKETIGYIVLDLRTAQETKQAPKWYQLLSNKYTKFKSEIQISIALETDTKPPVDSFKAKGAPPRDGKVPAILAGLDPRDIVAVLNEEGGYHQIGPAEYCTDSFIMSVTIAFATQLEQLIPCTMKLPERQPEFFFYYSLLGNDVTNEPFNDLINPNFEPERASVRIRSSVEILRVYLALQSKLQIHLCCGDQSLGSTEIPLTGLLKKGSTEINQHPVTVEGAFTLDPPNRAKQKLAPIPVELAPTVGVSVALQREGIDSQSLIELKTQNEHEPEHSKKKVLTPIKEKTLTGPKSPTVSPVPSHNQSPPTKDDATESEVESLQYDKDTKPNPKASSSVPASLAQLVTTSNASEVASGQKIAVPATSHHFCFSIDLRSIHALEIGFPINCILRYSYPFFGSAAPIMTNPPVEVRKNMEVFLPQSYCAFDFATMPHQLQDTFLRIPLLVELWHKDKMSKDLLLGIARIQLSNILSSEKTRFLGSNGEQCWRQTYSESVPVIAAQGSNNRIADLSYTVTLEDYGLVKMREIFISDSSQGVSAVQQKPSSLPPAPCPSEIQTEPRETLEYKAALELEMWKEMQEDIFENQLKQKELAHMQALAEEWKKRDRERESLVKKKVAEYTILEGKLQKTLIDLEKREQQLASVESELQREKKELQSERQRNLQELQDSIRRAKEDCIHQVELERLKIKQLEEDKHRLQQQLNDAENKYKILEKEFQQFKDQQNNKPEIRLQSEINLLTLEKVELERKLESATKSKLHYKQQWGRALKELARLKQREQESQMARLKKQQEELEQMRLRYLAAEEKDTVKTERQELLDIRNELNRLRQQEQKQYQDSTEIASGKKDGPHGSVLEEGLDDYLTRLIEERDTLMRTGVYNHEDRIISELDRQIREILAKSNASN

SEQ ID NO: 19651 - protein, 960 aa, Homo sapiens
MLVVEAKFDGEQLATDPVDHTDQPEFATELAWEIDRKALHQHRLQRTPIKLQCFALDPVTSAKETIGYIVLDLRTAQETKQAPKWYQLLSNKYTKFKSEIQISIALETDTKPPVDSFKAKGAPPRDGKVPAILAGLDPRDIVAVLNEEGGYHQIGPAEYCTDSFIMSVTIAFATQLEQLIPCTMKLPERQPEFFFYYSLLGNDVTNEPFNDLINPNFEPERASVRIRSSVEILRVYLALQSKLQIHLCCGDQSLGSTEIPLTGLLKKGSTEINQHPVTVEGAFTLDPPNRAKQKLAPIPVELAPTVGVSVALQREGIDSQSLIELKTQNEHEPEHSKKKVLTPIKEKTLTGPKSPTVSPVPSHNQSPPTKDDATESEVESLQYDKDTKPNPKASSSVPASLAQLVTTSNASEVASGQKIAVPATSHHFCFSIDLRSIHALEIGFPINCILRYSYPFFGSAAPIMTNPPVEVRKNMEVFLPQSYCAFDFATMPHQLQDTFLRIPLLVELWHKDKMSKDLLLGIARIQLSNILSSEKTRFLGSNGEQCWRQTYSESVPVIAAQGSNNRIADLSYTVTLEDYGLVKMREIFISDSSQGVSAVQQKPSSLPPAPCPSEIQTEPRETLEYKAALELEMWKEMQEDIFENQLKQKELAHMQALAEEWKKRDRERESLVKKKVAEYTILEGKLQKTLIDLEKREQQLASVESELQREKKELQSERQRNLQELQDSIRRAKEDCIHQVELERLKIKQLEEDKHRLQQQLNDAENKYKILEKEFQQFKDQQNNKPEIRLQSEINLLTLEKVELERKLESATKSKLHYKQQWGRALKELARLKQREQESQMARLKKQQEELEQMRLRYLAAEEKDTVKTERQELLDIRNELNRLRQQEQKQYQDSTEIASGKKDGPHGSVLEEGLDDYLTRLIEERDTLMRTGVYNHEDRIISELDRQIREILAKSNASN

SEQ ID NO: 19652 - protein, 380 aa, Homo sapiens
MVSKSDQLLIVVSILEGRHFPKRPKHMLVVEAKFDGEQLATDPVDHTDQPEFATELAWEIDRKALHQHRLQRTPIKLQCFALDPVTSAKETIGYIVLDLRTAQETKQAPKWYQLLSNKYTKFKSEIQISIALETDTKPPVDSFKAKGAPPRDGKVPAILAGLDPRDIVAVLNEEGGYHQIGPAEYCTDSFIMSVTIAFATQLEQLIPCTMKLPERQPEFFFYYSLLGNDVTNEPFNDLINPNFEPERASVRIRSSVEILRVYLALQSKLQIHLCCGDQSLGSTEIPLTGLLKKGSTEINQHPVTVEGAFTLDPPNRAKQKLAPIPVELAPTVGVSVALQREGIDSQDAFWYSALDIIFPLFIFLFLVLDAIRKFANYEEK

SEQ ID NO: 19653 - protein, 812 aa, Homo sapiens
MEAFQELRKPSARLECDHCSFRGTDYENVQIHMGTIHPEFCDEMDAGGLGKMIFYQKSAKLFHCHKCFFTSKMYSNVYYHITSKHASPDKWNDKPKNQLNKETDPVKSPPLPEHQKIPCNSAEPKSIPALSMETQKLGSVLSPESPKPTPLTPLEPQKPGSVVSPELQTPLPSPEPSKPASVSSPEPPKSVPVCESQKLAPVPSPEPQKPAPVSPESVKATLSNPKPQKQSHFPETLGPPSASSPESPVLAASPEPWGPSPAASPESRKSARTTSPEPRKPSPSESPEPWKPFPAVSPEPRRPAPAVSPGSWKPGPPGSPRPWKSNPSASSGPWKPAKPAPSVSPGPWKPIPSVSPGPWKPTPSVSSASWKSSSVSPSSWKSPPASPESWKSGPPELRKTAPTLSPEHWKAVPPVSPELRKPGPPLSPEIRSPAGSPELRKPSGSPDLWKLSPDQRKTSPASLDFPESQKSSRGGSPDLWKSSFFIEPQKPVFPETRKPGPSGPSESPKAASDIWKPVLSIDTEPRKPALFPEPAKTAPPASPEARKRALFPEPRKHALFPELPKSALFSESQKAVELGDELQIDAIDDQKCDILVQEELLASPKKLLEDTLFPSSKKLKKDNQESSDAELSSSEYIKTDLDAMDIKGQESSSDQEQVDVESIDFSKENKMDMTSPEQSRNVLQFTEEKEAFISEEEIAKYMKRGKGKYYCKICCCRAMKKGAVLHHLVNKHNVHSPYKCTICGKAFLLESLLKNHVAAHGQSLLKCPRCNFESNFPRGFKKHLTHCQSRHNEEANKKLMEALEPPLEEQQI

SEQ ID NO: 19654 - protein, 383 aa, Homo sapiens
MGVKASQTGFVVLVLLQCCSAYKLVCYYTSWSQYREGDGSCFPDALDRFLCTHIIYSFANISNDHIDTWEWNDVTLYGMLNTLKNRNPNLKTLLSVGGWNFGSQRFSKIASNTQSRRTFIKSVPPFLRTHGFDGLDLAWLYPGRRDKQHFTTLIKEMKAEFIKEAQPGKKQLLLSAALSAGKVTIDSSYDIAKISQHLDFISIMTYDFHGAWRGTTGHHSPLFRGQEDASPDRFSNTDYAVGYMLRLGAPASKLVMGIPTFGRSFTLASSETGVGAPISGPGIPGRFTKEAGTLAYYEICDFLRGATVHRILGQQVPYATKGNQWVGYDDQESVKSKVQYLKDRQLAGAMVWALDLDDFQGSFCGQDLRFPLTNAIKDALAAT

SEQ ID NO: 19655 - protein, 332 aa, Homo sapiens
MAAVFLVTLYEYSPLFYIAVVFTCFIVTTGLVLGWFGWDVPVILRNSEETQFSTRVFKKQMRQVKNPFGLEITNPSSASITTGITLTTDCLEDSLLTCYWGCSVQKLYEALQKHVYCFRISTPQALEDALYSEYLYQEQYFIKKDSKEEIYCQLPRDTKIEDFGTVPRSRYPLVALLTLADEDDREIYDIISMVSVIHIPDRTYKLSCRILYQYLLLAQGQFHDLKQLFMSANNNFTPSNNSSSEEKNTDRSLLEKVGLSESEVEPSEENSKDCVVCQNGTVNWVLLPCRHTCLCDGCVKYFQQCPMCRQFVQESFALCSQKEQDKDKPKTL

SEQ ID NO: 19656 - protein, 214 aa, Homo sapiens
MGAAHSASEEVRELEGKTGFSSDQIEQLHRRFKQLSGDQPTIRKENFNNVPDLELNPIRSKIVRAFFDNRNLRKGPSGLADEINFEDFLTIMSYFRPIDTTMDEEQVELSRKEKLRFLFHMYDSDSDGRITLEEYRNVVEELLSGNPHIEKESARSIADGAMMEAASVCMGQMEPDQVYEGITFEDFLKIWQGIDIETKMHVRFLNMETMALCH

SEQ ID NO: 19657 - protein, 163 aa, Homo sapiens
MGAAHSASEEVRELEGKTGFSSDQIEQLHRRFKQLSGDQPTIRKENFNNVPDLELNPIRSKIVRAFFDNRNLRKGPSGLADEINFEDFLTIMSYFRPIDTTMDEEQVELSRKEKLRFLFHMYDSDSDGRITLEEYRNVKWSRSCCRETLTSRRSPLAPSPTGP

SEQ ID NO: 19658 - protein, 187 aa, Homo sapiens
MGAAHSASEEVRELEGKTGFSSDQIEQLHRRFKQLSGDQPTIRNLRKGPSGLADEINFEDFLTIMSYFRPIDTTMDEEQVELSRKEKLRFLFHMYDSDSDGRITLEEYRNVVEELLSGNPHIEKESARSIADGAMMEAASVCMGQMEPDQVYEGITFEDFLKIWQGIDIETKMHVRFLNMETMALCH

SEQ ID NO: 19659 - protein, 164 aa, Homo sapiens
MNNSLDYLAYPVIVSNHRQSTTFRKKLDFGHYVSHKNRIQIAKPTVDTKPPVAHTNHILKLSKLQGEQKKINKIEYENKQLCQKIANAHRGPAKVDCWNEYFSKSLNRETRNRELVRITMENQGILKRLVDRKPHYDRRASEIDWQNSRRYIRNTTRYLLSQNE

SEQ ID NO: 19660 - protein, 520 aa, Homo sapiens
MAPKKSVSKAGKELEVKKKGGKKEPVVAVEPPLAKEMKEFYHIQIRDLEDRLARYQRKWDELAVQEKMFRQEFEQLANNKKEIVAFLKRTLNQQVDEITDLNEQLQNLQLAKEMEKDAFEAQLAQVRHEFQETKDQLTTENIILGGKLAALEEFRLQKEEVTDKFTLLEEQVRKQENEFRDYAYNLEKKSVLDKDRLRKEIIQRVNLVANEFHKVTTNRMWETTKRAIKENNGITLQMARVSQQGMKLLQENEQLKGRQNNLCKQLELLENTQKVMARHKRGHQKIILMLTKKCQEQQQDTKEAEELRLLLSQLEQRSLQLQVDNQALKSQRDQLSLQLEQQQVDLQRLQQELANEQKVRASLEAALVQATSFLQNILQMHRDEEDSDVDVTFQPWHKEMLQQLLVMLSSTVATRPQKAACPHQESQSHGPPKESRPSIQLPRTGSLLPQLSDITPYQPGDLGLVPRQVHIPPNPQDLRLLSYITRVGTFRAHSSPEMRAPGSLKRLEKFSLPEVPLRPK

SEQ ID NO: 19661 - protein, 425 aa, Homo sapiens
MAPKKSVSKAGKELEVKKKGGKKEPVVAVEPPLAKEMKEFYHIQIRDLEDRLARYQRKWDELAVQEKMFRQEFEQLANNKKEIVAFLKRTLNQQVDEITDLNEQLQNLQLAKEMEKDAFEAQLAQVRHEFQETKDQLTTENIILGGKLAALEEFRLQKEEVTDKFTLLEEQVRKQENEFRDYAYNLEKKSVLDKDRLRKEIIQRVNLVANEFHKVTTNRMWETTKRAIKENNGITLQMARVSQQGMKLLQENEQLKGRQNNLCKQLELLENTQKVMARHKRGHQKIILMLTKKCQEQQQDTKEAEELRLLLSQLEQRSLQLQVDNQALKSQRDQLSLQLEQQQVDLQRLQQELANEQKVRASLEAALVQATSFLQNILQTGKTSWKWALRLEFPGRGWVLGPLWACCHPTLTNRCTAMKRTVTLT

SEQ ID NO: 19662 - protein, 274 aa, Homo sapiens
MASDSGNQGTLCTLEFAVQMTCQSCVDAVRKSLQGVAGVQDVEVHLEDQMVLVHTTLPSQEVQALLEGTGRQAVLKGMGSGQLQNLGAAVAILGGPGTVQGVVRFLQLTPERCLIEGTIDGLEPGLHGLHVHQYGDLTNNCNSCGNHFNPDGASHGGPQDSDRHRGDLGNVRADADGRAIFRMEDEQLKVWDVIGRSLIIDEGEDDLGRGGHPLSKITGNSGERLACGIIARSAGLFQNPKQICSCDGLTIWEERGRPIAGKGRKESAQPPAHL

SEQ ID NO: 19663 - protein, 689 aa, Homo sapiens
MIKRKIWCNLCIDLVAFTSEIFKGAVFQSLDGIVVSANCKLRKIFTLKSKPQDTADKDAVYGVPFSTDEPTDIIPRSCQLMTDVPHVTQLLNMTKLRQTEIKFGGHPLRSAESDQFINRGTSITRNSKNQDVCHIAFGSKVLGPPPLSGRRNNMKISSETVRSVGSKNNRSCQPSTVEKCVNGTEMSALLIPESEEQGNKENIHQIKQTVPIHAANLHIMHPHPPQEPSADKNNNRRRLRLKSTSRERTETPSGSSSGNNRIEDKASTILTTVSQQGAELLNSGTLGPQSPDQSDEWIFPENADHISYLASSRQSLLLGDDSCNPSHLWLEASKESEHDQQAEESQSVPKDIFTFSSRPRSAPHGKTQTMSPEELSFILDLKEDNSVTSRDTQSEDDFYGGDSSEEGNHSIQGSRGPTTGPSELTQLTLESLLGKAAKRTSKEYLRSAYTEAGATESQDSSMEQIDRNNFEMSLLPTTCLSPTGRRCGSCQKTPEPVIKAKDLSAQQVPASLNKTSLKEISGERLSSIPEASEYDWRNYQPSQMSESELQMLASLRWQQNEELEDAGTSHGLSASQVDNCNVSISTSSDDTTTWNSCLPPPVNQGRHYQKEMNPPSPSNPRDWLNMLSPPIVPPSQQPAEQRPDSCESLSVQGEEDLSVEEDEEVLTLLYDPCLNCYFDPQTGKYYELV

SEQ ID NO: 19664 - protein, 563 aa, Homo sapiens
MIKRKIWCNLCIDLVAFTSEIFKGAVFQSLDGIVVSANCKLRKIFTLKSKPQDTADKDAVYGVPFSTDEPTDIIPRSCQLMTDVPHVTQLLNMTKLRQTEIKFGGHPLRSAESDQFINRGTSITRNSKNQDVCHIAFGSKVLGPPPLSGRRNNMKISSETVRSVGSKNNRSCQPSTVEKCVNGTEMSALLIPESEEQGNKENIHQIKQTVPIHAANLHIMHPHPPQEPSADKNNNRRRLRLKSTSRERTETPSGSSSGNNRIEDKASTILTTVSQQGAELLNSGTLGPQSPDQSDEWIFPENADHISYLASSRQSLLLGDDSCNPSHLWLEASKESEHDQQAEESQSVPKDIFTFSSRPRSAPHGKTQTMSPEELSFILDLKEDNSVTSRDTQSEDDFYGGDSSEEEYDWRNYQPSQMSESELQMLASLRWQQNEELEDAGTSHGLSASQVDNCNVSISTSSDDTTTWNSCLPPPVNQGRHYQKEMNPPSPSNPRDWLNMLSPPIVPPSQQPAEQRPDSCESLSVQGEEDLSVEEDEEVLTLLYDPCLNCYFDPQTGKYYELV

SEQ ID NO: 19665 - protein, 460 aa, Homo sapiens
MDSELMHSIVGSYHKPPERVFVPSFTQNEPSQNCHPANLEVTSPKILHSPNSQALILALKTLQEKIHRLELERTQAEDNLNILSREAAQYKKALENETNERNLAHQELIKQKKDISIQLSSAQSRCTLLEKQLEYTKRMVLNVEREKNMILEQQAQLQREKEQDQMKLYAKLEKLDVLEKECFRLTTTQKTAEDKIKHLEEKLKEEEHQRKLFQDKASELQTGLEISKIIMSSVSNLKHSKEKKKSSKKTKCIKRRPPWQICSKFGALPFVAEKMRQHRDPHILQKPFNVTETRCLPKPSRTTSWCKAIPPDSEKSISICDNLSELLMAMQDELDQMSMEHQELLKQMKETESHSVCDDIECELECLLKKMEIKGEQISKLKKHQDSVCKLQQKVQNSKMSEASGIQQEDSYPKGSKNIKNSPRKCLTDTNLFQKNSSFHPIRVHNLQMKLRRDDIMWEQ

SEQ ID NO: 19666 - protein, 391 aa, Homo sapiens
MDSELMHSIVGSYHKPPERVFVPSFTQNEPSQNCHPANLEVTSPKILHSPNSQALILALKTLQEKIHRLELERTQAEDNLNILSREAAQYKKALENETNERNLAHQELIKQKKDISIQLSSAQSRCTLLEKQLEYTKRMVLNVEREKNMILEQQAQLQREKEQDQMKLYAKLEKLDVLEKECFRLTTTQKTAEDKIKHLEEKLKEEEHQRKLFQDKASELQTGLEISKIIMSSVSNLKHSKEKKKSSKKTKCIKRRPPWQICSKFGALPFVAEKMRQHRDPHILQKPFNVTETRCLPKPSRTTSWCKAIPPDSEKSISICDNLSELLMAMQDELDQMSMEHQELLKQMKETESHSVCDDIECELECLLKKMEIKGEQISKLKKHQDSVRRL

SEQ ID NO: 19667 - protein, 788 aa, Homo sapiens
MVLLRLLVFLFAPVVSDLCSLPCFINVSESQGPGTVLQFLSFNCSSYTPTPTLELLNVQPPTTFFNPPSLARWQGTYVGKLTLSSSAQLDALMVNHYKVQLKFTCGNHVMEGSLSVDVQRDLSHIQCAGQFASPAGEMIQVPETVTPGARLYTLLLPGLELHGAQMSIISAQDLPHFPGPFSINEQGWLQAPSQGLLGQAQKVFQLQISVSFGQRQSCQGMVIVKVLPVPSSQVSFLEQAQNITIPENLAPGSEVVQVQARGVDLRYEILSPVPSPLFSIGRADGVVRTTTPLELARTSGTAVSRLQVKAFEQGQLWASAKLNLTMNVQLVNLWPPRCLPALLVSQIPETAPVGTVLNTLTCEDPDSVGATLDYKLWFRSSSNPASLCLYDRVLEVNATLDCDTPGACFQHAASILVLDGGQPQMTTEVPVLVMVTPINEFSPACAPRTFRVQEDAAPHTLLGSVVGTDMDYPHDNIEYYTSGGPTTFAVDRLSGEVHLLGPLDYEQQRLYRLTVLVIDHGQDQNPNHHLSGSCTITIEVEDVNDHAPECEPPFQELTIYAPLGRSVEVTKMSCQIPQEPQRLIYSYSIVGGNSQNRFILQGAILVHSDLVLGPFWPEQPRTYELLICVADAGPSTPHLSTTATIIVHLVPRRASTVATSTHRTTVPSTMTPMLVTDTEAFWQPQPWFVVVLTATGALLLLALGWLLGRLLQGLAQLLQAPSKPAQALLLNSIQGTEGSIEGFLEAPKMEMSQAPSSVMSLHFDGRAQDSRTGRDYLFNTHTGARRWL

SEQ ID NO: 19668 - protein, 199 aa, Homo sapiens
MVLLRLLVFLFAPVVSDLCSLPCFINVSESQGPGTVLQFLSFNCSSYTPTPTLELLNVQPPTTFFNPPSLARWQGTYVGKLTLSSSAQLDALMVNHYKVQLKFTCGNHVMEGSLSVDVQRDLSHIQCAGQFASPGEARGSRQGGGRHGLSRSSLTSTLASWGNDSGARDSHTWGSAVHSAPPRPRTPRSAGKPRTWDGG

SEQ ID NO: 19669 - protein, 76 aa, Homo sapiens
MSHLPAVSPVFFQLPAPHPPTVLRPQLGLHPNPECDREKMSVRDHDPEVLTRNSACKPRGQLSGHLLKPRAPLEAA

SEQ ID NO: 19670 - protein, 482 aa, Homo sapiens
MAAAAAGAGSGPWAAQEKQFPPALLSFFIYNPRFGPREGQEENKILFYHPNEVEKNEKIRNVGLCEAIVQFTRTFSPSKPAKSLHTQKNRQFFNEPEENFWMVMVVRNPIIEKQSKDGKPVIEYQEEELLDKVYSSVLRQCYSMYKLFNGTFLKAMEDGGVKLLKERLEKFFHRYLQTLHLQSCDLLDIFGGISFFPLDKMTYLKIQSFINRMEESLNIVKYTAFLYNDQLIWSGLEQDDMRILYKYLTTSLFPRHIEPELAGRDSPIRAEMPGNLQHYGRFLTGPLNLNDPDAKCRFPKIFVNTDDTYEELHLIVYKAMSAAVCFMIDASVHPTLDFCRRLDSIVGPQLTVLASDICEQFNINKRMSGSEKEPQFKFIYFNHMNLAEKSTVHMRKTPSVSLTSVHPDLMKILGDINSDFTRVDEDEEIIVKAMSDYWVVGKKSDRRELYVILNQKNANLIEVNEEVKKLCATQFNNIFFLD

SEQ ID NO: 19671 - protein, 622 aa, Homo sapiens
MPPTQAESVIRSIIREIGQECAAHGEIVSETLIAFMVKAVVLDPSNGFNMDRTLMKSDVQNLVKLCMTRLLDTKNPSLDTIKMQVYFDMNYTNRVEFLEEHHRVLESRLGSVTREITDNRACAKEELESLYRKIISYVLLRSGLGSPTDIKTVREVTAALQSVFPQAELGTFLTLSKKDKERQLKELTMIVTGIRLFNRDCGKGGEGIDDLPAVLHVAIPATMQHIDYQLETARSQVYRYTAILEKAANDPLMRAELQPYMLKEALYNIRQYEVFLQIILSDIITGAQEVEMMTKQLGAHLEQLKMTIKSKIAVPTSQVFPIFIALSTLWTSLQDETIVVGVLSNLFTHIQPFLGAHELYFPERVMQCHLNGATVKTDVCRMKEHMEDRVNVADFRKLEWLFPETTANFDKLLIQYRGFCAYTFAATDGLLLPGNPAIGILKYKEKYYTFNSKDAAYSFAENPEHYIDIVREKAKKNTELIQLLELHQQFETFIPYSQMRDADKHYIKPITKCESSTQTNTHILPPTIVRSYEWNEWELRRKAIKLANLRQKVTHSVQTDLSHLRRENCSQVYPPKDTSTQSMREDSTGVPRPQIYLAGLRGGKSEITDEVKVNLTRDVDET

SEQ ID NO: 19672 - protein, 380 aa, Homo sapiens
MDSGCWLFGGEFEDSVFEERPERRSGPPASYCAKLCEPQWFYEETESSDDVEVLTLKKFKGDLAYRRQEYQKALQEYSSISEKLSSTNFAMKRDVQEGQARCLAHLGRHMEALEIAANLENKATNTDHLTTVLYLQLAICSSLQNLEKTIFCLQKLISLHPFNPWNWGKLAEAYLNLGPALSAALASSQKQHSFTSSDKTIKSFFPHSGKDCLLCFPETLPESSLFSVEANSSNSQKNEKALTNIQNCMAEKRETVLIETQLKACASFIRTRLLLQFTQPQQTSFALERNLRTQQEIEDKMKGFSFKEDTLLLIAEVMGEDIPEKIKDEVHPEVKCVGSVALTALVTVSSEEFEDKWFRKIKDHFCPFENQFHTEIQILA

SEQ ID NO: 19673 - protein, 551 aa, Homo sapiens
MPLSTAGILSSSSAASNRSRNKARYRTKAVSSEVDESLFGDIKSPAQGQSDSPIVLLRDKHTLQKTLTALGLDRKPETIQLITRDMVRELIVPTEDPSGESLIISPEEFERIKWASHVLTREELEARDQAFKKEKEATMDAVMTRKKIMKQKEMVWNNNKKLSDLEEVAKERAQNLLQRANKLRMEQEEELKDMSKIILNAKCHAIRDAQILEKQQIQKELDTEEKRLDQMMEVERQKSIQRQEELERKRREERIRGRRQIVEQMEKNQEERSLLAEQREQEKEQMLEYMEQLQEEDLKDMERRQQQKLKMQAEIKRINDENQKQKAELLAQEKLADQMVMEFTKKKMAREAEFEAEQERIRREKEKEIARLRAMQEKAQDYQAEQDALRAKRNQEVADREWRRKEKENARKKMETEAELRKSRLEQVAFKEHALAVQVQRDRDEFERILRAQREQIEKERLEEEKKATGRLQHANELRRQVRENQQKEVQNRIATFEEGRRLKEEAQKRRERIDEIKRKKLEELRATGLPEKYCIEAERKANILPATSVN

SEQ ID NO: 19674 - protein, 466 aa, Homo sapiens
MVRELIVPTEDPSGESLIISPEEFERIKWASHVLTREELEARDQAFKKEKEATMDAVMTRKKIMKQKEMVWNNNKKLSDLEEVAKERAQNLLQRANKLRMEQEEELKDMSKIILNAKCHAIRDAQILEKQQIQKELDTEEKRLDQMMEVERQKSIQRQEELERKRREERIRGRRQIVEQMEKNQEERSLLAEQREQEKEQMLEYMEQLQEEDLKDMERRQQQKLKMQAEIKRINDENQKQKAELLAQEKLADQMVMEFTKKKMAREAEFEAEQERIRREKEKEIARLRAMQEKAQDYQAEQDALRAKRNQEVADREWRRKEKENARKKMETEAELRKSRLEQVAFKEHALAVQVQRDRDEFERILRAQREQIEKERLEEEKKATGRLQHANELRRQVRENQQKEVQNRIATFEEGRRLKEEAQKRRERIDEIKRKKLEELRATGLPEKYCIEAERKANILPATSVN

SEQ ID NO: 19675 - protein, 772 aa, Homo sapiens
MRLSSLLALLRPALPLILGLSLGCSLSLLRVSWIQGEGEDPCVEAVGERGGPQNPDSRARLDQSDEDFKPRIVPYYRDPNKPYKKVLRTRYIQTELGSRERLLVAVLTSRATLSTLAVAVNRTVAHHFPRLLYFTGQRGARAPAGMQVVSHGDERPAWLMSETLRHLHTHFGADYDWFFIMQDDTYVQAPRLAALAGHLSINQDLYLGRAEEFIGAGEQARYCHGGFGYLLSRSLLLRLRPHLDGCRGDILSARPDEWLGRCLIDSLGVGCVSQHQGQQYRSFELAKNRDPEKEGSSAFLSAFAVHPVSEGTLMYRLHKRFSALELERAYSEIEQLQAQIRNLTVLTPEGEAGLSWPVGLPAPFTPHSRFEVLGWDYFTEQHTFSCADGAPKCPLQGASRADVGDALETALEQLNRRYQPRLRFQKQRLLNGYRRFDPARGMEYTLDLLLECVTQRGHRRALARRVSLLRPLSRVEILPMPYVTEATRVQLVLPLLVAEAAAAPAFLEAFAANVLEPREHALLTLLLVYGPREGGRGAPDPFLGVKAAAAELERRYPGTRLAWLAVRAEAPSQVRLMDVVSKKHPVDTLFFLTTVWTRPGPEVLNRCRMNAISGWQAFFPVHFQEFNPALSPQRSPPGPPGAGPDPPSPPGADPSRGAPIGGRFDRQASAEGCFYNADYLAARARLAGELAGQEEEEALEGLEVMDVFLRFSGLHLFRAVEPGLVQKFSLRDCSPRLSEELYHRCRLSNLEGLGGRAQLAMALFEQEQANST

SEQ ID NO: 19676 - protein, 666 aa, Homo sapiens
MRLSSLLALLRPALPLILGLSLGCSLSLLRVSWIQGEGEDPCVEAVGERGGPQNPDSRARLDQSDEDFKPRIVPYYRDPNKPYKKVLRTRYIQTELGSRERLLVAVLTSRATLSTLAVAVNRTVAHHFPRLLYFTGQRGARAPAGMQVVSHGDERPAWLMSETLRHLHTHFGADYDWFFIMQDDTYVQAPRLAALAGHLSINQDLYLGRAEEFIGAGEQARYCHGGFGYLLSRSLLLRLRPHLDGCRGDILSARPDEWLGRCLIDSLGVGCVSQHQGQQYRSFELAKNRDPEKEGSSAFLSAFAVHPVSEGTLMYRLHKRFSALELERAYSEIEQLQAQIRNLTVLTPEGEAGLSWPVGLPAPFTPHSRFEVLGWDYFTEQHTFSCADGAPKCPLQGASRADVGDALETALEQLNRRYQPRLRFQKQRLLNGYRRFDPARGMEYTLDLLLECVTQRGHRRALARRVSLLRPLSRVEILPMPYVTEATRVQLVLPLLVAEAAAAPAFLEAFAANVLEPREHALLTLLLVYGPREGGRGAPDPFLGVKAAAAELERRYPGTRLAWLAVRAEAPSQVRLMDVVSKKHPVDTLFFLTTVWTRPGPEVLNRCRMNAISGWQAFFPVHFQEFNPALSPQRSPPNLITFPLSASAPGRARQDGGQIENCCCIF

SEQ ID NO: 19677 - protein, 151 aa, Homo sapiens
MPRGSRSRTSRMAPPASRAPQMRAAPRPAPVAQPPAAAPPSAVGSSAAAPRQPGLMAQMATTAAGVAVGSAVGHTQGHAVTGGFSGGSNAEPARPDIAYQEPQGTQPAQQQQPCFYGIKQFLECAQNQGDIKLCEDFSKVLKQCRLAKGLA

SEQ ID NO: 19678 - protein, 358 aa, Homo sapiens
MESADFYEAEPRPPMSSHLQSPPHAPSSAAFGFPRGAGPAQPPAPPAAPEPLGGICEHETSIDISAYIDPAAFNDEFLADLFQHSRQQEKAKAAVGPTGGGGGGDFDYPGAPAGPGGAVMPGGAHGPPPGYGCAAAGYLDGRLEPLYERVGAPALRPLVIKQEPREEDEAKQLALAGLFPYQPPPPPPPSHPHPHPPPAHLAAPHLQFQIAHCGQTTMHLQPGHPTPPPTPVPSPHPAPALGAAGLPGPGSALKGLGAAHPDLRASGGSGAGKAKKSVDKNSNEYRVRRERNNIAVRKSRDKAKQRNVETQQKVLELTSDNDRLRKRVEQLSRELDTLRGIFRQLPESSLVKAMGNCA

SEQ ID NO: 19679 - protein, 344 aa, Homo sapiens
MSSHLQSPPHAPSSAAFGFPRGAGPAQPPAPPAAPEPLGGICEHETSIDISAYIDPAAFNDEFLADLFQHSRQQEKAKAAVGPTGGGGGGDFDYPGAPAGPGGAVMPGGAHGPPPGYGCAAAGYLDGRLEPLYERVGAPALRPLVIKQEPREEDEAKQLALAGLFPYQPPPPPPPSHPHPHPPPAHLAAPHLQFQIAHCGQTTMHLQPGHPTPPPTPVPSPHPAPALGAAGLPGPGSALKGLGAAHPDLRASGGSGAGKAKKSVDKNSNEYRVRRERNNIAVRKSRDKAKQRNVETQQKVLELTSDNDRLRKRVEQLSRELDTLRGIFRQLPESSLVKAMGNCA

SEQ ID NO: 19680 - protein, 239 aa, Homo sapiens
MPGGAHGPPPGYGCAAAGYLDGRLEPLYERVGAPALRPLVIKQEPREEDEAKQLALAGLFPYQPPPPPPPSHPHPHPPPAHLAAPHLQFQIAHCGQTTMHLQPGHPTPPPTPVPSPHPAPALGAAGLPGPGSALKGLGAAHPDLRASGGSGAGKAKKSVDKNSNEYRVRRERNNIAVRKSRDKAKQRNVETQQKVLELTSDNDRLRKRVEQLSRELDTLRGIFRQLPESSLVKAMGNCA

SEQ ID NO: 19681 - protein, 393 aa, Homo sapiens
MRGRGRAGSPGGRRRRPAQAGGRRGSPCRENSNSPMESADFYEAEPRPPMSSHLQSPPHAPSSAAFGFPRGAGPAQPPAPPAAPEPLGGICEHETSIDISAYIDPAAFNDEFLADLFQHSRQQEKAKAAVGPTGGGGGGDFDYPGAPAGPGGAVMPGGAHGPPPGYGCAAAGYLDGRLEPLYERVGAPALRPLVIKQEPREEDEAKQLALAGLFPYQPPPPPPPSHPHPHPPPAHLAAPHLQFQIAHCGQTTMHLQPGHPTPPPTPVPSPHPAPALGAAGLPGPGSALKGLGAAHPDLRASGGSGAGKAKKSVDKNSNEYRVRRERNNIAVRKSRDKAKQRNVETQQKVLELTSDNDRLRKRVEQLSRELDTLRGIFRQLPESSLVKAMGNCA

SEQ ID NO: 19682 - protein, 349 aa, Homo sapiens
MGPISAPSCRWRIPWQGLLLTASLFTFWNPPTTAQLTIEAVPSNAAEGKEVLLLVHNLPQDPRGYNWYKGETVDANRRIIGYVISNQQITPGPAYSNRETIYPNASLLMRNVTRNDTGSYTLQVIKLNLMSEEVTGQFSVHPETPKPSISSNNSNPVEDKDAVAFTCEPETQNTTYLWWVNGQSLPVSPRLQLSNGNRTLTLLSVTRNDVGPYECEIQNPASANFSDPVTLNVLYGPDAPTISPSDTYYHAGVNLNLSCHAASNPPSQYSWSVNGTFQQYTQKLFIPNITTKNSGSYACHTTNSATGRNRTTVRMITVSDALVQGSSPGLSARATVSIMIGVLARVALI

SEQ ID NO: 19683 - protein, 101 aa, Homo sapiens
MRTPKRTRSPKTKVSLRGETLTLQLTTVSLDTRHMVKRCDERHGRPLPHSQESQHGSATSKKAVRGTADTAPLERISAARGWALPMEATVSVFRAHQWQWN

SEQ ID NO: 19684 - protein, 1250 aa, Homo sapiens
MSAVVAQTLHVFGLRSHVANNIFYFDEQIIIFPSGNHCVKYNVDQKWQKFIPGSEKSQGMLALSISPNRRYLAISETVQEKPAITIYELSSIPCRKRKVLNNFDFQVQKFISMAFSPDSKYLLAQTSPPESNLVYWLWEKQKVMAIVRIDTQNNPVYQVSFSPQDNTQVCVTGNGMFKLLRFAEGTLKQTSFQRGEPQNYLAHTWVADDKIVVGTDTGKLFLFESGDQRWETSIMVKEPTNGSKSLDVIQESESLIEFPPVSSPLPSYEQMVAASSHSQMSMPQVFAIAAYSKGFACSAGPGRVLLFEKMEEKDFYRESREIRIPVDPQSNDPSQSDKQDVLCLCFSPSEETLVASTSKNQLYSITMSLTEISKGEPAHFEYLMYPLHSAPITGLATCIRKPLIATCSLDRSIRLWNYETNTLELFKEYQEEAYSISLHPSGHFIVVGFADKLRLMNLLIDDIRSFKEYSVRGCGECSFSNGGHLFAAVNGNVIHVYTTTSLENISSLKGHTGKIRSIVWNADDSKLISGGTDGAVYEWNLSTGKRETECVLKSCSYNCVTVSPDAKIIFAVGSDHTLKEIADSLILREISAFDVTYTAIVISHSGRMMFVGTSVGTIRAMKYPLPLQKEFNEYQAHAGPITKMLLTFDDQFLLTAAEDGCLFTWKVFDKDGRGIKREREVGFAEEVLVTKTDMEEKAQVMLELKTRVEELKMENEYQLRLKDMNYSEKIKELTDKFIQEMESLKTKNQVLRTEKEKQDVYHHEHIEDLLDKQSRELQDMECCNNQKLLLEYEKYQELQLKSQRMQEEYEKQLRDNDETKSQALEELTEFYEAKLQEKTTLLEEAQEDVRQQLREFEETKKQIEEDEDREIQDIKTKYEKKLRDEKESNLRLKGETGIMRKKFSSLQKEIEERTNDIETLKGEQMKLQGVIKSLEKDIQGLKREIQERDETIQDKEKRIYDLKKKNQELGKFKFVLDYKIKELKKQIEPRENEIRVMKEQIQEMEAELENFHKQNTQLELNITELWQKLRATDQEMRRERQKERDLEALVKRFKTDLHNCVAYIQEPRLLKEKVRGLFEKYVQRADMVEIAGLNTDLQQEYTRQREHLERNLATLKKKVVKEGELHRTDYVRIMQENVSLIKEINELRRELKFTRSQVYDLEAALKLTKKVRPQEVSETEPSRDMLSTAPTARLNEQEETGRIIEMQRLEIQRLRDQIQEQEQVTGFHTLAGVRLPSLSNSEVDLEVKTN

SEQ ID NO: 19685 - protein, 698 aa, Homo sapiens
MSAVVAQTLHVFGLRSHVANNIFYFDEQIIIFPSGNHCVKYNVDQKWQKFIPGSEKSQGMLALSISPNRRYLAISETVQEKPAITIYELSSIPCRKRKVLNNFDFQVQKFISMAFSPDSKYLLAQTSPPESNLVYWLWEKQKVMAIVRIDTQNNPVYQVSFSPQDNTQVCVTGNGMFKLLRFAEGTLKQTSFQRGEPQNYLAHTWVADDKIVVGTDTGKLFLFESGDQRWETSIMVKEPTNGSKSLDVIQESESLIEFPPVSSPLPSYEQMVAASSHSQMSMPQVFAIAAYSKGFACSAGPGRVLLFEKMEEKDFYRESREIRIPVDPQSNDPSQSDKQDVLCLCFSPSEETLVASTSKNQLYSITMSLTEISKGEPAHFEYLMYPLHSAPITGLATCIRKPLIATCSLDRSIRLWNYETNTLELFKEYQEEAYSISLHPSGHFIVVGFADKLRLMNLLIDDIRSFKEYSVRGCGECSFSNGGHLFAAVNGNVIHVYTTTSLENISSLKGHTGKIRSIVWNADDSKLISGGTDGAVYEWNLSTGKRETECVLKSCSYNCVTVSPDAKIIFAVGSDHTLKEIADSLILREISAFDVTYTAIVISHSGRMMFVGTSVGTIRAMKYPLPLQKEFNEYQAHAGPITKVSRALSPGTQSHTCLLRALFIPSTSQCLFSLLLLSYLFIHHSLNHHLLTMNILFV

SEQ ID NO: 19686 - protein, 1490 aa, Homo sapiens
MPNSERHGGKKDGSGGASGTLQPSSGGGSSNSRERHRLVSKHKRHKSKHSKDMGLVTPEAASLGTVIKPLVEYDDISSDSDTFSDDMAFKLDRRENDERRGSDRSDRLHKHRHHQHRRSRDLLKAKQTEKEKSQEVSSKSGSMKDRISGSSKRSNEETDDYGKAQVAKSSSKESRSSKLHKEKTRKERELKSGHKDRSKSHRKRETPKSYKTVDSPKRRSRSPHRKWSDSSKQDDSPSGASYGQDYDLSPSRSHTSSNYDSYKKSPGSTSRRQSVSPPYKEPSAYQSSTRSPSPYSRRQRSVSPYSRRRSSSYERSGSYSGRSPSPYGRRRSSSPFLSKRSLSRSPLPSRKSMKSRSRSPAYSRHSSSHSKKKRSSSRSRHSSISPVRLPLNSSLGAELSRKKKERAAAAAAAKMDGKESKGSPVFLPRKENSSVEAKDSGLESKKLPRSVKLEKSAPDTELVNVTHLNTEVKNSSDTGKVKLDENSEKHLVKDLKAQGTRDSKPIALKEEIVTPKETETSEKETPPPLPTIASPPPPLPTTTPPPQTPPLPPLPPIPALPQQPPLPPSQPAFSQVPASSTSTLPPSTHSKTSAVSSQANSQPPVQVSVKTQVSVTAAIPHLKTSTLPPLPLPPLLPGDDDMDSPKETLPSKPVKKEKEQRTRHLLTDLPLPPELPGGDLSPPDSPEPKAITPPQQPYKKRPKICCPRYGERRQTESDWGKRCVDKFDIIGIIGEGTYGQVYKAKDKDTGELVALKKVRLDNEKEGFPITAIREIKILRQLIHRSVVNMKEIVTDKQDALDFKKDKGAFYLVFEYMDHDLMGLLESGLVHFSEDHIKSFMKQLMEGLEYCHKKNFLHRDIKCSNILLNNSGQIKLADFGLARLYNSEESRPYTNKVITLWYRPPELLLGEERYTPAIDVWSCGCILGELFTKKPIFQANLELAQLELISRLCGSPCPAVWPDVIKLPYFNTMKPKKQYRRRLREEFSFIPSAALDLLDHMLTLDPSKRCTAEQTLQSDFLKDVELSKMAPPDLPHWQDCHELWSKKRRRQRQSGVVVEEPPPSKTSRKETTSGTSTEPVKNSSPAPPQPAPGKVESGAGDAIGLADITQQLNQSELAVLLNLLQSQTDLSIPQMAQLLNIHSNPEMQQQLEALNQSISALTEATSQQQDSETMAPEESLKEAPSAPVILPSAEQTTLEASSTPADMQNILAVLLSQLMKTQEPAGSLEENNSDKNSGPQGPRRTPTMPQEEAAACPPHILPPEKRPPEPPGPPPPPPPPPLVEGDLSSAPQELNPAVTAALLQLLSQPEAEPPGHLPHEHQALRPMEYSTRPRPNRTYGNTDGPETGFSAIDTDERNSGPALTESLVQTLVKNRTFSGSLSHLGESSSYQGTGSVQFPGDQDLRFARVPLALHPVVGQPFLKAEGSSNSVVHAETKLQNYGELGPGTTGASSSGAGLHWGGPTQSSAYGKLYRGPTRVPPRGGRGRGVPY

SEQ ID NO: 19687 - protein, 1481 aa, Homo sapiens
MPNSERHGGKKDGSGGASGTLQPSSGGGSSNSRERHRLVSKHKRHKSKHSKDMGLVTPEAASLGTVIKPLVEYDDISSDSDTFSDDMAFKLDRRENDERRGSDRSDRLHKHRHHQHRRSRDLLKAKQTEKEKSQEVSSKSGSMKDRISGSSKRSNEETDDYGKAQVAKSSSKESRSSKLHKEKTRKERELKSGHKDRSKSHRKRETPKSYKTVDSPKRRSRSPHRKWSDSSKQDDSPSGASYGQDYDLSPSRSHTSSNYDSYKKSPGSTSRRQSVSPPYKEPSAYQSSTRSPSPYSRRQRSVSPYSRRRSSSYERSGSYSGRSPSPYGRRRSSSPFLSKRSLSRSPLPSRKSMKSRSRSPAYSRHSSSHSKKKRSSSRSRHSSISPVRLPLNSSLGAELSRKKKERAAAAAAAKMDGKESKGSPVFLPRKENSSVEAKDSGLESKKLPRSVKLEKSAPDTELVNVTHLNTEVKNSSDTGKVKLDENSEKHLVKDLKAQGTRDSKPIALKEEIVTPKETETSEKETPPPLPTIASPPPPLPTTTPPPQTPPLPPLPPIPALPQQPPLPPSQPAFSQVPASSTSTLPPSTHSKTSAVSSQANSQPPVQVSVKTQVSVTAAIPHLKTSTLPPLPLPPLLPGDDDMDSPKETLPSKPVKKEKEQRTRHLLTDLPLPPELPGGDLSPPDSPEPKAITPPQQPYKKRPKICCPRYGERRQTESDWGKRCVDKFDIIGIIGEGTYGQVYKAKDKDTGELVALKKVRLDNEKEGFPITAIREIKILRQLIHRSVVNMKEIVTDKQDALDFKKDKGAFYLVFEYMDHDLMGLLESGLVHFSEDHIKSFMKQLMEGLEYCHKKNFLHRDIKCSNILLNNSGQIKLADFGLARLYNSEESRPYTNKVITLWYRPPELLLGEERYTPAIDVWSCGCILGELFTKKPIFQANLELAQLELISRLCGSPCPAVWPDVIKLPYFNTMKPKKQYRRRLREEFSFIPSAALDLLDHMLTLDPSKRCTAEQTLQSDFLKDVELSKMAPPDLPHWQDCHELWSKKRRRQRQSGVVVEEPPPSKTSRKETTSGTSTEPVKNSSPAPPQPAPGKVESGAGDAIGLADITQQLNQSELAVLLNLLQSQTDLSIPQMAQLLNIHSNPEMQQQLEALNQSISALTEATSQQQDSETMAPEESLKEAPSAPVILPSAEQTTLEASSTPADMQNILAVLLSQLMKTQEPAGSLEENNSDKNSGPQGPRRTPTMPQEEAAEKRPPEPPGPPPPPPPPPLVEGDLSSAPQELNPAVTAALLQLLSQPEAEPPGHLPHEHQALRPMEYSTRPRPNRTYGNTDGPETGFSAIDTDERNSGPALTESLVQTLVKNRTFSGSLSHLGESSSYQGTGSVQFPGDQDLRFARVPLALHPVVGQPFLKAEGSSNSVVHAETKLQNYGELGPGTTGASSSGAGLHWGGPTQSSAYGKLYRGPTRVPPRGGRGRGVPY

SEQ ID NO: 19688 - protein, 1273 aa, Homo sapiens
MPNSERHGGKKDGSGGASGTLQPSSGGGSSNSRERHRLVSKHKRHKSKHSKDMGLVTPEAASLGTVIKPLVEYDDISSDSDTFSDDMAFKLDRRENDERRGSDRSDRLHKHRHHQHRRSRDLLKAKQTEKEKSQEVSSKSGSMKDRISGSSKRSNEETDDYGKAQVAKSSSKESRSSKLHKEKTRKERELKSGHKDRSKSHRKRETPKSYKTVDSPKRRSRSPHRKWSDSSKQDDSPSGASYGQDYDLSPSRSHTSSNYDSYKKSPGSTSRRQSVSPPYKEPSAYQSSTRSPSPYSRRQRSVSPYSRRRSSSYERSGSYSGRSPSPYGRRRSSSPFLSKRSLSRSPLPRKSMKSRSRSPAYSRHSSSHSKKKRSSSRSRHSSISPVRLPLNSSLGAELSRKKKERAAAAAAAKMDGKESKGSPVFLPRKENSSVEAKDSGLESKKLPRSVKLEKSAPDTELVNVTHLNTEVKNSSDTGKVKLDENSEKHLVKDLKAQGTRDSKPIALKEEIVTPKETETSEKETPPPLPTIASPPPPLPTTTPPPQTPPLPPLPPIPALPQQPPLPPSQPAFSQVPASSTSTLPPSTHSKTSAVSSQANSQPPVQVSVKTQVSVTAAIPHLKTSTLPPLPLPPLLPGDDDMDSPKETLPSKPVKKEKEQRTRHLLTDLPLPPELPGGDLSPPDSPEPKAITPPQQPYKKRPKICCPRYGERRQTESDWGKRCVDKFDIIGIIGEGTYGQVYKAKDKDTGELVALKKVRLDNEKEGFPITAIREIKILRQLIHRSVVNMKEIVTDKQDALDFKKDKGAFYLVFEYMDHDLMGLLESGLVHFSEDHIKSFMKQLMEGLEYCHKKNFLHRDIKCSNILLNNSGQIKLADFGLARLYNSEESRPYTNKVITLWYRPPELLLGEERYTPAIDVWSCGCILGELFTKKPIFQANLELAQLELISRLCGSPCPAVWPDVIKLPYFNTMKPKKQYRRRLREEFSFIPSAALDLLDHMLTLDPSKRCTAEQTLQSDFLKDVELSKMAPPDLPHWQDCHELWSKKRRRQRQSGVVVEEPPPSKTSRKETTSGTSTEPVKNSSPAPPQPAPGKVESGAGDAIGLADITQQLNQSELAVLLNLLQSQTDLSIPQMAQLLNIHSNPEMQQQLEALNQSISALTEATSQQQDSETMAPEESLKEAPSAPVILPSAEQTTLEASSTPAILWYMQRPNCKTMGSWGQEPLGPAAQEQAFTGGAQLSLLLMENSIGGLQESHQEGEEGEEFLTNPETSVS

SEQ ID NO: 19689 - protein, 80 aa, Homo sapiens
MARTLEPLAKKIFKGVLVAELVGVFGAYFLFSKMHTSQDFRQTMSKKYPFILEVYYKSTEKSGMYGIRELDQKTWLNSKN

SEQ ID NO: 19690 - protein, 241 aa, Homo sapiens
MFARGLKRKCVGHEEDVEGALAGLKTVSSYSLQRQSLLDMSLVKLQLCHMLVEPNLCRSVLIANTVRQIQEEMTQDGTWRTVAPQAAERAPLDRLVSTEILCRAAWGQEGAHPAPGLGDGHTQGPVSDLCPVTSAQAPRHLQSSAWEMDGPRENRGSFHKSLDQIFETLETKNPSCMEELFSDVDSPYYDLDTVLTGMMGGARPGPCEGLEGLAPATPGPSSSCKSDLGELDHVVEILVET

SEQ ID NO: 19691 - protein, 561 aa, Homo sapiens
MADHNPDSDSTPRTLLRRVLDTADPRTPRRPRSARAGARRALLETASPRKLSGQTRTIARGRSHGARSVGRSAHIQASGHLEEQTPRTLLKNILLTAPESSILMPESVVKPVPAPQAVQPSRQESSCGSLELQLPELEPPTTLAPGLLAPGRRKQRLRLSVFQQGVDQGLSLSQEPQGNADASSLTRSLNLTFATPLQPQSVQRPGLARRPPARRAVDVGAFLRDLRDTSLAPPNIVLEDTQPFSQPMVGSPNVYHSLPCTPHTGAEDAEQAAGRKTQSSGPGLQKNSPGKPAQFLAGEAEEVNAFALGFLSTSSGVSGEDEVEPLHDGVEEAEKKMEEEGVSVSEMEATGAQGPSRVEEAEGHTEVTEAEGSQGTAEADGPGASSGDEDASGRAASPESASSTPESLQARRHHQFLEPAPAPGAAVLSSEPAEPLLVRHPPRPRTTGPRPRQDPHKAGLSHYVKLFSFYAKMPMERKALEMVEKCLDKYFQHLCDDLEVFAAHAGRKTVKPEDLELLMRRQGLVTDQVSLHVLVERHLPLEYRQLLIPCAYSGNSVFPAQ

SEQ ID NO: 19692 - protein, 299 aa, Homo sapiens
MADHNPDSDSTPRTLLRRVLDTADPRTPRRPRSARAGARRALLETASPRKLSGQTRTIARGRSHGARSVGRSAHIQASGHLEEQTPRTLLKNILLTAPESSILMPESVVKPVPAPQAVQPSRQESSCGSLELQLPELEPPTTLAPGLLAPGRRKQRLRLSVFQQGVDQGLSLSQEPQGNADASSLTRSLNLTFATPLQPQSVQRPGLARRPPARRAVDVGAFLRDLRDTSLAPPNIVLEDTQPFSQPMVGSPNVYHSLPCTPHTGAEDAEQAAGRKTQSSGPGLQKNSECVALVAWSQI

SEQ ID NO: 19693 - protein, 151 aa, Homo sapiens
MADHNPDSDSTPRTLLRRVLDTADPRTPRRPRSARAGARRALLETASPRKLSGQTRTIARGRSHGARVSTQPTDPKGPWLPRGGGLRSSSALEPTLRKSQGRRTDWLLGASPIVCWQIGPYSGQWALGGTDTSDAAEEHPTNCPRIFHPDA

SEQ ID NO: 19694 - protein, 243 aa, Homo sapiens
MCSRGWDSCLALELLLLPLSLLVTSIQGHLVHMTVVSGSNVTLNISESLPENYKQLTWFYTFDQKIVEWDSRKSKYFESKFKGRVRLDPQSGALYISKVQKEDNSTYIMRVLKKTGNEQEWKIKLQVLDPVPKPVIKIEKIEDMDDNCYLKLSCVIPGESVNYTWYGDKRPFPKELQNSVLETTLMPHNYSRCYTCQVSNSVSSKNGTVCLSPPCTLARSFGVEWIASWLVVTVPTILGLLLT

SEQ ID NO: 19695 - protein, 169 aa, Homo sapiens
MCSRGWDSCLALELLLLPLSLLVTSIQGHLVHMTVVSGSNVTLNISESLPENYKQLTWFYTFDQKIVEWDSRKSKYFESKFKGRVRLDPQSGALYISKVQKEDNSTYIMRVLKKTGNEQEWKIKLQVLGESGEPKSKSPLQWPQMDHCRASWEAWGTLGEEERKTSGQV

SEQ ID NO: 19696 - protein, 730 aa, Homo sapiens
MASGRGASSRWFFTREQLENTPSRRCGVEADKELSCRQQAANLIQEMGQRLNVSQLTINTAIVYMHRFYMHHSFTKFNKNIISSTALFLAAKVEEQARKLEHVIKVAHACLHPLEPLLDTKCDAYLQQTQELVILETIMLQTLGFEITIEHPHTDVVKCTQLVRASKDLAQTSYFMATNSLHLTTFCLQYKPTVIACVCIHLACKWSNWEIPVSTDGKHWWEYVDPTVTLELLDELTHEFLQILEKTPNRLKKIRNWRANQAARKPKVDGQVSETPLLGSSLVQNSILVDSVTGVPTNPSFQKPSTSAFPAPVPLNSGNISVQDSHTSDNLSMLATGMPSTSYGLSSHQEWPQHQDSARTEQLYSQKQETSLSGSQYNINFQQGPSISLHSGLHHRPDKISDHSSVKQEYTHKAGSSKHHGPISTTPGIIPQKMSLDKYREKRKLETLDLDVRDHYIAAQVEQQHKQGQSQAASSSSVTSPIKMKIPIANTEKYMADKKEKSGSLKLRIPIPPTDKSASKEELKMKIKVSSSERHSSSDEGSGKSKHSSPHISRDHKEKHKEHPSSRHHTSSHKHSHSHSGSSSGGSKHSADGIPPTVLRSPVGLSSDGISSSSSSSRKRLHVNDASHNHHSKMSKSSKSSGSSSSSSSSVKQYISSHNSVFNHPLPPPPPVTYQVGYGHLSTLVKLDKKPVETNGPDANHEYSTSSQHMDYKDTFDMLDSLLSAQGMNM

SEQ ID NO: 19697 - protein, 663 aa, Homo sapiens
MASGRGASSRWFFTREQLENTPSRRCGVEADKELSCRQQAANLIQEMGQRLNVSQLTINTAIVYMHRFYMHHSFTKFNKNIISSTALFLAAKVEEQARKLEHVIKVAHACLHPLEPLLDTKCDAYLQQTQELVILETIMLQTLGFEITIEHPHTDVVKCTQLVRASKDLAQTSYFMATNSLHLTTFCLQYKPTVIACVCIHLACKWSNWEIPVSTDGKHWWEYVDPTVTLELLDELTHEFLQILEKTPNRLKKIRNWRANQAARKPKVDGQVSETPLLGSSLVQNSILVDSVTGVPTNPSFQKPSTSAFPAPVPLNSGNISVQDSHTSDNLSMLATGMPSTSYGLSSHQEWPQHQDSARTEQLYSQKQETSLSGSQYNINFQQGPSISLHSGLHHRPDKISDHSSVKQEYTHKAGSSKHHGPISTTPGIIPQKMSLDKYREKRKLETLDLDVRDHYIAAQVEQQHKQGQSQAASSSSVTSPIKMKIPIANTEKYMADKKEKSGSLKLRIPIPPTDKSASKEELKMKIKVSSSERHSSSDEGSGKSKHSSPHISRDHKEKHKEHPSSRHHTSSHKHSHSHSGSSSGGSKHSADGIPPTVLRSPVGLSSDGISSSSSSSRKRLHVNDASHNHHSKMSKSSKSSGGLRTSQHPRETGQEASGDQRS

SEQ ID NO: 19698 - protein, 1480 aa, Homo sapiens
MQRSPLEKASVVSKLFFSWTRPILRKGYRQRLELSDIYQIPSVDSADNLSEKLEREWDRELASKKNPKLINALRRCFFWRFMFYGIFLYLGEVTKAVQPLLLGRIIASYDPDNKEERSIAIYLGIGLCLLFIVRTLLLHPAIFGLHHIGMQMRIAMFSLIYKKTLKLSSRVLDKISIGQLVSLLSNNLNKFDEGLALAHFVWIAPLQVALLMGLIWELLQASAFCGLGFLIVLALFQAGLGRMMMKYRDQRAGKISERLVITSEMIENIQSVKAYCWEEAMEKMIENLRQTELKLTRKAAYVRYFNSSAFFFSGFFVVFLSVLPYALIKGIILRKIFTTISFCIVLRMAVTRQFPWAVQTWYDSLGAINKIQDFLQKQEYKTLEYNLTTTEVVMENVTAFWEEGFGELFEKAKQNNNNRKTSNGDDSLFFSNFSLLGTPVLKDINFKIERGQLLAVAGSTGAGKTSLLMVIMGELEPSEGKIKHSGRISFCSQFSWIMPGTIKENIIFGVSYDEYRYRSVIKACQLEEDISKFAEKDNIVLGEGGITLSGGQRARISLARAVYKDADLYLLDSPFGYLDVLTEKEIFESCVCKLMANKTRILVTSKMEHLKKADKILILHEGSSYFYGTFSELQNLQPDFSSKLMGCDSFDQFSAERRNSILTETLHRFSLEGDAPVSWTETKKQSFKQTGEFGEKRKNSILNPINSIRKFSIVQKTPLQMNGIEEDSDEPLERRLSLVPDSEQGEAILPRISVISTGPTLQARRRQSVLNLMTHSVNQGQNIHRKTTASTRKVSLAPQANLTELDIYSRRLSQETGLEISEEINEEDLKECFFDDMESIPAVTTWNTYLRYITVHKSLIFVLIWCLVIFLAEVAASLVVLWLLGNTPLQDKGNSTHSRNNSYAVIITSTSSYYVFYIYVGVADTLLAMGFFRGLPLVHTLITVSKILHHKMLHSVLQAPMSTLNTLKAGGILNRFSKDIAILDDLLPLTIFDFIQLLLIVIGAIAVVAVLQPYIFVATVPVIVAFIMLRAYFLQTSQQLKQLESEGRSPIFTHLVTSLKGLWTLRAFGRQPYFETLFHKALNLHTANWFLYLSTLRWFQMRIEMIFVIFFIAVTFISILTTGEGEGRVGIILTLAMNIMSTLQWAVNSSIDVDSLMRSVSRVFKFIDMPTEGKPTKSTKPYKNGQLSKVMIIENSHVKKDDIWPSGGQMTVKDLTAKYTEGGNAILENISFSISPGQRVGLLGRTGSGKSTLLSAFLRLLNTEGEIQIDGVSWDSITLQQWRKAFGVIPQKVFIFSGTFRKNLDPYEQWSDQEIWKVADEVGLRSVIEQFPGKLDFVLVDGGCVLSHGHKQLMCLARSVLSKAKILLLDEPSAHLDPVTYQIIRRTLKQAFADCTVILCEHRIEAMLECQQFLVIEENKVRQYDSIQKLLNERSLFRQAISPSDRVKLFPHRNSSKCKSKPQIAALKEETEEEVQDTRL

SEQ ID NO: 19699 - protein, 1419 aa, Homo sapiens
MQRSPLEKASVVSKLFFSWTRPILRKGYRQRLELSDIYQIPSVDSADNLSEKLEREWDRELASKKNPKLINALRRCFFWRFMFYGIFLYLGEVTKAVQPLLLGRIIASYDPDNKEERSIAIYLGIGLCLLFIVRTLLLHPAIFGLHHIGMQMRIAMFSLIYKKTLKLSSRVLDKISIGQLVSLLSNNLNKFDEGLALAHFVWIAPLQVALLMGLIWELLQASAFCGLGFLIVLALFQAGLGRMMMKYRDQRAGKISERLVITSEMIENIQSVKAYCWEEAMEKMIENLRQTELKLTRKAAYVRYFNSSAFFFSGFFVVFLSVLPYALIKGIILRKIFTTISFCIVLRMAVTRQFPWAVQTWYDSLGAINKIQDFLQKQEYKTLEYNLTTTEVVMENVTAFWEETSLLMVIMGELEPSEGKIKHSGRISFCSQFSWIMPGTIKENIIFGVSYDEYRYRSVIKACQLEEDISKFAEKDNIVLGEGGITLSGGQRARISLARAVYKDADLYLLDSPFGYLDVLTEKEIFESCVCKLMANKTRILVTSKMEHLKKADKILILHEGSSYFYGTFSELQNLQPDFSSKLMGCDSFDQFSAERRNSILTETLHRFSLEGDAPVSWTETKKQSFKQTGEFGEKRKNSILNPINSIRKFSIVQKTPLQMNGIEEDSDEPLERRLSLVPDSEQGEAILPRISVISTGPTLQARRRQSVLNLMTHSVNQGQNIHRKTTASTRKVSLAPQANLTELDIYSRRLSQETGLEISEEINEEDLKECFFDDMESIPAVTTWNTYLRYITVHKSLIFVLIWCLVIFLAEVAASLVVLWLLGNTPLQDKGNSTHSRNNSYAVIITSTSSYYVFYIYVGVADTLLAMGFFRGLPLVHTLITVSKILHHKMLHSVLQAPMSTLNTLKAGGILNRFSKDIAILDDLLPLTIFDFIQLLLIVIGAIAVVAVLQPYIFVATVPVIVAFIMLRAYFLQTSQQLKQLESEGRSPIFTHLVTSLKGLWTLRAFGRQPYFETLFHKALNLHTANWFLYLSTLRWFQMRIEMIFVIFFIAVTFISILTTGEGEGRVGIILTLAMNIMSTLQWAVNSSIDVDSLMRSVSRVFKFIDMPTEGKPTKSTKPYKNGQLSKVMIIENSHVKKDDIWPSGGQMTVKDLTAKYTEGGNAILENISFSISPGQRVGLLGRTGSGKSTLLSAFLRLLNTEGEIQIDGVSWDSITLQQWRKAFGVIPQKVFIFSGTFRKNLDPYEQWSDQEIWKVADEVGLRSVIEQFPGKLDFVLVDGGCVLSHGHKQLMCLARSVLSKAKILLLDEPSAHLDPVTYQIIRRTLKQAFADCTVILCEHRIEAMLECQQFLVIEENKVRQYDSIQKLLNERSLFRQAISPSDRVKLFPHRNSSKCKSKPQIAALKEETEEEVQDTRL

SEQ ID NO: 19700 - protein, 604 aa, Homo sapiens
MQRSPLEKASVVSKLFFSWTRPILRKGYRQRLELSDIYQIPSVDSADNLSEKLEREWDRELASKKNPKLINALRRCFFWRFMFYGIFLYLGEVTKAVQPLLLGRIIASYDPDNKEERSIAIYLGIGLCLLFIVRTLLLHPAIFGLHHIGMQMRIAMFSLIYKKTLKLSSRVLDKISIGQLVSLLSNNLNKFDEGLALAHFVWIAPLQVALLMGLIWELLQASAFCGLGFLIVLALFQAGLGRMMMKYRDQRAGKISERLVITSEMIENIQSVKAYCWEEAMEKMIENLRQTELKLTRKAAYVRYFNSSAFFFSGFFVVFLSVLPYALIKGIILRKIFTTISFCIVLRMAVTRQFPWAVQTWYDSLGAINKIQDFLQKQEYKTLEYNLTTTEVVMENVTAFWEEGFGELFEKAKQNNNNRKTSNGDDSLFFSNFSLLGTPVLKDINFKIERGQLLAVAGSTGAGKTSLLMVIMGELEPSEGKIKHSGRISFCSQFSWIMPGTIKENIIFGVSYDEYRYRSVIKACQLEEDISKFAEKDNIVLGEGGITLSGGQRARISLARAVYKDADLYLLDSPFGYLDVLTEKEIFERRRCSCLLDRNKKTIF

SEQ ID NO: 19701 - protein, 571 aa, Homo sapiens
MEYEVKKGKKGFVSPIRRLVFPKAGRRAACRSSVSRRPLHSMPLYPPDYLIDPQILLCDYLEKEVKFLGHLTWVTSSLNPSSRDELLQLLDTARQLKELPLKTTAEQDSILSLSARCLLLTWRDNEELILRIPTHEIAAASYLQDDALHLLVLKTGLGVDPVPAGVDASPGGAGRDPGPPGGAPEKRRVGTAERRHTICSLDWRMGWGGGAAEARAGGGGGGSLERQRAGARASGSWERRQTFSGSWERRHGGGGGGGGAGKPGGSWERRQAGSGGGGSWERRHPGPNPLDPQDPSPDAYCNLVILAVANRDAAEESCALICQVFQIIYGDQSIECVDRAGYHYTSTPERPWLCSRSESCHTDGTYAYDADFSCCSSFNGSQDTFEACYSGTSTPSFHGSHCSGSDHSSLGLEQLQDYMVTLRSKLGPLEIQQFAMLLREYRLGLPIQDYCTGLLKLYGDRRKFLLLGMRPFIPDQDIGYFEGFLEGVGIREGGILTDSFGRIKRSMSSTSASAVRSYDGAAQRPEAQAFHRLLADITHDIEALAPDDDDDDEDEPRGSRGGSDAAEDNYL

SEQ ID NO: 19702 - protein, 433 aa, Homo sapiens
MEYEVKKGKKGFVSPIRRLVFPKAGRRAACRSSVSRRPLHSMPLYPPDYLIDPQILLCDYLEKEVKFLGHLTWVTSSLNPSSRDELLQLLDTARQLKELPLKTTAEQDSILSLSARCLLLTWRDNEELILRIPTHEIAAASYLQDDALHLLVLKTGLGVDPVPAGVDASPGGAGRDPGPPGGAPEKRRVGTAERRHTICSLDWRMGWGGGAAEARAGGGGGGSLERQRAGARASGSWERRQTFSGSWERRHGGGGGGGGAGKPGGSWERRQAGSGGGGSWERRHPGPNPLDPQDPSPDAYCNLVILAVANRDAAEESCALICQVFQIIYGDQSIECVDRAGYHYTSTPERPWLCSRIMAPRTPLKHVTAARPHLLSMAPTAAAATTAVWAWSSYRITWSRCGVSWGPSRSSSLRCCCGSTGWGCPSRTIAQAC

SEQ ID NO: 19703 - protein, 235 aa, Homo sapiens
MEYEVKKGKKGFVSPIRRLVFPKAGRRAACRSSVSRRPLHSMPLYPPDYLIDPQILLCDYLEKEVKFLGHLTWVTSSLNPSSRDELLQLLDTARQLKELPLKTTAEQDSILSLSARCLLLTWRDNEELILRIPTHEIAAASYLQDDALHLLVLKTGLGVDPVPAGVDASPGGAGRDPGPPGGAPEKRRVGTAERRHTICSLDWRMGWGGGAAEAPTRSTRRTPAPTPTATWSSWL

SEQ ID NO: 19704 - protein, 355 aa, Homo sapiens
METPNTTEDYDTTTEFDYGDATPCQKVNERAFGAQLLPPLYSLVFVIGLVGNILVVLVLVQYKRLKNMTSIYLLNLAISDLLFLFTLPFWIDYKLKDDWVFGDAMCKILSGFYYTGLYSEIFFIILLTIDRYLAIVHAVFALRARTVTFGVITSIIIWALAILASMPGLYFSKTQWEFTHHTCSLHFPHESLREWKLFQALKLNLFGLVLPLLVMIICYTGIIKILLRRPNEKKSKAVRLIFVIMIIFFLFWTPYNLTILISVFQDFLFTHECEQSRHLDLAVQVTEVIAYTHCCVNPVIYAFVGERFRKYLRQLFHRRVAVHLVKWLPFLSVDRLERVSSTSPSTGEHELSAGF

SEQ ID NO: 19705 - protein, 147 aa, Homo sapiens
MFLNGNCLETLKKKEPEGGRRRLSHPGNMGWMRPSQETTPPDRSHHSGFGLFCGDPGPEIEPFSLWVFPQEMVLEIHQLFMDHEYPCHHITSHCTWVAAHWTTSQSCAAWQGCRRACCSTWWKSPAQCTRPTVMSATFETAQEPGPS

SEQ ID NO: 19706 - protein, 323 aa, Homo sapiens
MYHNSSQKRHWTFSSEEQLARLRADANRKFRCKAVANGKVLPNDPVFLEPHEEMTLCKYYEKRLLEFCSVFKPAMPRSVVGTACMYFKRFYLNNSVMEYHPRIIMLTCAFLACKVDEFNVSSPQFVGNLRESPLGQEKALEQILEYELLLIQQLNFHLIVHNPYRPFEGFLIDLKTRYPILENPEILRKTADDFLNRIALTDAYLLYTPSQIALTAILSSASRAGITMESYLSESLMLKENRTCLSQLLDIMKSMRNLVKKYEPPRSEEVAVLKQKLERCHSAELALNVITKKRKGYEDDDYVSKKSKHEEEEWTDDDLVESL

SEQ ID NO: 19707 - protein, 185 aa, Homo sapiens
MARGAALALLLFGLLGVLVAAPDGGFDLSDALPDNENKKPTAIPKKPSAGDDFDLGDAVVDGENDDPRPPNPPKPMPNPNPNHPSSSGSFSDADLADGVSGGEGKGGSDGGGSHRKEGEEADAPGVIPGIVGAVVVAVAGAISSFIAYQKKKLCFKENAEQGEVDMESHRNANAEPAVQRTLLEK

SEQ ID NO: 19708 - protein, 160 aa, Homo sapiens
MARGAALALLLFGLLGVLVAAPDGGFDLSDALPDNENKKPTAIPKKPSAGDDFDLGDAVVDGENDDPRPPNPPKPMPNPNPNHPSSSGSFSDADLADGVSGGEGKGGSDGGGSHRKEGEEADAPGVIPGIVGAVVVAVAGAISSFIAYQKKKLCFKENDG

SEQ ID NO: 19709 - protein, 169 aa, Homo sapiens
MARGAALALLLFGLLGVLVAAPDGGFDLSDALPGDDFDLGDAVVDGENDDPRPPNPPKPMPNPNPNHPSSSGSFSDADLADGVSGGEGKGGSDGGGSHRKEGEEADAPGVIPGIVGAVVVAVAGAISSFIAYQKKKLCFKENAEQGEVDMESHRNANAEPAVQRTLLEK

SEQ ID NO: 19710 - protein, 410 aa, Homo sapiens
MDLTGLLLDEEGTFSLAGFQDFTFLPGHQKLSARIRRRLYYGWDWEADCSLEELSSPVADIAVELLQKAAPSPIRRLQKKYVAHVSREACISPCAMMLALVYIERLRHRNPDYLQHVSSSDLFLISMMVASKYLYDEGEEEEVFNDEWGAAGGVAVPTLNALERGFLSAMDWHLYTDPREIFEVLSWLESCVAEQQGRWRGWYTYTDLCVLLEQPTWQLALGSLCQRLVKLSCLLAVAYVSSVALAVASVAVIHQSLGLSCIPTPGPPDLGLTSRCLLEPCIPSVPQCLPSLANVSSCLEGSMGLRSLWGSLLASLTPPPLPPPDPPAPPTLLHNCHLCQKLQRDSPTCHACLHPNRTVPTALSSPWYHTYGLAPPWPWSPVLLSLPQPQQCSLFSVMELARLKSFVFPG

SEQ ID NO: 19711 - protein, 257 aa, Homo sapiens
MERSNAATKCGEEPRSGSRRLPKAEGDKSGSAGAPSKNSSRLGGRPCMCTAGRRPNRASGRRRRSCSPAPTWPPLCCYPQSRPTASAAGPGACMRASGRPHGNTTASTAPPRHPRPRRPGGPALRPTPRPCAGPAPPPASRDCRCRRPRRWPRAGRRGRRAGACKPSCAGAAWSARGAPLCSYRTSCAGSCGARTAPTPAPTCASPSAAASSCCRRRRACSSPTTAWSGACGAGPTAATAAQPGKPRSAAAPGRARA

SEQ ID NO: 19712 - protein, 354 aa, Homo sapiens
MGPVSLLPKYQKLNTWNGDLAKMTHLQAGLSPETIEKARLELNENPDVLHQDIQQVRDMIITRPDIGFLRTDDAFILRFLRARKFHQADAFRLLAQYFQYRQLNLDMFKNFKADDPGIKRALIDGFPGVLENRDHYGRKILLLFAANWDQSRNSFTDILRAILLSLEVLIEDPELQINGFILIIDWSNFSFKQASKLTPSILKLAIEGLQDSFPARFGGVHFVNQPWYIHALYTLIKPFLKDKTRKRIFLHGNNLNSLHQLIHPEFLPSEFGGTLPPYDMGTWARTLLGPDYSDENDYTHTSYNAMHVKHTSSNLERECSPKLMKRSQSVVEAGTLKHEEKGENENTQPLLALD

SEQ ID NO: 19713 - protein, 167 aa, Homo sapiens
MGPVSLLPKYQKLNTWNGDLAKMTHLQAGLSPETIEKARLELNENPDVLHQDIQQVRDMIITRPDIGFLRTDDAFILRFLRARKFHQADAFRLLAQYFQYRQLNLDMFKNFKADDPGIKRALIDGFPGVLENRDHYGRKILLLFAANWDQRTPSQTSFVPSCCHWKS

SEQ ID NO: 19714 - protein, 898 aa, Homo sapiens
MFSQQQQQQLQQQQQQLQQLQQQQLQQQQLQQQQLLQLQQLLQQSPPQAPLPMAVSRGLPPQQPQQPLLNLQGTNSASLLNGSMLQRALLLQQLQGLDQFAMPPATYDTAGLTMPTATLGNLRGYGMASPGLAAPSLTPPQLATPNLQQFFPQATRQSLLGPPPVGVPMNPSQFNLSGRNPQKQARTSSSTTPNRKDSSSQTMPVEDKSDPPEGSEEAAEPRMDTPEDQDLPPCPEDIAKEKRTPAPEPEPCEASELPAKRLRSSEEPTEKEPPGQLQVKAQPQARMTVPKQTQTPDLLPEALEAQVLPRFQPRVLQVQAQVQSQTQPRIPSTDTQVQPKLQKQAQTQTSPEHLVLQQKQVQPQLQQEAEPQKQVQPQVQPQAHSQGPRQVQLQQEAEPLKQVQPQVQPQAHSQPPRQVQLQLQKQVQTQTYPQVHTQAQPSVQPQEHPPAQVSVQPPEQTHEQPHTQPQVSLLAPEQTPVVVHVCGLEMPPDAVEAGGGMEKTLPEPVGTQVSMEEIQNESACGLDVGECENRAREMPGVWGAGGSLKVTILQSSDSRAFSTVPLTPVPRPSDSVSSTPAATSTPSKQALQFFCYICKASCSSQQEFQDHMSEPQHQQRLGEIQHMSQACLLSLLPVPRDVLETEDEEPPPRRWCNTCQLYYMGDLIQHRRTQDHKIAKQSLRPFCTVCNRYFKTPRKFVEHVKSQGHKDKAKELKSLEKEIAGQDEDHFITVDAVGCFEGDEEEEEDDEDEEEIEVEEELCKQVRSRDISREEWKGSETYSPNTAYGVDFLVPVMGYICRICHKFYHSNSGAQLSHCKSLGHFENLQKYKAAKNPSPTTRPVSRRCAINARNALTALFTSSGRPPSQPNTQDKTPSKVTARPSQPPLPRRSTRLKT

SEQ ID NO: 19715 - protein, 869 aa, Homo sapiens
MFSQQQQQQLQQQQQQLQQLQQQQLQQQQLQQQQLLQLQQLLQQSPPQAPLPMAVSRGLPPQQPQQPLLNLQGTNSASLLNGSMLQRALLLQQLQGNLRGYGMASPGLAAPSLTPPQLATPNLQQFFPQATRQSLLGPPPVGVPMNPSQFNLSGRNPQKQARTSSSTTPNRKTMPVEDKSDPPEGSEEAAEPRMDTPEDQDLPPCPEDIAKEKRTPAPEPEPCEASELPAKRLRSSEEPTEKEPPGQLQVKAQPQARMTVPKQTQTPDLLPEALEAQVLPRFQPRVLQVQAQVQSQTQPRIPSTDTQVQPKLQKQAQTQTSPEHLVLQQKQVQPQLQQEAEPQKQVQPQVQPQAHSQGPRQVQLQQEAEPLKQVQPQVQPQAHSQPPRQVQLQLQKQVQTQTYPQVHTQAQPSVQPQEHPPAQVSVQPPEQTHEQPHTQPQVSLLAPEQTPVVVHVCGLEMPPDAVEAGGGMEKTLPEPVGTQVSMEEIQNESACGLDVGECENRAREMPGVWGAGGSLKVTILQSSDSRAFSTVPLTPVPRPSDSVSSTPAATSTPSKQALQFFCYICKASCSSQQEFQDHMSEPQHQQRLGEIQHMSQACLLSLLPVPRDVLETEDEEPPPRRWCNTCQLYYMGDLIQHRRTQDHKIAKQSLRPFCTVCNRYFKTPRKFVEHVKSQGHKDKAKELKSLEKEIAGQDEDHFITVDAVGCFEGDEEEEEDDEDEEEIEVEEELCKQVRSRDISREEWKGSETYSPNTAYGVDFLVPVMGYICRICHKFYHSNSGAQLSHCKSLGHFENLQKYKAAKNPSPTTRPVSRRCAINARNALTALFTSSGRPPSQPNTQDKTPSKVTARPSQPPLPRRSTRLKT

SEQ ID NO: 19716 - protein, 818 aa, Homo sapiens
MFSQQQQQQLQQQQQQLQQLQQQQLQQQQLQQQQLLQLQQLLQQSPPQAPLPMAVSRGLPPQQPQQPLLNLQGTNSASLLNGSMLQRALLLQQLQGNLRGYGMASPGLAAPSLTPPQLATPNLQQFFPQATRQSLLGPPPVGVPMNPSQFNLSGRNPQKQARTSSSTTPNRKDSSSQTMPVEDKSDPPEGSEEAAEPRMDTPEDQDLPPCPEDIAKEKRTPAPEPEPCEASELPAKRLRSSEEPTEKEPPGQLQVKAQPQARMTVPKQTQTPDLLPEALEAQVLPRFQPRVLQVQAQVQSQTQPRIPSTDTQVQPKLQKQAQTQTSPEHLVLQQKQVQPQLQQEAEPQKQVQPQVHTQAQPSVQPQEHPPAQVSVQPPEQTHEQPHTQPQVSLLAPEQTPVVVHVCGLEMPPDAVEAGGGMEKTLPEPVGTQVSMEEIQNESACGLDVGECENRAREMPGVWGAGGSLKVTILQSSDSRAFSTVPLTPVPRPSDSVSSTPAATSTPSKQALQFFCYICKASCSSQQEFQDHMSEPQHQQRLGEIQHMSQACLLSLLPVPRDVLETEDEEPPPRRWCNTCQLYYMGDLIQHRRTQDHKIAKQSLRPFCTVCNRYFKTPRKFVEHVKSQGHKDKAKELKSLEKEIAGQDEDHFITVDAVGCFEGDEEEEEDDEDEEEIEVEEELCKQVRSRDISREEWKGSETYSPNTAYGVDFLVPVMGYICRICHKFYHSNSGAQLSHCKSLGHFENLQKYKAAKNPSPTTRPVSRRCAINARNALTALFTSSGRPPSQPNTQDKTPSKVTARPSQPPLPRRSTRLKT

SEQ ID NO: 19717 - protein, 842 aa, Homo sapiens
MFSQQQQQQLQQQQQQLQQLQQQQLQQQQLQQQQLLQLQQLLQQSPPQAPLPMAVSRGLPPQQPQQPLLNLQGTNSASLLNGSMLQRALLLQQLQGLDQFAMPPATYDTAGLTMPTATLGNLRGYGMASPGLAAPSLTPPQLATPNLQQFFPQATRQSLLGPPPVGVPMNPSQFNLSGRNPQKQARTSSSTTPNRKDSSSQTMPVEDKSDPPEGSEEAAEPRMDTPEDQDLPPCPEDIAKEKRTPAPEPEPCEASELPAKRLRSSEEPTEKEPPGQLQVKAQPQARMTVPKQTQTPDLLPEALEAQVLPRFQPRVLQVQAQVQSQTQPRIPSTDTQVQPKLQKQAQTQTSPEHLVLQQKQVQPQLQQEAEPQKQVQPQVHTQAQPSVQPQEHPPAQVSVQPPEQTHEQPHTQPQVSLLAPEQTPVVVHVCGLEMPPDAVEAGGGMEKTLPEPVGTQVSMEEIQNESACGLDVGECENRAREMPGVWGAGGSLKVTILQSSDSRAFSTVPLTPVPRPSDSVSSTPAATSTPSKQALQFFCYICKASCSSQQEFQDHMSEPQHQQRLGEIQHMSQACLLSLLPVPRDVLETEDEEPPPRRWCNTCQLYYMGDLIQHRRTQDHKIAKQSLRPFCTVCNRYFKTPRKFVEHVKSQGHKDKAKELKSLEKEIAGQDEDHFITVDAVGCFEGDEEEEEDDEDEEEIEVEEELCKQVRSRDISREEWKGSETYSPNTAYGVDFLVPVMGYICRICHKFYHSNSGAQLSHCKSLGHFENLQKYKAAKNPSPTTRPVSRRCAINARNALTALFTSSGRPPSQPNTQDKTPSKVTARPSQPPLPRRSTRLKT

SEQ ID NO: 19718 - protein, 797 aa, Homo sapiens
MPPATYDTAGLTMPTATLGNLRGYGMASPGLAAPSLTPPQLATPNLQQFFPQATRQSLLGPPPVGVPMNPSQFNLSGRNPQKQARTSSSTTPNRKDSSSQTMPVEDKSDPPEGSEEAAEPRMDTPEDQDLPPCPEDIAKEKRTPAPEPEPCEASELPAKRLRSSEEPTEKEPPGQLQVKAQPQARMTVPKQTQTPDLLPEALEAQVLPRFQPRVLQVQAQVQSQTQPRIPSTDTQVQPKLQKQAQTQTSPEHLVLQQKQVQPQLQQEAEPQKQVQPQVQPQAHSQGPRQVQLQQEAEPLKQVQPQVQPQAHSQPPRQVQLQLQKQVQTQTYPQVHTQAQPSVQPQEHPPAQVSVQPPEQTHEQPHTQPQVSLLAPEQTPVVVHVCGLEMPPDAVEAGGGMEKTLPEPVGTQVSMEEIQNESACGLDVGECENRAREMPGVWGAGGSLKVTILQSSDSRAFSTVPLTPVPRPSDSVSSTPAATSTPSKQALQFFCYICKASCSSQQEFQDHMSEPQHQQRLGEIQHMSQACLLSLLPVPRDVLETEDEEPPPRRWCNTCQLYYMGDLIQHRRTQDHKIAKQSLRPFCTVCNRYFKTPRKFVEHVKSQGHKDKAKELKSLEKEIAGQDEDHFITVDAVGCFEGDEEEEEDDEDEEEIEVEEELCKQVRSRDISREEWKGSETYSPNTAYGVDFLVPVMGYICRICHKFYHSNSGAQLSHCKSLGHFENLQKYKAAKNPSPTTRPVSRRCAINARNALTALFTSSGRPPSQPNTQDKTPSKVTARPSQPPLPRRSTRLKT

SEQ ID NO: 19719 - protein, 782 aa, Homo sapiens
MTSIIKLTTLSGVQEESALCYLLQVDEFRFLLDCGWDEHFSMDIIDSLRKHVHQIDAVLLSHPDPLHLGALPYAVGKLGLNCAIYATIPVYKMGQMFMYDLYQSRHNTEDFTLFTLDDVDAAFDKIQQLKFSQIVNLKGKGHGLSITPLPAGHMIGGTIWKIVKDGEEEIVYAVDFNHKREIHLNGCSLEMLSRPSLLITDSFNATYVQPRRKQRDEQLLTNVLETLRGDGNVLIAVDTAGRVLELAQLLDQIWRTKDAGLGVYSLALLNNVSYNVVEFSKSQVEWMSDKLMRCFEDKRNNPFQFRHLSLCHGLSDLARVPSPKVVLASQPDLECGFSRDLFIQWCQDPKNSIILTYRTTPGTLARFLIDNPSEKITEIELRKRVKLEGKELEEYLEKEKLKKEAAKKLEQSKEADIDSSDESDIEEDIDQPSAHKTKHDLMMKGEGSRKGSFFKQAKKSYPMFPAPEERIKWDEYGEIIKPEDFLVPELQATEEEKSKLESGLTNGDEPMDQDLSDVPTKCISTTESIEIKARVTYIDYEGRSDGDSIKKIINQMKPRQLIIVHGPPEASQDLAECCRAFGGKDIKVYMPKLHETVDATSETHIYQVRLKDSLVSSLQFCKAKDAELAWIDGVLDMRVSKVDTGVILEEGELKDDGEDSEMQVEAPSDSSVIAQQKAMKSLFGDDEKETGEESEIIPTLEPLPPHEVPGHQSVFMNEPRLSDFKQVLLREGIQAEFVGGVLVCNNQVAVRRTETGRIGLEGCLCQDFYRIRDLLYEQYAIV

SEQ ID NO: 19720 - protein, 371 aa, Homo sapiens
MGRLVLLWGAAVFLLGGWMALGQGGAAEGVQIQIIYFNLETVQVTWNASKYSRTNLTFHYRFNGDEAYDQCTNYLLQEGHTSGCLLDAEQRDDILYFSIRNGTHPVFTASRWMVYYLKPSSPKHVRFSWHQDAVTVTCSDLSYGDLLYEVQYRSPFDTEWQSKQENTCNVTIEGLDAEKCYSFWVRVKAMEDVYGPDTYPSDWSEVTCWQRGEIRDACAETPTPPKPKLSKFILISSLAILLMVSLLLLSLWKLWRVKKFLIPSVPDPKSIFPGLFEIHQGNFQEWITDTQNVAHLHKMAGAEQESGPEEPLVVQLAKTEAESPRMLDPQTEEKEASGGSLQLPHQPLQGGDVVTIGGFTFVMNDRSYVAL

SEQ ID NO: 19721 - protein, 233 aa, Homo sapiens
MGRLVLLWGAAVFLLGGWMALGQGGAAEGVQIQIIYFNLETVQVTWNASKYSRTNLTFHYRFNGDEAYDQCTNYLLQEGHTSGCLLDAEQRDDILYFSIRNGTHPVFTASRWMVYYLKPSSPKHVRFSWHQDAVTVTCSDLSYGDLLYEVQYRSPFDTEWQTQSRSVTQAGVQWCDLCLLQPSPPRFKRFSCLSLPSSWDYRHPPPRLANFCIISRDGVSPCWPGWSRTCDLR

SEQ ID NO: 19722 - protein, 259 aa, Homo sapiens
MVYYLKPSSPKHVRFSWHQDAVTVTCSDLSYGDLLYEVQYRSPFDTEWQSKQENTCNVTIEGLDAEKCYSFWVRVKAMEDVYGPDTYPSDWSEVTCWQRGEIRDACAETPTPPKPKLSKFILISSLAILLMVSLLLLSLWKLWRVKKFLIPSVPDPKSIFPGLFEIHQGNFQEWITDTQNVAHLHKMAGAEQESGPEEPLVVQLAKTEAESPRMLDPQTEEKEASGGSLQLPHQPLQGGDVVTIGGFTFVMNDRSYVAL

SEQ ID NO: 19723 - protein, 166 aa, Homo sapiens
MASGVTVNDEVIKVFNDMKVRKSSTQEEIKKRKKAVLFCLSDDKRQIIVEEAKQILVGDIGDTVEDPYTSFVKLLPLNDCRYALYDATYETKESKKEDLVFIFWAPESAPLKSKMIYASSKDAIKKKFTGIKHEWQVNGLDDIKDRSTLGEKLGGNVVVSLEGKPL

SEQ ID NO: 19724 - protein, 149 aa, Homo sapiens
MKVRKSSTQEEIKKRKKAVLFCLSDDKRQIIVEEAKQILVGDIGDTVEDPYTSFVKLLPLNDCRYALYDATYETKESKKEDLVFIFWAPESAPLKSKMIYASSKDAIKKKFTGIKHEWQVNGLDDIKDRSTLGEKLGGNVVVSLEGKPL

SEQ ID NO: 19725 - protein, 593 aa, Homo sapiens
MAATVATAAAVAPAPAPGTDSASSVHWFRKGLRLHDNPALLAAVRGARCVRCVYILDPWFAASSSVGINRWRFLLQSLEDLDTSLRKLNSRLFVVRGQPADVFPRLFKEWGVTRLTFEYDSEPFGKERDAAIMKMAKEAGVEVVTENSHTLYDLDRIIELNGQKPPLTYKRFQAIISRMELPKKPVGLVTSQQMESCRAEIQENHDETYGVPSLEELGFPTEGLGPAVWQGGETEALARLDKHLERKAWVANYERPRMNANSLLASPTGLSPYLRFGCLSCRLFYYRLWDLYKKVKRNSTPPLSLFGQLLWREFFYTAATNNPRFDRMEGNPICIQIPWDRNPEALAKWAEGKTGFPWIDAIMTQLRQEGWIHHLARHAVACFLTRGDLWVSWESGVRVFDELLLDADFSVNAGSWMWLSCSAFFQQFFHCYCPVGFGRRTDPSGDYIRRYLPKLKAFPSRYIYEPWNAPESIQKAAKCIIGVDYPRPIVNHAETSRLNIERMKQIYQQLSRYRGLCLLASVPSCVEDLSHPVAEPSSSQAGSMSSAGPRPLPSGPASPKRKLEAAEEPPGEELSKRARVAELPTPELPSKDA

SEQ ID NO: 19726 - protein, 532 aa, Homo sapiens
MPAPPGRTHTWFLLQSLEDLDTSLRKLNSRLFVVRGQPADVFPRLFKEWGVTRLTFEYDSEPFGKERDAAIMKMAKEAGVEVVTENSHTLYDLDRIIELNGQKPPLTYKRFQAIISRMELPKKPVGLVTSQQMESCRAEIQENHDETYGVPSLEELGFPTEGLGPAVWQGGETEALARLDKHLERKAWVANYERPRMNANSLLASPTGLSPYLRFGCLSCRLFYYRLWDLYKKVKRNSTPPLSLFGQLLWREFFYTAATNNPRFDRMEGNPICIQIPWDRNPEALAKWAEGKTGFPWIDAIMTQLRQEGWIHHLARHAVACFLTRGDLWVSWESGVRVFDELLLDADFSVNAGSWMWLSCSAFFQQFFHCYCPVGFGRRTDPSGDYIRRYLPKLKAFPSRYIYEPWNAPESIQKAAKCIIGVDYPRPIVNHAETSRLNIERMKQIYQQLSRYRGLCLLASVPSCVEDLSHPVAEPSSSQAGSMSSAGPRPLPSGPASPKRKLEAAEEPPGEELSKRARVAELPTPELPSKDA

SEQ ID NO: 19727 - protein, 657 aa, Homo sapiens
MAEGSGEVVAVSATGAANGLNNGAGGTSATTCNPLSRKLHKILETRLDNDKEMLEALKALSTFFVENSLRTRRNLRGDIERKSLAINEEFVSIFKEVKEELESISEDVQAMSNCCQDMTSRLQAAKEQTQDLIVKTTKLQSESQKLEIRAQVADAFLSKFQLTSDEMSLLRGTREGPITEDFFKALGRVKQIHNDVKVLLRTNQQTAGLEIMEQMALLQETAYERLYRWAQSECRTLTQESCDVSPVLTQAMEALQDRPVLYKYTLDEFGTARRSTVVRGFIDALTRGGPGGTPRPIEMHSHDPLRYVGDMLAWLHQATASEKEHLEALLKHVTTQGVEENIQEVVGHITEGVCRPLKVRIEQVIVAEPGAVLLYKISNLLKFYHHTISGIVGNSATALLTTIEEMHLLSKKIFFNSLSLHASKLMDKVELPPPDLGPSSALNQTLMLLREVLASHDSSVVPLDARQADFVQVLSCVLDPLLQMCTVSASNLGTADMATFMVNSLYMMKTTLALFEFTDRRLEMLQFQIEAHLDTLINEQASYVLTRVGLSYIYNTVQQHKPEQGSLANMPNLDSVTLKAAMVQFDRYLSAPDNLLIPQLNFLLSATVKEQIVKQSTELVCRAYGEVYAAVMNPINEYKDPENILHRSPQQVQTLLS

SEQ ID NO: 19728 - protein, 615 aa, Homo sapiens
MAEGSGEVVAVSATGAANGLNNGAGGTSATTCNPLSRKLHKILETRLDNDKEMLEALKALSTFFVENSLRTRRNLRGDIERKSLAINEEFVSIFKEVKEELESISEDVQAMSNCCQDMTSRLQAAKEQTQDLIVKTTKLQSESQKLEIRAQVADAFLSKFQLTSDEMSLLRGTREGPITEDFFKALGRVKQIHNDVKVLLRTNQQTAGLEIMEQMALLQETAYERLYRWAQSECRTLTQESCDVSPVLTQAMEALQDRPVLYKYTLDEFGTARRSTVVRGFIDALTRGGPGGTPRPIEMHSHDPLRYVGDMLAWLHQATASEKEHLEALLKHVTTQGVEENIQEVVGHITEGVCRPLKVRIEQVIVAEPGAVLLYKISNLLKFYHHTISGIVGNSATALLTTIEEMHLLSKKIFFNSLSLHASKLMDKVELPPPDLGPSSALNQTLMLLREVLASHDSSVVPLDARQADFVQVLSCVLDPLLQMCTVSASNLGTADMATFMVNSLYMMKTTLALFEFTDRRLEMLQFQIEAHLDTLINEQASYVLTRVGLSYIYNTVQQHKPEQGSLANMPNLDSVTLKAAMVQFDRYLSAPDNLLIPQLNFLLSATVKRPPNGP

SEQ ID NO: 19729 - protein, 75 aa, Homo sapiens
MAEGSGEVVAVSATGAANGLNNGAGGTSATTCNPLSRKLHKILETRLDNDKELGILLLSFSWLLFEDSVRDSRRC

SEQ ID NO: 19730 - protein, 586 aa, Homo sapiens
MGVNAVHWFRKGLRLHDNPALKECIQGADTIRCVYILDPWFAGSSNVGINRWRFLLQCLEDLDANLRKLNSRLFVIRGQPADVFPRLFKEWNITKLSIEYDSEPFGKERDAAIKKLATEAGVEVIVRISHTLYDLDKIIELNGGQPPLTYKRFQTLISKMEPLEIPVETITSEVIEKCTTPLSDDHDEKYGVPSLEELGFDTDGLSSAVWPGGETEALTRLERHLERKAWVANFERPRMNANSLLASPTGLSPYLRFGCLSCRLFYFKLTDLYKKVKKNSSPPLSLYGQLLWREFFYTAATNNPRFDKMEGNPICVQIPWDKNPEALAKWAEGRTGFPWIDAIMTQLRQEGWIHHLARHAVACFLTRGDLWISWEEGMKVFEELLLDADWSINAGSWMWLSCSSFFQQFFHCYCPVGFGRRTDPNGDYIRRYLPVLRGFPAKYIYDPWNAPEGIQKVAKCLIGVNYPKPMVNHAEASRLNIERMKQIYQQLSRYRGLGLLASVPSNPNGNGGFMGYSAENIPGCSSSGSCSQGSGILHYAHGDSQQTHLLKQGRSSMGTGLSGGKRPSQEEDTQSIGPKVQRQSTN

SEQ ID NO: 19731 - protein, 1269 aa, Homo sapiens
MTVKLGDGGSGEDGLKKLGKRAADEESLEGEGAGGADAAEESSGTKRDEKTPRAGADGPPAPPGAPQAPSPPQGSPQDQHHFLRSSVRPQSKRPRKDPPSAVGSGNAGGSGPRGKGAEGGGSSSGNVSGVAPAAPAGGSRSSSRNLGSSGGEKEEGKKVRRQWESWSTEDKNTFFEGLYEHGKDFEAIQNNIALKYKKKGKPASMVKNKEQVRHFYYRTWHKITKYIDFDHVFSRGLKKSSQELYGLICYGELRKKIGGCMDDKNATKLNELIQVGATTVRYKGRNLRIKAPMCRALKKLCDPDGLSDEEDQKPVRLPLKVPIELQPRNNHAWARVQSLAQNPRLRMIVELHRKVSSLIEFLKQKWALHEVRVRKTLEERQLQDSCSAPMQEKVTLHLFPGENCTLTPLPGVARVVHSKAFCTVHWQEGGRCKQSAKDAHVLPPAQILGIQSGQGTARGQVKCPRSGAEGKGVGRPPPAADALQSSGESSPESAPGEGAALSLSSPDAPDRPPPRHQDTGPCLEKTPAEGRDSPTREPGALPCACGQLPDLEDELSLLDPLPRYLKSCQDLIVPEQCRCADTRPGSEQPPLGGAASPEVLAPVSKEAADLAPTGPSPRPGPGLLLDVCTKDLADAPAEELQEKGSPAGPPPSQGQPAARPPKEVPASRLAQQLREEGWNLQTSESLTLAEVYLMMGKPSKLQLEYDWLGPGRQDPRPGSLPTALHKQRLLSCLLKLISTEVNPKLALEANTISTASVRPAQEEQSMTPPGKVVTVSSRSPRCPRNQASLRSSKTFPPSSAPCSSGLRNPPRPLLVPGPSSTGSNDSDGGLFAVPTTLPPNSRHGKLFSPSKEAELTFRQHLNSISMQSDFFLPKPRKLRNRHLRKPLVVQRTLLPRPSENQSHNVCSFSILSNSSVTGRGSFRPIQSSLTKAALSRPIVPKVLPPQATSHLASAIDLAATSAGILSGNPLPALDTEGLSGISPLSSDEVTGAISGQDSTGTHQDGDTLPTVGGSDPFVSIPSRPEQEPVADSFQGSSVLSLSELPKAPLQNGLSIPLSSSESSSTRLSPPDVSALLDISLPGPPEDALSQGEPATHISDSIIEIAISSGQYGEGVPLSPAKLNGSDSSKSLPSPSSSPQPHWIASPTHDPQWYPSDSTDSSLSSLFASFISPEKSRKMLPTPIGTNSGTSLLGPSLLDGNSRDSFVSRSLADVAEVVDSQLVCMMNENSIDYISRFNDLAQELSIAEPGRREALFDGGGGGPAVSDLSQ

SEQ ID NO: 19732 - protein, 261 aa, Homo sapiens
MVVLSVPAEVTVILLDIEGTTTPIAFVKDILFPYIEENVKEYLQTHWEEEECQQDVSLLRKQAEEDAHLDGAVPIPAASGNGVDDLQQMIQAVVDNVCWQMSLDRKTTALKQLQGHMWRAAFTAGRMKAEFFADVVPAVRKWREAGMKVYIYSSGSVEAQKLLFGHSTEGDILELVDGHFDTKIGHKVESESYRKIADSIGCSTNNILFLTDVTREASAAEEADVHVAVVVRPGNAGLTDDEKTYYSLITSFSELYLPSST

SEQ ID NO: 19733 - protein, 115 aa, Homo sapiens
MKVYIYSSGSVEAQKLLFGHSTEGDILELVDGHFDTKIGHKVESESYRKIADSIGCSTNNILFLTDVTREASAAEEADVHVAVVVRPGNAGLTDDEKTYYSLITSFSELYLPSST

SEQ ID NO: 19734 - protein, 1332 aa, Homo sapiens
MRNLKLFRTLEFRDIQGPGNPQCFSLRTEQGTVLIGSEHGLIEVDPVSREVKNEVSLVAEGFLPEDGSGRIVGVQDLLDQESVCVATASGDVILCSLSTQQLECVGSVASGISVMSWSPDQELVLLATGQQTLIMMTKDFEPILEQQIHQDDFGESKFITVGWGRKETQFHGSEGRQAAFQMQMHESALPWDDHRPQVTWRGDGQFFAVSVVCPETGARKVRVWNREFALQSTSEPVAGLGPALAWKPSGSLIASTQDKPNQQDIVFFEKNGLLHGHFTLPFLKDEVKVNDLLWNADSSVLAVWLEDLQREESSIPKTCVQLWTVGNYHWYLKQSLSFSTCGKSKIVSLMWDPVTPYRLHVLCQGWHYLAYDWHWTTDRSVGDNSSDLSNVAVIDGNRVLVTVFRQTVVPPPMCTYQLLFPHPVNQVTFLAHPQKSNDLAVLDASNQISVYKCGDCPSADPTVKLGAVGGSGFKVCLRTPHLEKRYKIQFENNEDQDVNPLKLGLLTWIEEDVFLAVSHSEFSPRSVIHHLTAASSEMDEEHGQLNVSSSAAVDGVIISLCCNSKTKSVVLQLADGQIFKYLWESPSLAIKPWKNSGGFPVRFPYPCTQTELAMIGEEECVLGLTDRCRFFINDIEVASNITSFAVYDEFLLLTTHSHTCQCFCLRDASFKTLQAGLSSNHVSHGEVLRKVERGSRIVTVVPQDTKLVLQMPRGNLEVVHHRALVLAQIRKWLDKLMFKEAFECMRKLRINLNLIYDHNPKVFLGNVETFIKQIDSVNHINLFFTELKEEDVTKTMYPAPVTSSVYLSRDPDGNKIDLVCDAMRAVMESINPHKYCLSILTSHVKKTTPELEIVLQKVHELQGNAPSDPDAVSAEEALKYLLHLVDVNELYDHSLGTYDFDLVLMVAEKSQKDPKEYLPFLNTLKKMETNYQRFTIDKYLKRYEKAIGHLSKCGPEYFPECLNLIKDKNLYNEALKLYSPSSQQYQDISIAYGEHLMQEHMYEPAGLMFARCGAHEKALSAFLTCGNWKQALCVAAQLNFTKDQLVGLGRTLAGKLVEQRKHIDAAMVLEECAQDYEEAVLLLLEGAAWEEALRLVYKYNRLDIIETNVKPSILEAQKNYMAFLDSQTATFSRHKKRLLVVRELKEQAQQAGLDDEVPHGQESDLFSETSSVVSGSEMSGKYSHSNSRISARSSKNRRKAERKKHSLKEGSPLEDLALLEALSEVVQNTENLKDEVYHILKVLFLFEFDEQGRELQKAFEDTLQLMERSLPEIWTLTYQQNSATPVLGPNSTANSIMASYQQQKTSVPVLDAELFIPPKINRRTQWKLSLLD

SEQ ID NO: 19735 - protein, 340 aa, Homo sapiens
MADSVKTFLQDLARGIKDSIWGICTISKLDARIQQKREEQRRRRASSVLAQRRAQSIERKQESEPRIVSRIFQCCAWNGGVFWFSLLLFYRVFIPVLQSVTARIIGDPSLHGDVWSWLEFFLTSIFSALWVLPLFVLSKVVNAIWFQDIADLAFEVSGRKPHPFPSVSKIIADMLFNLLLQALFLIQGMFVSLFPIHLVGQLVSLLHMSLLYSLYCFEYRWFNKGIEMHQRLSNIERNWPYYFGFGLPLAFLTAMQSSYIISGCLFSILFPLFIISANEAKTPGKAYLFQLRLFSLVVFLSNRLFHKTVYLQSALSSSTSAEKFPSPHPSPAKLKATAGH

SEQ ID NO: 19736 - protein, 326 aa, Homo sapiens
MADSVKTFLQDLARLDARIQQKREEQRRRRASSVLAQRRAQSIERKQESEPRIVSRIFQCCAWNGGVFWFSLLLFYRVFIPVLQSVTARIIGDPSLHGDVWSWLEFFLTSIFSALWVLPLFVLSKVVNAIWFQDIADLAFEVSGRKPHPFPSVSKIIADMLFNLLLQALFLIQGMFVSLFPIHLVGQLVSLLHMSLLYSLYCFEYRWFNKGIEMHQRLSNIERNWPYYFGFGLPLAFLTAMQSSYIISGCLFSILFPLFIISANEAKTPGKAYLFQLRLFSLVVFLSNRLFHKTVYLQSALSSSTSAEKFPSPHPSPAKLKATAGH

SEQ ID NO: 19737 - protein, 531 aa, Homo sapiens
MAALGCARLRWALRGAGRGLCPHGARAKAAIPAALPSDKATGAPGAGPGVRRRQRSLEEIPRLGQLRFFFQLFVQGYALQLHQLQVLYKAKYGPMWMSYLGPQMHVNLASAPLLEQVMRQEGKYPVRNDMELWKEHRDQHDLTYGPFTTEGHHWYQLRQALNQRLLKPAEAALYTDAFNEVIDDFMTRLDQLRAESASGNQVSDMAQLFYYFALEAICYILFEKRIGCLQRSIPEDTVTFVRSIGLMFQNSLYATFLPKWTRPVLPFWKRYLDGWNAIFSFGKKLIDEKLEDMEAQLQAAGPDGIQVSGYLHFLLASGQLSPREAMGSLPELLMAGVDTTSNTLTWALYHLSKDPEIQEALHEEVVGVVPAGQVPQHKDFAHMPLLKAVLKETLRLYPVVPTNSRIIEKEIEVDGFLFPKNTQFVFCHYVVSRDPTAFSEPESFQPHRWLRNSQPATPRIQHPFGSVPFGYGVRACLGRRIAELEMQLLLARLIQKYKVVLAPETGELKSVARIVLVPNKKVGLQFLQRQC

SEQ ID NO: 19738 - protein, 494 aa, Homo sapiens [sequence omitted]

SEQ ID NO: 19739 - protein, 465 aa, Homo sapiens
MLLLGLLLLLPLLAGARLLWNWWKLRSLHLPPLAPGFLHLLQPDLPIYLLGLTQKFGPIYRLHLGLQDKLVSRNYPDLSLGDYSLLWKAHKKLTRSALLLGIRDSMEPVVEQLTQEFCERMRAQPGTPVAIEEEFSLLTCSIICYLTFGDKIKDDNLMPAYYKCIQEVLKTWSHWSIQIVDVIPFLRFFPNPGLRRLKQAIEKRDHIVEMQLRQHKESLVAGQWRDMMDYMLQGVAQPSMEEGSGQLLEGHVHMAAVDLLIGGTETTANTLSWAVVFLLHHPEIQQRLQEELDHELGPGASSSRVPYKDRARLPLLNATIAEVLRLRPVVPLALPHRTTRPSSISGYDIPEGTVIIPNLQGAHLDETVWERPHEFWPDRFLEPGKNSRALAFGCGARVCLGEPLARLELFVVLTRLLQAFTLLPSGDALPSLQPLPHCSVILKMQPFQVRLQPRGMGAHSPGQNQ

SEQ ID NO: 19740 - protein, 422 aa, Homo sapiens
MVMAALSLVAACWGRAAADESVQLPAAPGSSVRARETMVSVTMATSEWIQFFKEAGIPPGPAVNYAVMFVDNRIQKSMLLDLNKEIMNELGVTVVGDIIAILKHAKVVHRQDMCKAATESVPCSPSPLAGEIRRGTSAASRMITNSLNHDSPPSTPPRRPDTSTSKISVTVSNKMAAKSAKATAALARREEESLAVPAKRRRVTAEMEGKYVINMPKGTTPRTRKILEQQQAAKGLHRTSVFDRLGAETKADTTTGSKPTGVFSRLGATPETDEDLAWDSDNDSSSSVLQYAGVLKKLGRGPAKASPQPALTVKAKATSSATTAAAPTLRRLALSSRSGLERKPESLSKVSIIKRLGAAALVPEAQDSQVTSTKSKSSAEVKVTIKRTLVGPRGSSSSEGLGAQMDHAGTVSVFKRLGRRTF

SEQ ID NO: 19741 - protein, 355 aa, Homo sapiens
MFVDNRIQKSMLLDLNKEIMNELGVTVVGDIIAILKHAKVVHRQDMCKAATESVPCSPSPLAGEIRRGTSAASRMITNSLNHDSPPSTPPRRPDTSTSKISVTVSNKMAAKSAKATAALARREEESLAVPAKRRRVTAEMEGKYVINMPKGTTPRTRKILEQQQAAKGLHRTSVFDRLGAETKADTTTGSKPTGVFSRLGATPETDEDLAWDSDNDSSSSVLQYAGVLKKLGRGPAKASPQPALTVKAKATSSATTAAAPTLRRLALSSRSGLERKPESLSKVSIIKRLGAAALVPEAQDSQVTSTKSKSSAEVKVTIKRTLVGPRGSSSSEGLGAQMDHAGTVSVFKRLGRRTF

SEQ ID NO: 19742 - protein, 281 aa, Homo sapiens
MITNSLNHDSPPSTPPRRPDTSTSKISVTVSNKMAAKSAKATAALARREEESLAVPAKRRRVTAEMEGKYVINMPKGTTPRTRKILEQQQAAKGLHRTSVFDRLGAETKADTTTGSKPTGVFSRLGATPETDEDLAWDSDNDSSSSVLQYAGVLKKLGRGPAKASPQPALTVKAKATSSATTAAAPTLRRLALSSRSGLERKPESLSKVSIIKRLGAAALVPEAQDSQVTSTKSKSSAEVKVTIKRTLVGPRGSSSSEGLGAQMDHAGTVSVFKRLGRRTF

SEQ ID NO: 19743 - protein, 190 aa, Homo sapiens
MDHSHHMGMSYMDSNSTMQPSHHHPTTSASHSHGGGDSSMMMMPMTFYFGFKNVELLFSGLVINTAGEMAGAFVAVFLLAMFYEGLKIARESLLRKSQVSIRYNSMPVPGPNGTILMETHKTVGQQMLSFPHLLQTVLHIIQVVISYFLMLIFMTYNGYLCIAVAAGAGTGYFLFSWKKAVVVDITEHCH

SEQ ID NO: 19744 - protein, 202 aa, Homo sapiens
MAVPAALILRESPSMKKAVSLINAIDTGRFPRLLTRILQKLHLKAESSFSEEEEEKLQAAFSLEKQDLHLVLETISFILEQAVYHNVKPAALQQQLENIHLRQDKAEAFVNTWSSMGQETVEKFRQRILAPCKLETVGWQLNLQMAHSAQAKLKSPQAVLQLGVNNEDSKSLEKVLVEFSHKELFDFYNKLETIQAQLDSLT

SEQ ID NO: 19745 - protein, 57 aa, Homo sapiens
MKPAVDEMFPEGAGPYVDLDEAGGSTGLLMDLAANEKAVHADFFNDFEDLFDDDDIQ

SEQ ID NO: 19746 - protein, 252 aa, Homo sapiens
MWRAPEAALRPEVSLERRGPEMKPAVDEMFPEGAGPYVDLDEVARARRESPSAGGSTGLLMDLAANEKAVHADFFNDFEDLFDDDDIHSSGLPRTSQQSSMVPALQRGQSEHGVRGKAAERPVVSEERCELNGREVAALDRAFGSTGHGQGAEALMFTRCREHPLCGTNKATSEGKMGTGRLRNSLRKNQSKWLGSYLEVLRTTRSRREVSEDSTISVSTHWRGKCFKSDETPSVAGGEEGKKTTQPCIDVR

SEQ ID NO: 19747 - protein, 395 aa, Homo sapiens
MDLCQKNETDLENAENNEIQFTEETEPTYTCPDGKSEKNHVYCLLDVSDITLEQDEKAKEFIIGTGWEEAVQGWGRTSPAACIWPRKIPKKARVGEGACSDCLVCVNLSHWSLQTKPPTEGGPEKDQSSPSQTQAAPQGPSTASRAISDICFPTYFRAEKKSLQIKEFIWCNKDWAIPGTNRGKASGNPSGGAHRGLSIPGPLTSRALLVLPPLKASLSNALDVLGKKSKNSFLQSEEKVLDVEKDGCVAYAYGLKTADGKGEKRASELAKHPMVNDTPSSPSPAAQISLLTDPEQRCLHWSLLSEKNLACPPDPSNVRYLAALQLLQKRGVQSYKSKFKAKEPRSPVITRKHVLPKAKQENRPQMLETKVFPRPVLPSLTVSRVIIPVSTHRIL

SEQ ID NO: 19748 - protein, 388 aa, Homo sapiens
MDLCQKNETDLENAENNEIQFTEETEPTYTCPDGKSEKNHVYCLLDVSDITLEQDEKAKEFIIGTGWEEAVQGWGRTSPAACIWPRKIPKKARVGEGACSDCLVCVNLSHWSLQTKPPTEGGPEKDQSSPSQTQAAPQGPSTASRAISDICFPTYFRAEKKSLQIKEFIWCNKDWAIPGTNRGKASGNPSGGAHRGLSIPGPLTSRALLVLPPLKASLSNALDVLGKKSKNSFLQSEEKVLDVEKDGCVAYAYGLKTADGKGEKRASELAKHPMVNDTPSSPSPAAQISLLTDPEQRCLHWSLLSEKNLACPPDPSNVRYLAALQLLQKRGVQSYKSKFKAKEPRSPVITRKHVLPKAKQENRPQMLETKVFPRPVLPSLTHRKKKIK

SEQ ID NO: 19749 - protein, 396 aa, Homo sapiens
MSVAFASARPRGKGEVTQQTIQKMLDENHHLIQCILEYQSKGKTAECTQYQQILHRNLVYLATIADSNQNMQSLLPAPPTQNMNLGPGALTQSGSSQGLHSQGSLSDAISTGLPPSSLLQGQIGNGPSHVSMQQTAPNTLPTTSMSISGPGYSHAGPASQGVPMQGQGTIGNYVSRTNINMQSNPVSMMQQQAATSHYSSAQGGSQHYQGQSSIAMMGQGSQGSSMMGQRPMAPYRPSQQGSSQQYLGQEEYYGEQYSHSQGAAEPMGQQYYPDGHGDYAYQQSSYTEQSYDRSFEESTQHYYEGGNSQYSQQQAGYQQGAAQQQTYSQQQYPSQQSYPGQQQGYGSAQGAPSQYPGYQQGQGQQYGSYRAPQTAPSAQQQRPYGYEQGQYGNYQQ

SEQ ID NO: 19750 - protein, 374 aa, Homo sapiens
MMLDENHHLIQCILEYQSKGKTAECTQYQQILHRNLVYLATIADSNQNMQSLLPAPPTQNMNLGPGALTQSGSSQGLHSQGSLSDAISTGLPPSSLLQGQIGNGPSHVSMQQTAPNTLPTTSMSISGPGYSHAGPASQGVPMQGQGTIGNYVSRTNINMQSNPVSMMQQQAATSHYSSAQGGSQHYQGQSSIAMMGQGSQGSSMMGQRPMAPYRPSQQGSSQQYLGQEEYYGEQYSHSQGAAEPMGQQYYPDGHGDYAYQQSSYTEQSYDRSFEESTQHYYEGGNSQYSQQQAGYQQGAAQQQTYSQQQYPSQQSYPGQQQGYGSAQGAPSQYPGYQQGQGQQYGSYRAPQTAPSAQQQRPYGYEQGQYGNYQQ

SEQ ID NO: 19751 - protein, 314 aa, Homo sapiens
MNLGPGALTQSGSSQGLHSQGSLSDAISTGLPPSSLLQGQIGNGPSHVSMQQTAPNTLPTTSMSISGPGYSHAGPASQGVPMQGQGTIGNYVSRTNINMQSNPVSMMQQQAATSHYSSAQGGSQHYQGQSSIAMMGQGSQGSSMMGQRPMAPYRPSQQGSSQQYLGQEEYYGEQYSHSQGAAEPMGQQYYPDGHGDYAYQQSSYTEQSYDRSFEESTQHYYEGGNSQYSQQQAGYQQGAAQQQTYSQQQYPSQQSYPGQQQGYGSAQGAPSQYPGYQQGQGQQYGSYRAPQTAPSAQQQRPYGYEQGQYGNYQQ

SEQ ID NO: 19752 - protein, 265 aa, Homo sapiens
MQQTAPNTLPTTSMSISGPGYSHAGPASQGVPMQGQGTIGNYVSRTNINMQSNPVSMMQQQAATSHYSSAQGGSQHYQGQSSIAMMGQGSQGSSMMGQRPMAPYRPSQQGSSQQYLGQEEYYGEQYSHSQGAAEPMGQQYYPDGHGDYAYQQSSYTEQSYDRSFEESTQHYYEGGNSQYSQQQAGYQQGAAQQQTYSQQQYPSQQSYPGQQQGYGSAQGAPSQYPGYQQGQGQQYGSYRAPQTAPSAQQQRPYGYEQGQYGNYQQ

SEQ ID NO: 19753 - protein, 399 aa, Homo sapiens
MQSLSTEARYVPRVPQHRDQISPRSPQHGGQICPRSPLHRGQICPRSPPARRYQQILHRNLVYLATIADSNQNMQSLLPAPPTQNMNLGPGALTQSGSSQGLHSQGSLSDAISTGLPPSSLLQGQIGNGPSHVSMQQTAPNTLPTTSMSISGPGYSHAGPASQGVPMQGQGTIGNYVSRTNINMQSNPVSMMQQQAATSHYSSAQGGSQHYQGQSSIAMMGQGSQGSSMMGQRPMAPYRPSQQGSSQQYLGQEEYYGEQYSHSQGAAEPMGQQYYPDGHGDYAYQQSSYTEQSYDRSFEESTQHYYEGGNSQYSQQQAGYQQGAAQQQTYSQQQYPSQQSYPGQQQGYGSAQGAPSQYPGYQQGQGQQYGSYRAPQTAPSAQQQRPYGYEQGQYGNYQQ

SEQ ID NO: 19754 - protein, 497 aa, Homo sapiens
MSCVLGGVIPLGLLFLVCGSQGYLLPNVTLLEELLSKYQHNESHSRVRRAIPREDKEEILMLHNKLRGQVQPQASNMEYMTWDDELEKSAAAWASQCIWEHGPTSLLVSIGQNLGAHWGRYRSPGFHVQSWYDEVKDYTYPYPSECNPWCPERCSGPMCTHYTQIVWATTNKIGCAVNTCRKMTVWGEVWENAVYFVCNYSPKGNWIGEAPYKNGRPCSECPPSYGGSCRNNLCYREETYTPKPETDEMNEVETAPIPEENHVWLQPRVMRPTKPKKTSAVNYMTQVVRCDTKMKDRCKGSTCNRYQCPAGCLNHKAKIFGTLFYESSSSICRAAIHYGILDDKGGLVDITRNGKVPFFVKSERHGVQSLSKYKPSSSFMVSKVKVQDLDCYTTVAQLCPFEKPATHCPRIHCPAHCKDEPSYWAPVFGTNIYADTSSICKTAVHAGVISNESGGDVDVMPVDKKKTYVGSLRNGVQSESLGTPRDGKAFRIFAVRQ

SEQ ID NO: 19755 - protein, 449 aa, Homo sapiens
MSCVLGGVIPLGLLFLVCGSQGYLLPNVTLLEELLSKYQHNESHSRVRRAIPREDKEEILMLHNKLRGQVQPQASNMEYMTWDDELEKSAAAWASQCIWEHGPTSLLVSIGQNLGAHWGRYRSPGFHVQSWYDEVKDYTYPYPSECNPWCPERCSGPMCTHYTQIVWATTNKIGCAVNTCRKMTVWGEVWENAVYFVCNYSPKGNWIGEAPYKNGRPCSECPPSYGGSCRNNLCYREETYTPKPETDEMNEVETAPIPEENHVWLQPRVMRPTKPKKTSAVNYMTQVVRCDTKMKDRCKGSTCNRYQCPAGCLNHKAKIFGTLFYESSSSICRAAIHYGILDDKGGLVDITRNGKVPFFVKSERHGVQSLSKYKPSSSFMVSKVKVQDLDCYTTVAQLCPFEKPATHCPRIHCPAHCKDEPSYWAPVFGTNIYADVSRMHFQQLSRKAC

SEQ ID NO: 19756 - protein, 371 aa, Homo sapiens
MSCVLGGVIPLGLLFLVCGSQGYLLPNVTLLEELLSKYQHNESHSRVRRAIPREDKEEILMLHNKLRGQVQPQASNMEYMTWDDELEKSAAAWASQCIWEHGPTSLLVSIGQNLGAHWGRYRSPGFHVQSWYDEVKDYTYPYPSECNPWCPERCSGPMCTHYTQIVWATTNKIGCAVNTCRKMTVWGEVWENAVYFVCNYSPKGNWIGEAPYKNGRPCSECPPSYGGSCRNNLCYREETYTPKPETDEMNEVETAPIPEENHVWLQPRVMRPTKPKKTSAVNYMTQVVRCDTKMKDRCKGSTCNRYQCPAGCLNHKAKIFGTLFYESSSSICRAAIHYGILDDKGGLVDITRNGKVPFFVKSERHGVQSLR

SEQ ID NO: 19757 - protein, 159 aa, Homo sapiens
MSCVLGGVIPLGLLFLVCGSQGYLLPNVTLLEELLSKYQHNESHSRVRRAIPREDKEEILMLHNKLRGQVQPQASNMEYMVSAGSGRRGWHRGWGLGHQPALFPSQLCSPASACDGWLRVSSGRGGSRLCSVLFVCFETGSHSATDAGVQWHNRHALKP

SEQ ID NO: 19758 - protein, 120 aa, Homo sapiens
MSCVLGGVIPLGLLFLVCGSQGYLLPNVTLLEELLSKYQHNESHSRVRRAIPREDKEEILMLHNKLRGQVQPQASNMEYMTWDDELEKSAAAWASQCIWEHGPTSLLVSIGQNLGAHWGR

SEQ ID NO: 19759 - protein, 727 aa, Homo sapiens
MEGDAVEAIVEESETFIKGKERKTYQRRREGGQEEDACHLPQNQTDGGEVVQDVNSSVQMVMMEQLDPTLLQMKTEVMEGTVAPEAEAAVDDTQIITLQVVNMEEQPINIGELQLVQVPVPVTVPVATTSVEELQGAYENEVSKEGLAESEPMICHTLPLPEGFQVVKVGANGEVETLEQGELPPQEDPSWQKDPDYQPPAKKTKKTKKSKLRYTEEGKDVDVSVYDFEEEQQEGLLSEVNAEKVVGNMKPPKPTKIKKKGVKKTFQCELCSYTCPRRSNLDRHMKSHTDERPHKCHLCGRAFRTVTLLRNHLNTHTGTRPHKCPDCDMAFVTSGELVRHRRYKHTHEKPFKCSMCDYASVEVSKLKRHIRSHTGERPFQCSLCSYASRDTYKLKRHMRTHSGEKPYECYICHARFTQSGTMKMHILQKHTENVAKFHCPHCDTVIARKSDLGVHLRKQHSYIEQGKKCRYCDAVFHERYALIQHQKSHKNEKRFKCDQCDYACRQERHMIMHKRTHTGEKPYACSHCDKTFRQKQLLDMHFKRYHDPNFVPAAFVCSKCGKTFTRRNTMARHADNCAGPDGVEGENGGETKKSKRGRKRKMRSKKEDSSDSENAEPDLDDNEDEEEPAVEIEPEPEPQPVTPAPPPAKKRRGRPPGRTNQPKQNQPTAIIQVEDQNTGAIENIIVEVKKEPDAEPAEGEEEEAQPAATDAPNGDLTPEMILSMMDR

SEQ ID NO: 19760 - protein, 399 aa, Homo sapiens
MAFVTSGELVRHRRYKHTHEKPFKCSMCDYASVEVSKLKRHIRSHTGERPFQCSLCSYASRDTYKLKRHMRTHSGEKPYECYICHARFTQSGTMKMHILQKHTENVAKFHCPHCDTVIARKSDLGVHLRKQHSYIEQGKKCRYCDAVFHERYALIQHQKSHKNEKRFKCDQCDYACRQERHMIMHKRTHTGEKPYACSHCDKTFRQKQLLDMHFKRYHDPNFVPAAFVCSKCGKTFTRRNTMARHADNCAGPDGVEGENGGETKKSKRGRKRKMRSKKEDSSDSENAEPDLDDNEDEEEPAVEIEPEPEPQPVTPAPPPAKKRRGRPPGRTNQPKQNQPTAIIQVEDQNTGAIENIIVEVKKEPDAEPAEGEEEEAQPAATDAPNGDLTPEMILSMMDR

SEQ ID NO: 19761 - protein, 975 aa, Homo sapiens
MEDYEQELCGVEDDFHNQFAAELEVLAELEGASTPSPSGVPLFTAGRPPRTFEEALARGDAASSPAPAASVGSSQGGARKRQVDADLQPAGSLPHAPRIKRPRLQVVKRLNFRSEEMEEPPPPDSSPTDITPPPSPEDLAELWGHGVSEAAADVGLTRASPAARNPVLRRPPILEDYVHVTSTEGVRAYLVLRADPMAPGVQGSLLHVPWRGGGQLDLLGVSLASLKKQVDGERRERLLQEAQKLSDTLHSLRSGEEEAAQPLGAPEEEPTDGQDASSHCLWVDEFAPRHYTELLSDDFTNRCLLKWLKLWDLVVFGHERPSRKPRPSVEPARVSKEATAPGKWKSHEQVLEEMLEAGLDPSQRPKQKVALLCGPPGLGKTTLAHVIARHAGYSVVEMNASDDRSPEVFRTRIEAATQMESVLGAGGKPNCLVIDEIDGAPVAAINVLLSILNRKGPQEVGPQGPAVPSGGGRRRRAEGGLLMRPIICICNDQFAPSLRQLKQQAFLLHFPPTLPSRLVQRLQEVSLRQGMRADPGVLAALCEKTDNDIRACINTLQFLYSRGQRELSVRDVQATRVGLKDQRRGLFSVWQEVFQLPRAQRRRVGQDPALPADTLLLGDGDAGSLTSASQRFYRVLHAAASAGEHEKVVQGLFDNFLRLRLRDSSLGAVCVALDWLAFDDLLAGAAHHSQSFQLLRYPPFLPVAFHVLFASSHTPRITFPSSQQEAQNRMSQMRNLIQTLVSGIAPATRSRATPQALLLDALCLLLDILAPKLRPVSTQLYSTREKQQLASLVGTMLAYSLTYRQERTPDGQYIYRLEPNVEELCRFPELPARKPLTYQTKQLIAREIEVEKMRRAEASARVENSPQVDGSPPGLEGLLGGIGEKGVHRPAPRNHEQRLEHIMRRAAREEQPEKDFFGRVVVRSTAVPSAGDTAPEQDSVERRMGTAVGRSEVWFRFNEGVSNAVRRSLYIRDLL

SEQ ID NO: 19762 - protein, 1003 aa, Homo sapiens
MEDYEQELCGVEDDFHNQFAAELEVLAELEGASTPSPSGVPLFTAGRPPRTFEEALARGDAASSPAPAASVGSSQGGARKRQVDADLQPAGSLPHGRLAALPQGLRSGREAEEASGSLHVSPPAPRIKRPRLQVVKRLNFRSEEMEEPPPPDSSPTDITPPPSPEDLAELWGHGVSEAAADVGLTRASPAARNPVLRRPPILEDYVHVTSTEGVRAYLVLRADPMAPGVQGSLLHVPWRGGGQLDLLGVSLASLKKQVDGERRERLLQEAQKLSDTLHSLRSGEEEAAQPLGAPEEEPTDGQDASSHCLWVDEFAPRHYTELLSDDFTNRCLLKWLKLWDLVVFGHERPSRKPRPSVEPARVSKEATAPGKWKSHEQVLEEMLEAGLDPSQRPKQKVALLCGPPGLGKTTLAHVIARHAGYSVVEMNASDDRSPEVFRTRIEAATQMESVLGAGGKPNCLVIDEIDGAPVAAINVLLSILNRKGPQEVGPQGPAVPSGGGRRRRAEGGLLMRPIICICNDQFAPSLRQLKQQAFLLHFPPTLPSRLVQRLQEVSLRQGMRADPGVLAALCEKTDNDIRACINTLQFLYSRGQRELSVRDVQATRVGLKDQRRGLFSVWQEVFQLPRAQRRRVGQDPALPADTLLLGDGDAGSLTSASQRFYRVLHAAASAGEHEKVVQGLFDNFLRLRLRDSSLGAVCVALDWLAFDDLLAGAAHHSQSFQLLRYPPFLPVAFHVLFASSHTPRITFPSSQQEAQNRMSQMRNLIQTLVSGIAPATRSRATPQALLLDALCLLLDILAPKLRPVSTQLYSTREKQQLASLVGTMLAYSLTYRQERTPDGQYIYRLEPNVEELCRFPELPARKPLTYQTKQLIAREIEVEKMRRAEASARVENSPQVDGSPPGLEGLLGGIGEKGVHRPAPRNHEQRLEHIMRRAAREEQPEKDFFGRVVVRSTAVPSAGDTAPEQDSVERRMGTAVGRSEVWFRFNEGVSNAVRRSLYIRDLL

SEQ ID NO: 19763 - protein, 557 aa, Homo sapiens
MESVLGAGGKPNCLVIDEIDGAPVAAINVLLSILNRKGPQEVGPQGPAVPSGGGRRRRAEGGLLMRPIICICNDQFAPSLRQLKQQAFLLHFPPTLPSRLVQRLQEVSLRQGMRADPGVLAALCEKTDNDIRACINTLQFLYSRGQRELSVRDVQATRVGLKDQRRGLFSVWQEVFQLPRAQRRRVGQDPALPADTLLLGDGDAGSLTSASQRFYRVLHAAASAGEHEKVVQGLFDNFLRLRLRDSSLGAVCVALDWLAFDDLLAGAAHHSQSFQLLRYPPFLPVAFHVLFASSHTPRITFPSSQQEAQNRMSQMRNLIQTLVSGIAPATRSRATPQALLLDALCLLLDILAPKLRPVSTQLYSTREKQQLASLVGTMLAYSLTYRQERTPDGQYIYRLEPNVEELCRFPELPARKPLTYQTKQLIAREIEVEKMRRAEASARVENSPQVDGSPPGLEGLLGGIGEKGVHRPAPRNHEQRLEHIMRRAAREEQPEKDFFGRVVVRSTAVPSAGDTAPEQDSVERRMGTAVGRSEVWFRFNEGVSNAVRRSLYIRDLL

SEQ ID NO: 19764 - protein, 121 aa, Homo sapiens
MVQIVISSARAGGLAEWVLMELQGEIEARYSTGLAGNLLGDLHYTTEGIPVLIVGHHILYGKIIHLEKPFAVLVKHTPGDQDCDELGRETGTRYLVTALIKDKILFKTRPKPIITSVPKKV

SEQ ID NO: 19765 - protein, 426 aa, Homo sapiens
MANDSGGPGGPSPSERDRQYCELCGKMENLLRCSRCRSSFYCCKEHQRQDWKKHKLVCQGSEGALGHGVGPHQHSGPAPPAAVPPPRAGAREPRKAAARRDNASGDAAKGKVKAKPPADPAAAASPCRAAAGGQGSAVAAEAEPGKEEPPARSSLFQEKANLYPPSNTPGDALSPGGGLRPNGQTKPLPALKLALEYIVPCMNKHGICVVDDFLGKETGQQIGDEVRALHDTGKFTDGQLVSQKSDSSKDIRGDKITWIEGKEPGCETIGLLMSSMDDLIRHCNGKLGSYKINGRTKAMVACYPGNGTGYVRHVDNPNGDGRCVTCIYYLNKDWDAKVSGGILRIFPEGKAQFADIEPKFDRLLFFWSDRRNPHEVQPAYATRYAITVWYFDADERARAKVKYLTGEKGVRVELNKPSDSVGKDVF

SEQ ID NO: 19766 - protein, 404 aa, Homo sapiens
MANDSGGPGGPSPSERDRQYCELCGKMENLLRCSRCRSSFYCCKEHQRQDWKKHKLVCQGSEGALGHGVGPHQHSGPAPPAAVPPPRAGAREPRKAAARRDNASGDAAKGKVKAKPPADPAAAASPCRAAAGGQGSAVAAEAEPGKEEPPARSSLFQEKANLYPPSNTPGDALSPGGGLRPNGQTKPLPALKLALEYIVPCMNKHGICVVDDFLGKETGQQIGDEVRALHDTGKFTDGQLVSQKSDSSKDIRGDKITWIEGKEPGCETIGLLMSSMDDLIRHCNGKLGSYKINGRTKAMVACYPGNGTGYVRHVDNPNGDGRCVTCIYYLNKDWDAKFDRLLFFWSDRRNPHEVQPAYATRYAITVWYFDADERARAKVKYLTGEKGVRVELNKPSDSVGKDVF

SEQ ID NO: 19767 - protein, 325 aa, Homo sapiens
MANDSGGPGGPSPSERDRQYCELCGKMENLLRCSRCRSSFYCCKEHQRQDWKKHKLVLLGGYRFAFSWNSDERAGGGLRPNGQTKPLPALKLALEYIVPCMNKHGICVVDDFLGKETGQQIGDEVRALHDTGKFTDGQLVSQKSDSSKDIRGDKITWIEGKEPGCETIGLLMSSMDDLIRHCNGKLGSYKINGRTKAMVACYPGNGTGYVRHVDNPNGDGRCVTCIYYLNKDWDAKVSGGILRIFPEGKAQFADIEPKFDRLLFFWSDRRNPHEVQPAYATRYAITVWYFDADERARAKVKYLTGEKGVRVELNKPSDSVGKDVF

SEQ ID NO: 19768 - protein, 134 aa, Homo sapiens
MGTLQGAALRSRERPSWPQETHGHRERTEEGCAVAAFSADALRTGGQELEQTGLRPKAGAPPMPDLLGHRICTDIGKGWRMDGGRTCSCSSFCRCPERGARRSSPDAPGLALDFPLLLDLLWHLCSWTSQPLEL

SEQ ID NO: 19769 - protein, 339 aa, Homo sapiens
MAASALYACTKCTQRYPFEELSQGQQLCKECRIAHPIVKCTYCRSEFQQESKTNTICKKCAQNVKQFGTPKPCQYCNIIAAFIGTKCQRCTNSEKKYGPPQTCEQCKQQCAFDRKEEGRRKVDGKLLCWLCTLSYKRVLQKTKEQRKSLGSSHSNSSSSSLTEKDQHHPKHHHHHHHHHHRHSSSHHKISNLSPEEEQGLWKQSHKSSATIQNETPKKKPKLESKPSNGDSSSINQSADSGGTDNFVLISQLKEEVMSLKRLLQQRDQTILEKDKKLTELKADFQYQESNLRTKMNSMEKAHKETVEQLQAKNRELLKQVAALSKGKKFDKSGSILTSP

SEQ ID NO: 19770 - protein, 233 aa, Homo sapiens
MAASALYACTKCTQRYPFEELSQGQQLCKECRIAHPIVKCTYCRSEFQQESKTNTICKKCAQNVKQFGTPKPCQYCNIIAAFIGTKCQRCTNSEKKYGPPQTCEQCKQQCAFDRKEEGRRKVDGKLLCWLCTLSYKRVLQKTKEQRKSLGSSHSNSSSSSLTEKDQHHPKHHHHHHHHHHRHSSSHHKISNLSPEEEQGLWKQSHKSSATIQNETPKKKPKLESKPSNGDRSM

SEQ ID NO: 19771 - protein, 233 aa, Homo sapiens
MAASALYACTKCTQRYPFEELSQGQQLCKECRIAHPIVKCTYCRSEFQQESKTNTICKKCAQNVKQFGTPKPCQYCNIIAAFIGTKCQRCTNSEKKYGPPQTCEQCKQQCAFDRKEEGRRKVDGKLLCWLCTLSYKRVLQKTKEQRKSLGSSHSNSSSSSLTEKDQHHPKHHHHHHHHHHRHSSSHHKISNLSPEEEQGLWKQSHKSSATIQNETPKKKPKLESKPSNGDRCM

SEQ ID NO: 19772 - protein, 173 aa, Homo sapiens
MHWKMLLLLLLYYNAEASMCHRWSRAVLFPAAHRPKRSSSLPLNPVLQTSLEEVELLYEFLLAELEISPDLQISIKDEELASLRKASDFRTVCNNVIPKSIPDIRRLSASLSSHPGILKKEDFERTVLTLAYTAYRTALSHGHQKDIWAQSLVSLFQALRHDLMRSSQPGVPP

SEQ ID NO: 19773 - protein, 906 aa, Homo sapiens
MTAVHAGNINFKWDPKSLEIRTLAVERLLEPLVTQVTTLVNTNSKGPSNKKRGRSKKAHVLAASVEQATENFLEKGDKIAKESQFLKEELVAAVEDVRKQGDLMKAAAGEFADDPCSSVKRGNMVRAARALLSAVTRLLILADMADVYKLLVQLKVVEDGILKLRNAGNEQDLGIQYKALKPEVDKLNIMAAKRQQELKDVGHRDQMAAARGILQKNVPILYTASQACLQHPDVAAYKANRDLIYKQLQQAVTGISNAAQATASDDASQHQGGGGGELAYALNNFDKQIIVDPLSFSEERFRPSLEERLESIISGAALMADSSCTRDDRRERIVAECNAVRQALQDLLSEYMGNAGRKERSDALNSAIDKMTKKTRDLRRQLRKAVMDHVSDSFLETNVPLLVLIEAAKNGNEKEVKEYAQVFREHANKLIEVANLACSISNNEEGVKLVRMSASQLEALCPQVINAALALAAKPQSKLAQENMDLFKEQWEKQVRVLTDAVDDITSIDDFLAVSENHILEDVNKCVIALQEKDVDGLDRTAGAIRGRAARVIHVVTSEMDNYEPGVYTEKVLEATKLLSNTVMPRFTEQVEAAVEALSSDPAQPMDENEFIDASRLVYDGIRDIRKAVLMIRTPEELDDSDFETEDFDVRSRTSVQTEDDQLIAGQSARAIMAQLPQEQKAKIAEQVASFQEEKSKLDAEVSKWDDSGNDIIVLAKQMCMIMMEMTDFTRGKGPLKNTSDVISAAKKIAEAGSRMDKLGRTIADHCPDSACKQDLLAYLQRIALYCHQLNICSKVKAEVQNLGGELVVSGVDSAMSLIQAAKNLMNAVVQTVKASYVASTKYQKSQGMASLNLPAVSWKMKAPEKKPLVKREKQDETQTKIKRASQKKHVNPVQALSEFKAMDSI

SEQ ID NO: 19774 - protein, 930 aa, Homo sapiens
MTAVHAGNINFKWDPKSLEIRTLAVERLLEPLVTQVTTLVNTNSKGPSNKKRGRSKKAHVLAASVEQATENFLEKGDKIAKESQFLKEELVAAVEDVRKQGDLMKAAAGEFADDPCSSVKRGNMVRAARALLSAVTRLLILADMADVYKLLVQLKVVEDGILKLRNAGNEQDLGIQYKALKPEVDKLNIMAAKRQQELKDVGHRDQMAAARGILQKNVPILYTASQACLQHPDVAAYKANRDLIYKQLQQAVTGISNAAQATASDDASQHQGGGGGELAYALNNFDKQIIVDPLSFSEERFRPSLEERLESIISGAALMADSSCTRDDRRERIVAECNAVRQALQDLLSEYMGNAGRKERSDALNSAIDKMTKKTRDLRRQLRKAVMDHVSDSFLETNVPLLVLIEAAKNGNEKEVKEYAQVFREHANKLIEVANLACSISNNEEGVKLVRMSASQLEALCPQVINAALALAAKPQSKLAQENMDLFKEQWEKQVRVLTDAVDDITSIDDFLAVSENHILEDVNKCVIALQEKDVDGLDRTAGAIRGRAARVIHVVTSEMDNYEPGVYTEKVLEATKLLSNTVMPRFTEQVEAAVEALSSDPAQPMDENEFIDASRLVYDGIRDIRKAVLMIRTPEELDDSDFETEDFDVRSRTSVQTEDDQLIAGQSARAIMAQLPQEQKAKIAEQVASFQEEKSKLDAEVSKWDDSGNDIIVLAKQMCMIMMEMTDFTRGKGPLKNTSDVISAAKKIAEAGSRMDKLGRTIADHCPDSACKQDLLAYLQRIALYCHQLNICSKVKAEVQNLGGELVVSGNCDTCGALQGLKGWPPPLCLATHWVDSAMSLIQAAKNLMNAVVQTVKASYVASTKYQKSQGMASLNLPAVSWKMKAPEKKPLVKREKQDETQTKIKRASQKKHVNPVQALSEFKAMDSI

SEQ ID NO: 19775 - protein, 536 aa, Homo sapiens
MTKKTRDLRRQLRKAVMDHVSDSFLETNVPLLVLIEAAKNGNEKEVKEYAQVFREHANKLIEVANLACSISNNEEGVKLVRMSASQLEALCPQVINAALALAAKPQSKLAQENMDLFKEQWEKQVRVLTDAVDDITSIDDFLAVSENHILEDVNKCVIALQEKDVDGLDRTAGAIRGRAARVIHVVTSEMDNYEPGVYTEKVLEATKLLSNTVMPRFTEQVEAAVEALSSDPAQPMDENEFIDASRLVYDGIRDIRKAVLMIRTPEELDDSDFETEDFDVRSRTSVQTEDDQLIAGQSARAIMAQLPQEQKAKIAEQVASFQEEKSKLDAEVSKWDDSGNDIIVLAKQMCMIMMEMTDFTRGKGPLKNTSDVISAAKKIAEAGSRMDKLGRTIADHCPDSACKQDLLAYLQRIALYCHQLNICSKVKAEVQNLGGELVVSGVDSAMSLIQAAKNLMNAVVQTVKASYVASTKYQKSQGMASLNLPAVSWKMKAPEKKPLVKREKQDETQTKIKRASQKKHVNPVQALSEFKAMDSI

SEQ ID NO: 19776 - protein, 86 aa, Homo sapiens
MAEDMETKIKNYKTAPFDSRFPNQNQTRNCWQNYLDFHRCQKAMTAKGGDISVCEWYQRVYQSLCPTSWVTDWDEQRAEGTFPGKI

SEQ ID NO: 19777 - protein, 367 aa, Homo sapiens
MIRNWLTIFILFPLKLVEKCESSVSLTVPPVVKLENGSSTNVSLTLRPPLNATLVITFEITFRSKNITILELPDEVVVPPGVTNSSFQVTSQNVGQLTVYLHGNHSNQTGPRIRFLVIRSSAISIINQVIGWIYFVAWSISFYPQVIMNWRRKSVIGLSFDFVALNLTGFVAYSVFNIGLLWVPYIKEQFLLKYPNGVNPVNSNDVFFSLHAVVLTLIIIVQCCLYERGGQRVSWPAIGFLVLAWLFAFVTMIVAAVGVTTWLQFLFCFSYIKLAVTLVKYFPQAYMNFYYKSTEGWSIGNVLLDFTGGSFSLLQMFLQSYNNDQWTLIFGDPTKFGLGVFSIVFDVVFFIQHFCLYRKRPGYDQLN

SEQ ID NO: 19778 - protein, 400 aa, Homo sapiens
MIRNWLTIFILFPLKLVEKCESSVSLTVPPVVKLENGSSTNVSLTLRPPLNATLVITFEITFRSKNITILELPDEVVVPPGVTNSSFQVTSQNVGQLTVYLHGNHSNQTGPRIRFLVIRSSAISIINQVIGWIYFVAWSISFYPQVIMNWRRKSVIGLSFDFVALNLTGFVAYSVFNIGLLWVPYIKEQFLLKYPNGVNPVNSNDVFFSLHAVVLTLIIIVQCCLYERGGQRVSWPAIGFLVLAWLFAFVTMIVAAVGVTTWLQFLFCFSYIKLAVTLVKYFPQAYMNFYYKSTEGWSIGNVLLDFTGGSFSLLQMFLQSYNNDQWTLIFGDPTKFGLGVFSIVFDVVFFIQHFCLYRKRPGLQAARTGSGSRLRQDWAPSLQPKALPQTTSVSASSLKG

SEQ ID NO: 19779 - protein, 247 aa, Homo sapiens
MGKRDNRVAYMNPIAMARSRGPIQSSGPTIQDYLNRPRPTWEEVKEQLEKKKKGSKALAEFEEKMNENWKKELEKHREKLLSGSESSSKKRQRKKKEKKKSGRYSSSSSSSSDSSSSSSDSEDEDKKQGKRRKKKKNRSHKSSESSMSETESDSKDSLKKKKKSKDGTEKEKDIKGLSKKRKMYSEDKPLSSESLSESEYIEEVRAKKKKSSEEREKATEKTKKKKKHKKHSKKKKKKAASSSPDSP

SEQ ID NO: 19780 - protein, 237 aa, Homo sapiens
MNPIAMARSRGPIQSSGPTIQDYLNRPRPTWEEVKEQLEKKKKGSKALAEFEEKMNENWKKELEKHREKLLSGSESSSKKRQRKKKEKKKSGRYSSSSSSSSDSSSSSSDSEDEDKKQGKRRKKKKNRSHKSSESSMSETESDSKDSLKKKKKSKDGTEKEKDIKGLSKKRKMYSEDKPLSSESLSESEYIEEVRAKKKKSSEEREKATEKTKKKKKHKKHSKKKKKKAASSSPDSP

SEQ ID NO: 19781 - protein, 270 aa, Homo sapiens
MDWKTLQALLSGVNKYSTAFGRIWLSVVFVFRVLVYVVAAERVWGDEQKDFDCNTKQPGCTNVCYDNYFPISNIRLWALQLIFVTCPSLLVILHVAYREERERRHRQKHGDQCAKLYDNAGKKHGGLWWTYLFSLIFKLIIEFLFLYLLHTLWHGFNMPRLVQCANVAPCPNIVDCYIARPTEKKIFTYFMVGASAVCIVLTICELCYLICHRVLRGLHKDKPRGGCSPSSSASRASTCRCHHKLVEAGEVDPDPGNNKLQASAPNLTPI

SEQ ID NO: 19782 - protein, 52 aa, Homo sapiens
MAYVFNLSCLGSQVERLLEARSSRPTWIIQPSPKKAPEACFSFHSSYERNWA

SEQ ID NO: 19783 - protein, 348 aa, Homo sapiens
MSLPRFQRVNFGPYDNYIPVSELSKKSWNQQHFALLFPKPQRPGTKRRSKPSQIRDNTVSIIDEEQLRGDRRQPLWMYRSLMRISERPSVYLAARRQPLKPTRTVEVDSKAAEIGKKGEDKTTQKDTTDSESELKQGKKDSKKGKDIEKGKEEKLDAKKDSKKGKKDAEKGKDSATESEDEKGGAKKDNKKDKKDSNKGKDSATESEGEKGGTEKDSKKGKKDSKKGKDSAIELQAVKADEKKDEDGKKDANKGDESKDAKKDAKEIKKGKKDKKKPSSTDSDSKDDVKKESKKDATKDAKKVAKKDTEKESADSKKDAKKNAKKDAKKDAKKNAKKDEKKDAKKKGK

SEQ ID NO: 19784 - protein, 651 aa, Homo sapiens
MSLPRLLKVNIRTYDNSIPISESSRKSWNQKHFALTFPKPLQRGTNDKSRPLKSQITVTRHDKRKLEEGQKPAHKWIRHSFRKILQWPPIYTAAREQTPFRHLYTSKTHLKKAEYKKSKDEKGGTPLKKDSKKKGGSYATNPESKQIVEEKTKRQNEADKTPLKSSHENEQSKKSKSSSETNPESQNSKTVSKNCSQKDKKDSKNSKKTNTEFLHTKNNPKKDLKRSKTSNDPISEICSENSLNVDFLMLVGQSDDESINFDAWLRNYSQNNSKNYSLKYTKYTKKDTKKNAKKSSDAESEDSKDAKKDSKKVKKNVKKDDKKKDVKKDTESTDAESGDSKDERKDTKKDKKKLKKDDKKKDTKKYPESTDTESGDAKDARNDSRNLKKASKNDDKKKDAKKITFSTDSESELESKESQKDEKKDKKDSKTDNKKSVKNDEESTDADSEPKGDSKKGKKDEKKGKKDSKKDDKKKDAKKNAESTEMESDLELKKDKKHSKEKKGSKKDIKKDARKDTESTDAEFDESSKTGFKTSTKIKGSDTESEESLYKPGAKKKIDESDGTSANSKMEGLESKRGFRMSSKKTTFNEKGEKASTGRVPPSREKPPLPACEPSLPSPKVRRLCWCKMPPPPPKPRYAPLPEAPWIHKLL

SEQ ID NO: 19785 - protein, 780 aa, Homo sapiens
MDQNSVPEKAQNEADTNNADRFFRSHSSPPHHRPGHSRALHHYELHHHGVPHQRGESHHPPEFQDFHDQALSSHVHQSHHHSEARNHGRAHGPTGFGLAPSQGAVPSHRSYGEDYHDELQRDGRRHHDGSQYGGFHQQSDSHYHRGSHHGRPQYLGENLSHYSSGVPHHGEASHHGGSYLPHGPNPYSESFHHSEASHLSGLQHDESQHHQVPHRGWPHHHQVHHHGRSRHHEAHQHGKSPHHGETISPHSSVGSYQRGISDYHSEYHQGDHHPSEYHHGDHPHHTQHHYHQTHRHRDYHQHQDHHGAYHSSYLHGDYVQSTSQLSIPHTSRSLIHDAPGPAASRTGVFPYHVAHPRGSAHSMTRSSSTIRSRVTQMSKKVHTQDISTKHSEDWGKEEGQFQKRKTGRLQRTRKKGHSTNLFQWLWEKLTFLIQGFREMIRNLTQSLAFETFIFFVVCLNTVMLVAQTFAEVEIRGEWYFMALDSIFFCIYVVEALLKIIALGLSYFFDFWNNLDFFIMAMAVLDFLLMQTHSFAIYHQSLFRILKVFKSLRALRAIRVLRRLSFLTSVQEVTGTLGQSLPSIAAILILMFTCLFLFSAVLRALFRKSDPKRFQNIFTTIFTLFTLLTLDDWSLIYMDSRAQGAWYIIPILVIYIIIQYFIFLNLVITVLVDSFQTALFKGLEKAKQERAARIQEKLLEDSLTELRAAEPKEVASEGTMLKRLIEKKFGTMTEKQQELLFHYLQLVASVEQEQQKFRSQAAVIDEIVDTTFEAGEEDFRN

SEQ ID NO: 19786 - protein, 147 aa, Homo sapiens
MLGLPWKGGLSWALLLLLLGSQILLIYAWHFHEQRDCDEHNVMARYLPATVEFAVHTFNQQSKDYYAYRLGHILNSWKEQVESKTVFSMELLLGRTRCGKFEDDIDNCHFQESTELNNTFTCFFTISTRPWMTQFSLLNKTCLEGFH

SEQ ID NO: 19787 - protein, 288 aa, Homo sapiens
MSATGDRHPTQGDQEAPVSQEGAQAEAAGAGNQEGGDSGPDSSDVVPAAEVVGVAGPVEGLGEEEGEQAAGLAAVPRGGSAEEDSDIGPATEEEEEEEGNEAANFDLAVVARRYPASGIHFVLLDMVHSLLHRLSHNDHILIENRQLSRLMVGPHAAARNLWGNLPPLLLPQRLGAGAAARAGEGLGLIQEAASVPEPAVPADLAEMAREPAEEAAEEKLSEEATEEPDAEEPATEEPTAQEATAPEEVTKSQPEKWDEEAQDAAGEEEKEQEKEKDAENKVKNSKGT

SEQ ID NO: 19788 - protein, 299 aa, Homo sapiens
MSATGDRHPTQGDQEAPVSQEGAQAEAAGAGNQEGGDSGPDSSDMVPAAEVVGVAGPVEGLGEEEGEQAAGLAAVPQGGSAEEDSDIGPATEEEEEEEEGNEAANFDLAVATRRYPAAGIGFVFLYLVHSLLRRLYHNDHIQIANRHLSRLMVGPHAAVPNLWDNPPLLLLSQRLGAGAAAPEGEGLGLIQEAASVQEAASVPEPAVPADLAEMAREPAEEAADEKPPEEAAEEKLTEEATEEPAAEEPTSEEAVAPEEVTKSQPEKWDEEAQDAAGEEEKEQEKEKDVENKVKNSKGT

SEQ ID NO: 19789 - protein, 367 aa, Homo sapiens
MEANGLGPQGFPELKNDTFLRAAWGEETDYTPVWCMRQAGRYLPEFRETRAAQDFFSTCRSPEACCELTLQPLRRFPLDAAIIFSDILVVPQALGMEVTMVPGKGPSFPEPLREEQDLERLRDPEVVASELGYVFQAITLTRQRLAGRVPLIGFAGAPWTLMTYMVEGGGSSTMAQAKRWLYQRPQASHQLLRILTDALVPYLVGQVVAGAQALQLFESHAGHLGPQLFNKFALPYIRDVAKQVKARLREAGLAPVPMIIFAKDGHFALEELAQAGYEVVGLDWTVAPKKARECVGKTVTLQGNLDPCALYASEEEIGQLVKQMLDDFGPHRYIANLGHGLYPDMDPEHVGAFVDAVHKHSRLLRQN

SEQ ID NO: 19790 - protein, 70 aa, Homo sapiens
MTMNVLEAGKWKSIVPAPGEGLLAVLHMMVFTDALHRERSVKWQAGVCYNGGKDFAVSLARPKAAEGIAD

SEQ ID NO: 19791 - protein, 214 aa, Homo sapiens
MESENMDSENMKTENMESQNVDFESVSSVTALEALSKLLNPEEEDDSDYGQTNGLSTIGAMGPGNIGPPQIEELKVIPETSEENNEDIWNSEEIPEGAEYDDMWDVREIPEYEIIFRQQVGTEDIFLGLSKKDSSTGCCSELVAKIKLPNTNPSDIQIDIQETILDLRTPQKKLLITLPELVECTSAKAFYIPETETLEITMTMKRELDIANFF

SEQ ID NO: 19792 - protein, 73 aa, Homo sapiens
MRIAVLLFAIFFFMSQVLPARGKFKEICERPNGSCRDFCLETEIHVGRCLNSQPCCLPLGHQPRIESTTPKKD

SEQ ID NO: 19793 - protein, 72 aa, Homo sapiens
MQRLVLLLAISLLLYQDLPVRSEFELDRICGYGTARCRKKCRSQEYRIGRCPNTYACCLRKWDESLLNRTKP

SEQ ID NO: 19794 - protein, 455 aa, Homo sapiens
MAAPEEHDSPTEASQPIVEEEETKTFKDLGVTDVLCEACDQLGWTKPTKIQIEAIPLALQGRDIIGLAETGSGKTGAFALPILNALLETPQRLFALVLTPTRELAFQISEQFEALGSSIGVQSAVIVGGIDSMSQSLALAKKPHIIIATPGRLIDHLENTKGFNLRALKYLVMDEADRILNMDFETEVDKILKVIPRDRKTFLFSATMTKKVQKLQRAALKNPVKCAVSSKYQTVEKLQQYYIFIPSKFKDTYLVYILNELAGNSFMIFCSTCNNTQRTALLLRNLGFTAIPLHGQMSQSKRLGSLNKFKAKARSILLATDVASRGLDIPHVDVVVNFDIPTHSKDYIHRVGRTARAGRSGKAITFVTQYDVELFQRIEHLIGKKLPGFPTQDDEVMMLTERVAEAQRFARMELREHGEKKKRSREDAGDNDDTEGAIGVRNKVAGGKMKKRKGR

SEQ ID NO: 19795 - protein, 406 aa, Homo sapiens
MAAPEEHDSPTEASQPIVEEEETKTFKDLGVTDVLCEACDQLGWTKPTKIQIEAIPLALQGRDIIGLAETGSGKTGAFALPILNALLETPQRLFALVLTPTRELAFQISEQFEALGSSIGVQSAVIVGGIDSMSQSLALAKKPHIIIATPGRLIDHLENTKGFNLRALKYLVMDEADRILNMDFETEVDKILKVIPRDRKTFLFSATMTKKVQKLQRAALKNPVKCAVSSKYQTVEKLQQYYIFIPSKFKSKRLGSLNKFKAKARSILLATDVASRGLDIPHVDVVVNFDIPTHSKDYIHRVGRTARAGRSGKAITFVTQYDVELFQRIEHLIGKKLPGFPTQDDEVMMLTERVAEAQRFARMELREHGEKKKRSREDAGDNDDTEGAIGVRNKVAGGKMKKRKGR

SEQ ID NO: 19796 - protein, 70 aa, Homo sapiens
MRVLFFVFGVLSLMFTVPPARSFISNDECPSEYYHCRLKCNADEHAIRYCADFSICCKLKIIEIDGQKKW

SEQ ID NO: 19797 - protein, 480 aa, Homo sapiens
MNASEFRRRGKEMVDYMANYMEGIEGRQVYPDVEPGYLRPLIPAAAPQEPDTFEDIINDVEKIIMPGVTHWHSPYFFAYFPTASSYPAMLADMLCGAIGCIGFSWAASPACTELETVMMDWLGKMLELPKAFLNEKAGEGGGVIQGSASEATLVALLAARTKVIHRLQAASPELTQAAIMEKLVAYSSDQAHSSVERAGLIGGVKLKAIPSDGNFAMRASALQEALERDKAAGLIPFFMVATLGTTTCCSFDNLLEVGPICNKEDIWLHVDAAYAGSAFICPEFRHLLNGVEFADSFNFNPHKWLLVNFDCSAMWVKKRTDLTGAFRLDPTYLKHSHQDSGLITDYRHWQIPLGRRFRSLKMWFVFRMYGVKGLQAYIRKHVQLSHEFESLVRQDPRFEICVEVILGLVCFRLKGSNKVNEALLQRINSAKKIHLVPCHLRDKFVLRFAICSRTVESAHVQRAWEHIKELAADVLRAERE

SEQ ID NO: 19798 - protein, 338 aa, Homo sapiens
MNASEFRRRGKEMVDYMANYMEGIEGRQVYPDVEPGYLRPLIPAAAPQEPDTFEDIINDVEKIIMPGVTHWHSPYFFAYFPTASSYPAMLADMLCGAIGCIGFSWAASPACTELETVMMDWLGKMLELPKAFLNEKAGEGGGVIQGSASEATLVALLAARTKVIHRLQAASPELTQAAIMEKLVAYSSDQAHSSVERAGLIGGVKLKAIPSDGNFAMRASALQEALERDKAAGLIPFFMVATLGTTTCCSFDNLLEVGPICNKEDIWLHVDAAYAGSAFICPEFRHLLNGVEFADSFNFNPHKWLLVNFDCSAMWSRQPVRMLRLKKTCLVSAVVRRS

SEQ ID NO: 19799 - protein, 402 aa, Homo sapiens
MNASEFRRRGKEMVDYMANYMEGIEGRQVYPDVEPGYLRPLIPAAAPQEPDTFEDIINDVEKIIMPGGSASEATLVALLAARTKVIHRLQAASPELTQAAIMEKLVAYSSDQAHSSVERAGLIGGVKLKAIPSDGNFAMRASALQEALERDKAAGLIPFFMVATLGTTTCCSFDNLLEVGPICNKEDIWLHVDAAYAGSAFICPEFRHLLNGVEFADSFNFNPHKWLLVNFDCSAMWVKKRTDLTGAFRLDPTYLKHSHQDSGLITDYRHWQIPLGRRFRSLKMWFVFRMYGVKGLQAYIRKHVQLSHEFESLVRQDPRFEICVEVILGLVCFRLKGSNKVNEALLQRINSAKKIHLVPCHLRDKFVLRFAICSRTVESAHVQRAWEHIKELAADVLRAERE

SEQ ID NO: 19800 - protein, 387 aa, Homo sapiens
MNASEFRRRGKEMVDYMANYMEGIEGRQVYPDVEPGYLRPLIPAAAPQEPDTFEDIINDVEKIIMPGVTHWHSPYFFAYFPTASSYPAMLADMLCGAIGCIGFSWAASPACTELETVMMDWLGKMLELPKAFLNEKAGEGGGVIQMVATLGTTTCCSFDNLLEVGPICNKEDIWLHVDAAYAGSAFICPEFRHLLNGVEFADSFNFNPHKWLLVNFDCSAMWVKKRTDLTGAFRLDPTYLKHSHQDSGLITDYRHWQIPLGRRFRSLKMWFVFRMYGVKGLQAYIRKHVQLSHEFESLVRQDPRFEICVEVILGLVCFRLKGSNKVNEALLQRINSAKKIHLVPCHLRDKFVLRFAICSRTVESAHVQRAWEHIKELAADVLRAERE

SEQ ID NO: 19801 - protein, 357 aa, Homo sapiens
MSAFEKPQIIAHIQKGFNYTVFDCKWVPCSAKFVTMGNFARGTGVIQLYEIQHGDLKLLREIEKAKPIKCGTFGATSLQQRYLATGDFGGNLHIWNLEAPEMPVYSVKGHKEIINAIDGIGGLGIGEGAPEIVTGSRDGTVKVWDPRQKDDPVANMEPVQGENKRDCWTVAFGNAYNQEERVVCAGYDNGDIKLFDLRNMALRWETNIKNGVCSLEFDRKDISMNKLVATSLEGKFHVFDMRTQHPTKGFASVSEKAHKSTVWQVRHLPQNRELFLTAGGAGGLHLWKYEYPIQRSKKDSEGIEMGVAGSVSLLQNVTLSTQPISSLDWSPDKRGLCVCSSFDQTVRVLIVTKLNKI

SEQ ID NO: 19802 - protein, 288 aa, Homo sapiens
MSAFEKPQIIAHIQKGFNYTVFDCKWVPCSAKFVTMGNFARGTGVIQLYEIQHGDLKLLREIEKAKPIKCGTFGATSLQQRYLATGDFGGNLHIWNLEAPEMPVYSVKGHKEIINAIDGIGGLGIGEGAPEIVTGSRDGTVKVWDPRQKDDPVANMEPVQGENKRDCWTVAFGNAYNQEERVVCAGYDNGDIKLFDLRNMALRWETNIKNGVCSLEFDRKDISMNKLVATSLEGKFHVFDMRTQHPTKGFASVSEKAHKSTVWQVRHLPQNRELFLTAGGAGGLHLWK

SEQ ID NO: 19803 - protein, 758 aa, Homo sapiens
MAVPAALIPPTQLVPPQPPISTSASSSGTTTSTSSATSSPAPSIGPPASSGPTLFRPEPIASAAAAAATVTSTGGGGGGGGSGGGGGSSGNGGGGGGGGGGSNCNPNLAAASNGSGGGGGGISAGGGVASSTPINASTGSSSSSSSSSSSSSSSSSSSSSSSSCGPLPGKPVYSTPSPVENTPQNNECKMVDLRGAKVASFTVEGCELICLPQAFDLFLKHLVGGLHTVYTKLKRLEITPVVCNVEQVRILRGLGAIQPGVNRCKLISRKDFETLYNDCTNASSRPGRPPKRTQSVTSPENSHIMPHSVPGLMSPGIIPPTGLTAAAAAAAAATNAAIAEAMKVKKIKLEAMSNYHASNNQHGADSENGDMNSSVGSSDGSWDKETLPSSPSQGPQASITHPRMPGARSLPLSHPLNHLQQSHLLPNGLELPFMMMPHPLIPVSLPPASVTMAMSQMNHLSTIANMAAAAQVQSPPSRVETSVIKERVPDSPSPAPSLEEGRRPGSHPSSHRSSSVSSSPARTESSSDRIPVHQNGLSMNQMLMGLSPNVLPGPKEGDLAGHDMGHESKRMHIEKDETPLSTPTARDSLDKLSLTGHGQPLPPGFPSPFLFPDGLSSIETLLTNIQGLLKVAIDNARAQEKQVQLEKTELKMDFLRERELRETLEKQLAMEQKNRAIVQKRLKKEKKAKRKLQEALEFETKRREQAEQTLKQAASTDSLRVLNDSLTPEIEADRSGGRTDAERTIQDGRLYLKTTVMY

SEQ ID NO: 19804 - protein, 706 aa, Homo sapiens
MAVPAALIPPTQLVPPQPPISTSASSSGTTTSTSSATSSPAPSIGPPASSGPTLFRPEPIASAAAAAATVTSTGGGGGGGGSGGGGGSSGNGGGGGGGGGGSNCNPNLAAASNGSGGGGGGISAGGGVASSTPINASTGSSSSSSSSSSSSSSSSSSSSSSSSCGPLPGKPVYSTPSPVENTPQNNECKMVDLRGAKVASFTVEGCELICLPQAFDLFLKHLVGGLHTVYTKLKRLEITPVVCNVEQVRILRGLGAIQPGVNRCKLISRKDFETLYNDCTNASSRPGRPPKRTQSVTSPENSHIMPHSVPGLMSPGIIPPTGLTAAAAAAAAATNAAIAEAMKVKKIKLEAMSNYHASNNQHGADSENGDMNSSVGLELPFMMMPHPLIPVSLPPASVTMAMSQMNHLSTIANMAAAAQVQSPPSRVETSVIKERVPDSPSPAPSLEEGRRPGSHPSSHRSSSVSSSPARTESSSDRIPVHQNGLSMNQMLMGLSPNVLPGPKEGDLAGHDMGHESKRMHIEKDETPLSTPTARDSLDKLSLTGHGQPLPPGFPSPFLFPDGLSSIETLLTNIQGLLKVAIDNARAQEKQVQLEKTELKMDFLRERELRETLEKQLAMEQKNRAIVQKRLKKEKKAKRKLQEALEFETKRREQAEQTLKQAASTDSLRVLNDSLTPEIEADRSGGRTDAERTIQDGRLYLKTTVMY

SEQ ID NO: 19805 - protein, 558 aa, Homo sapiens
MAVPAALIPPTQLVPPQPPISTSASSSGTTTSTSSATSSPAPSIGPPASSGPTLFRPEPIASAAAAAATVTSTGGGGGGGGSGGGGGSSGNGGGGGGGGGGSNCNPNLAAASNGSGGGGGGISAGGGVASSTPINASTGSSSSSSSSSSSSSSSSSSSSSSSSCGPLPGKPVYSTPSPVENTPQNNECKMVDLRGAKVASFTVEGCELICLPQAFDLFLKHLVGGLHTVYTKLKRLEITPVVCNVEQVRILRGLGAIQPGVNRCKLISRKDFETLYNDCTNASSRPGRPPKRTQSVTSPENSHIMPHSVPGLMSPGIIPPTGLTAAAAAAAAATNAAIAEAMKVKKIKLEAMSNYHASNNQHGADSENGDMNSSVDETPLSTPTARDSLDKLSLTGHGQPLPPGFPSPFLFPDGLSSIETLLTNIQGLLKVAIDNARAQEKQVQLEKTELKMDFLRERELRETLEKQLAMEQKNRAIVQKRLKKEKKAKRKLQEALEFETKRREQAEQTLKQAASTDSLRVLNDSLTPEIEADRSGGRTDAERTIQDGRLYLKTTVMY

SEQ ID NO: 19806 - protein, 504 aa, Homo sapiens
MAVPAALIPPTQLVPPQPPISTSASSSGTTTSTSSATSSPAPSIGPPASSGPTLFRPEPIASAAAAAATVTSTGGGGGGGGSGGGGGSSGNGGGGGGGGGGSNCNPNLAAASNGSGGGGGGISAGGGVASSTPINASTGSSSSSSSSSSSSSSSSSSSSSSSSCGPLPGKPVYSTPSPVENTPQNNECKMVDLRGAKVASFTVEGCELICLPQAFDLFLKHLVGGLHTVYTKLKRLEITPVVCNVEQVRILRGLGAIQPGVNRCKLISRKDFETLYNDCTNASSRPGRPPKRTQSVTSPENSHIMPHSVPGLMSPGIIPPTDETPLSTPTARDSLDKLSLTGHGQPLPPGFPSPFLFPDGLSSIETLLTNIQGLLKVAIDNARAQEKQVQLEKTELKMDFLRERELRETLEKQLAMEQKNRAIVQKRLKKEKKAKRKLQEALEFETKRREQAEQTLKQAASTDSLRVLNDSLTPEIEADRSGGRTDAERTIQDGRLYLKTTVMY

SEQ ID NO: 19807 - protein, 343 aa, Homo sapiens
MMFPGLLAPPAGYPSLLRPTPTLTLPQSLQSAFSGHSSFLVEDLIRISRPPAYLPRSVPTASMSPPRQGAPTALTDTGASDLGSPGPGSRRGGSPPTAFSPASETTFLKFGVNAILSSGPRTETSPALLQSVPPKTFAFPYFEGSFQPFIRSSYFPASSSVVPIPGTFSWPLAARGKPRRGMLRRAVFSDVQRKALEKMFQKQKYISKPDRKKLAAKLGLKDSQVKIWFQNRRMKWRNSKERELLSSGGCREQTLPTKLNPHPDLSDVGQKGPGNEEEEEGPGSPSHRLAYHASSDPQHLRDPRLPGPLPPSPAHSSSPGKPSDFSDSEEEEEGEEQEEITVS

SEQ ID NO: 19808 - protein, 774 aa, Homo sapiens
MWTPGGPPGSAGWDRRRLGARLRAAFAGLQELQGLRATQQERVRGALALQPPPAPAAPCGPHGLHGPEQQLEAALAALQEQLSRLRQQDIGLKTHLDQLDLQISKLQLDVGTASGEALDSDSRPSSGFYEMSDGGSCSLSTSCASVCSDHISPSLGSLLPVAQAHKARPSMGDWRPRSVDETTVPAWRPQATEEGARPPGSVEDAGQPWGTFWPRPVSTGDLDRALPADTGLQKASADAELLGLLCQGVDIPLHVPDPKYRQDLVSQGGREVYPYPSPLHAVALQSPLFVLTKETPQRGGPSFPRESPRGPAGLNTIQTGPVLEAGPARARAYIDRLLHLWGRETPAKGSEGEQGPLRHAASPSPQRQGGWSTDGGGRLLVFAPGREDEGGPAQSRGAGRGGPQQQGYMPLEGPQQSGSLPEEGSKPSNSCVLRETMVQASPSSKAQQTPSAQDYGRGNIISPSRMLDKSPSPASGHFAHPSFAASLKMGPPKSKAEKIKRSPMDKVLRFARQPLLLLDRPEGAHAAPQPSLEWDPAHWPTGRGGLQRRPALAWEAPGRSCSESTLYPMPVLVPLAVAPQESHRTSAQALFPFEASLLTSVARRKHRRWQSTVEISARARLASCPESNLGPPRPVARRAGGPLARGRPSLVRQDAYTRSDSEPSKHSAECDPRFPSVIPETSEGESSDHTTNRFGDRESSSSDEEGGAQSRDCDLALGYVAAGHAELAWTQEAPVSSGPLLSPVPKLCRIKASKALKKKIRRFQPTALKVMTMV

SEQ ID NO: 19809 - protein, 604 aa, Homo sapiens
MGDWRPRSVDETTVPAWRPQATEEGARPPGSVEDAGQPWGTFWPRPVSTGDLDRALPADTGLQKASADAELLGLLCQGVDIPLHVPDPKYRQDLVSQGGREVYPYPSPLHAVALQSPLFVLTKETPQRGGPSFPRESPRGPAGLNTIQTGPVLEAGPARARAYIDRLLHLWGRETPAKGSEGEQGPLRHAASPSPQRQGGWSTDGGGRLLVFAPGREDEGGPAQSRGAGRGGPQQQGYMPLEGPQQSGSLPEEGSKPSNSCVLRETMVQASPSSKAQQTPSAQDYGRGNIISPSRMLDKSPSPASGHFAHPSFAASLKMGPPKSKAEKIKRSPMDKVLRFARQPLLLLDRPEGAHAAPQPSLEWDPAHWPTGRGGLQRRPALAWEAPGRSCSESTLYPMPVLVPLAVAPQESHRTSAQALFPFEASLLTSVARRKHRRWQSTVEISARARLASCPESNLGPPRPVARRAGGPLARGRPSLVRQDAYTRSDSEPSKHSAECDPRFPSVIPETSEGESSDHTTNRFGDRESSSSDEEGGAQSRDCDLALGYVAAGHAELAWTQEAPVSSGPLLSPVPKLCRIKASKALKKKIRRFQPTALKVMTMV

SEQ ID NO: 19810 - protein, 366 aa, Homo sapiens
MPLEGPQQSGSLPEEGSKPSNSCVLRETMVQASPSSKAQQTPSAQDYGRGNIISPSRMLDKSPSPASGHFAHPSFAASLKMGPPKSKAEKIKRSPMDKVLRFARQPLLLLDRPEGAHAAPQPSLEWDPAHWPTGRGGLQRRPALAWEAPGRSCSESTLYPMPVLVPLAVAPQESHRTSAQALFPFEASLLTSVARRKHRRWQSTVEISARARLASCPESNLGPPRPVARRAGGPLARGRPSLVRQDAYTRSDSEPSKHSAECDPRFPSVIPETSEGESSDHTTNRFGDRESSSSDEEGGAQSRDCDLALGYVAAGHAELAWTQEAPVSSGPLLSPVPKLCRIKASKALKKKIRRFQPTALKVMTMV

SEQ ID NO: 19811 - protein, 280 aa, Homo sapiens
MWTPGGPPGSAGWDRRRLGARLRAAFAGLQELQGLRATQQERVRGALALQPPPAPAAPCGPHGLHGPEQQLEAALAALQEQLSRLRQQDIGLKTHLDQLDLQISKLQLDVGTASGEALDSDSRPSSGFYEMSDGGSCSLSTSCASVCSDHISPSLGSLLPVAQAHKARPSMGDWRPRSVDETTVPAWRPQATEEGARPPGSVEDAGQPWGTFWPRPVSTELCNAPGELDMHAPPAGCTSSSLTGVGSGLRGKCGLCGCQLPFCSVNTSSKTKSSGISRQQ

SEQ ID NO: 19812 - protein, 725 aa, Homo sapiens
MHPEPSEPATGGAAELDCAQEPGVEESAGDHGSAGRGGCKEEINDPKEICVGSSDTSYHSQQKQSGDNGSGGHFAHPREDREDRGPRMTKSSLQKLCKQHKLYITPALNDTLYLHFKGFDRIENLEEYTGLRCLWLQSNGIQKIENLEAQTELRCLFLQMNLLRKIENLEPLQKLDALNLSNNYIKTIENLSCLPVLNTLQMAHNHLETVEDIQHLQECLRLCVLDLSHNKLSDPEILSILESMPDLRVLNLMGNPVIRQIPNYRRTVTVRLKHLTYLDDRPVFPKDRACAEAWARGGYAAEKEERQQWESRERKKITDSIEALAMIKQRAEERKRQRESQERGEMTSSDDGENVPASAEGKEEPPGDRETRQKMELFVKESFEAKDELCPEKPSGEEPPVEAKREDGGPEPEGTLPAETLLLSSPVEVKGEDGDGEPEGTLPAEAPPPPPPVEVKGEDGDQEPEGTLPAETLLLSPPVKVKGEDGDREPEGTLPAEAPPPPPLGAAREEPTPQAVATEGVFVTELDGTRTEDLETIRLETKETFCIDDLPDLEDDDETGKSLEDQNMCFPKIEVISSLSDDSDPELDYTSLPVLENLPTDTLSNIFAVSKDTSKAARVPFTDIFKKEAKRDLEIRKQDTKSPRPLIQELSDEDPSGQLLMPPTCQRDAAPLTSSGDRDSDFLAASSPVPTESAATPPETCVGVAQPSQALPTWDLTAFPAPKAS

SEQ ID NO: 19813 - protein, 489 aa, Homo sapiens
MGNPVIRQIPNYRRTVTVRLKHLTYLDDRPVFPKDRACAEAWARGGYAAEKEERQQWESRERKKITDSIEALAMIKQRAEERKRQRESQERGMRSAEDNSPRVPLRLGEMTSSDDGENVPASAEGKEEPPGDRETRQKMELFVKESFEAKDELCPEKPSGEEPPVEAKREDGGPEPEGTLPAETLLLSSPVEVKGEDGDGEPEGTLPAEAPPPPPPVEVKGEDGDQEPEGTLPAETLLLSPPVKVKGEDGDREPEGTLPAEAPPPPPLGAAREEPTPQAVATEGVFVTELDGTRTEDLETIRLETKETFCIDDLPDLEDDDETGKSLEDQNMCFPKIEVISSLSDDSDPELDYTSLPVLENLPTDTLSNIFAVSKDTSKAARVPFTDIFKKEAKRDLEIRKQDTKSPRPLIQELSDEDPSGQLLMPPTCQRDAAPLTSSGDRDSDFLAASSPVPTESAATPPETCVGVAQPSQALPTWDLTAFPAPKAS

SEQ ID NO: 19814 - protein, 418 aa, Homo sapiens
MHPEPSEPATGGAAELDCAQEPGVEESAGDHGSAGRGGCKEEINDPKEICVGSSDTSYHSQQKQSGDNGSGGHFAHPREDREDRGPRMTKSSLQKLCKQHKLYITPALNDTLYLHFKGFDRIENLEEYTGLRCLWLQSNGIQKIENLEAQTELRCLFLQMNLLRKIENLEPLQKLDALNLSNNYIKTIENLSCLPVLNTLQMAHNHLETVEDIQHLQECLRLCVLDLSHNKLSDPEILSILESMPDLRVLNLMGNPVIRQIPNYRRTVTVRLKHLTYLDDRPVFPKDRACAEAWARGGYAAEKEERQQWESRERKKITDSIEALAMIKQRAEERKRQRESQERGEMTSSDDGENVPASAEGKEEPPGDRETRQKMELFVKESFEAKDELCPEKPSGEEPPVEAKREDGDPATVTACEG

SEQ ID NO: 19815 - protein, 142 aa, Homo sapiens
MMWPMHTPLLLLTALMVAVAGSASAQSRTLAGGIHATDLNDKSVQCALDFAISEYNKVINKDEYYSRPLQVMAAYQQIVGGVNYYFNVKFGRTTCTKSQPNLDNCPFNDQPKLKEEEFCSFQINEVPWEDKISILNYKCRKV

SEQ ID NO: 19816 - protein, 339 aa, Homo sapiens
MLPSAVAAHAGAYWDVVASSALLNLPAAPGFGNLGKSFLIENLLRVGGAPTPRLQPPAPHDPATALATAGAQLRPLPASPVPLKLCPAAEQVSPAGAPYGTRWAFQVLSPSADSARLPGRAPGDRDCTFQPSAPAPSKPFLLSTPPFYSACCGGSCRRPASSTAFPREESMLPLLTQDSNSKARRGILRRAVFSEDQRKALEKMFQKQKYISKTDRKKLAINLGLKESQVKIWFQNRRMKWRNSKEKEVLSNRCIQEVGLQEDPLSRSALGFPSPCPSIWDVPQQHSSPRWRENSPEPSERLIQESSGAPPPEANSLQGALYLCSEEEAGSKGVLTGAV

SEQ ID NO: 19817 - protein, 463 aa, Homo sapiens
MAQQQTGSRKRKAPAVEADAESSPSQGLAAADGEGPLLLKRQRRPATYRSMAHYLKVREVGGWGPARLQGFDGELRGYAVQRLPELLTERQLELGTVNKVFASQWLNSRQVVCGTKCNTLFVVDVESGHIARIPLLRDSEARLAQDQQGCGIHAIELNPSKTLLATGGENPNSLAIYQLPSLDPLCLGDRHGHKDWIFAVAWLSDTVAVSGSRDGTVALWRMDPDKFDDTVAWHSEVGLPVYAHIRPRDVEAIPRAIINPSNRKVRALACGGKNQELGAVSLDGYFHLWKAGSALSRLLSIRLPYFRDNVCLTYCDDMSVYAVGSHSHVSFLDLRQDQQNIRPLCSREGGTGVRSLSFYRHIITVGTGQGSLLFYDVRAQKFLEERASATLESSSGPARRKLRLACGRGWLNHNDFWVNYFGGMEVFPNALYTHCYNWPEMKLFVAGGPLPAGLHGNYAGLWS

SEQ ID NO: 19818 - protein, 536 aa, Homo sapiens
MATRAQPGPLSQAGSAGVAALATVGVASGPGPGRPGPLQDETLGVASVPSQWRAVQGIRWETKSCQTASIATASASAQARNHVDAQVQTEAPVPVSVQPPSQYDIPRLAAFLRRVEAMVIRELNKNWQSHAFDGFEVNWTEQQQMVSCLYTLGYPPAQAQGLHVTSISWNSTGSVVACAYGRLDHGDWSTLKSFVCAWNLDRRDLRPQQPSAVVEVPSAVLCLAFHPTQPSHVAGGLYSGEVLVWDLSRLEDPLLWRTGLTDDTHTDPVSQVVWLPEPGHSHRFQVLSVATDGKVLLWQGIGVGQLQLTEGFALVMQQLPRSTKLKKHPRGETEVGATAVAFSSFDPRLFILGTEGGFPLKCSLAAGEAALTRMPSSVPLRAPAQFTFSPHGGPIYSVSCSPFHRNLFLSAGTDGHVHLYSMLQAPPLTSLQLSLKYLFAVRWSPVRPLVFAAASGKGDVQLFDLQKSSQKPTVLIKQTQDESPVYCLEFNSQQTQLLAAGDAQGTVKVWQLSTEFTEQGPREAEDLDCLAAEVAA

SEQ ID NO: 19819 - protein, 65 aa, Homo sapiens
MSEQNICNQKDKSTLPFCQAHLCEETTNRLCVSNKAVYSLECKWAESENRVSEGRWGRGCFIGVG

SEQ ID NO: 19820 - protein, 621 aa, Homo sapiens
MLLLPSAADGRGTAITHALTSASTLCQVEPVGRWFEAFVKRRNRNASASFQELEDKKELSEESEDEELQLEEFPMLKTLDPKDWKNQDHYAVLGLGHVRYKATQRQIKAAHKAMVLKHHPDKRKAAGEPIKEGDNDYFTCITKAYEMLSDPVKRRAFNSVDPTFDNSVPSKSEAKDNFFEVFTPVFERNSRWSNKKNVPKLGDMNSSFEDVDIFYSFWYNFDSWREFSYLDEEEKEKAECRDERRWIEKQNRATRAQRKKEEMNRIRTLVDNAYSCDPRIKKFKEEEKAKKEAEKKAKAEAKRKEQEAKEKQRQAELEAARLAKEKEEEEVRQQALLAKKEKDIQKKAIKKERQKLRNSCKTWNHFSDNEAERVKMMEEVEKLCDRLELASLQCLNETLTSCTKEVGKAALEKQIEEINEQIRKEKEEAEARMRQASKNTEKSTGGGGNGSKNWSEDDLQLLIKAVNLFPAGTNSRWEVIANYMNIHSSSGVKRTAKDVIGKAKSLQKLDPHQKDDINKKAFDKFKKEHGVVPQADNATPSERFEGPYTDFTPWTTEEQKLLEQALKTYPVNTPERWEKIAEAVPGRTKKDCMKRYKELVEMVKAKKAAQEQVLNASRAKK

SEQ ID NO: 19821 - protein, 568 aa, Homo sapiens
MLLLPSAADGRGTAITHALTSASTLCQVEPVGRWFEAFVKRRNRNASASFQELEDKKELSEESEDEELQLEEFPMLKTLDPKDWKNQDHYAVLGLGHVRYKATQRQIKAAHKAMVLKHHPDKRKAAGEPIKEGDNDYFTCITKAYEMLSDPVKRRAFNSVDPTFDNSVPSKSEAKDNFFEVFTPVFERNSRWSNKKNVPKLGDMNSSFEDVDIFYSFWYNFDSWREFSYLDEEEKEKAECRDERRWIEKQNRATRAQRKKEEMNRIRTLVDNAYSCDPRIKKFKEEEKAKKEAEKKAKAEAKRKEQEAKEKQRQAELEAARLAKEKEEEEVRQQALLAKKEKDIQKKAIKKERQKLRNSCKIEEINEQIRKEKEEAEARMRQASKNTEKSTGGGGNGSKNWSEDDLQLLIKAVNLFPAGTNSRWEVIANYMNIHSSSGVKRTAKDVIGKAKSLQKLDPHQKDDINKKAFDKFKKEHGVVPQADNATPSERFEGPYTDFTPWTTEEQKLLEQALKTYPVNTPERWEKIAEAVPGRTKKDCMKRYKELVEMVKAKKAAQEQVLNASRAKK

SEQ ID NO: 19822 - protein, 261 aa, Homo sapiens
MGHEQNQGAALLQMLPLLWLLPHSWAVPEAPTPMWPDDLQNHTFLHTVYCQDGSPSVGLSEAYDEDQLFFFDFSQNTRVPRLPEFADWAQEQGDAPAILFDKEFCEWMIQQIGPKLDGKIPVSRGFPIAEVFTLKPLEFGKPNTLVCFVSNLFPPMLTVNWHDHSVPVEGFGPTFVSAVDGLSFQAFSYLNFTPEPSDIFSCIVTHEIDRYTAIAYWVPRNALPSDLLENVLCGVAFGLGVLGIIVGIVLIIYFRKPCSGD

SEQ ID NO: 19823 - protein, 513 aa, Homo sapiens
MKISILLMFLWGLSCALPVTRYQNNESEDSEEWKGHLAQAPTPPLESSESSEGSKVSSEEQANEDPSDSTQSEEGLGSDDHQYIYRLAGGFSRSTGKGGDDKDDDEDDSGDDTFGDDDSGPGPKDRQEGGNSRLGSDEDSDDTIQASEESAPQGQDSAQDTTSESRELDNEDRVDSKPEGGDSTQESESEEHWVGGGSDGESSHGDGSELDDEGMQSDDPESIRSERGNSRMNSAGMKSKESGENSEQANTQDSGGSQLLEHPSRKIFRKSRISEEDDRSELDDNNTMEEVKSDSTENSNSRDTGLSQPRRDSKGDSQEDSKENLSQEESQNVDGPSSESSQEANLSSQENSSESQEEVVSESRGDNPDPTTSYVEDQEDSDSSEEDSSHTLSHSKSESREEQADSESSESLNFSEESPESPEDENSSSQEGLQSHSSSAESQSEESHSEEDDSDSQDSSRSKEDSNSTESKSSSEEDGQLKNIEIESRKLTVDAYHNKPIGDQDDNDCQDGY

SEQ ID NO: 19824 - protein, 497 aa, Homo sapiens
MKISILLMFLWGLSCALPVTRYQNNESEDSEEWKGHLAQAPTPPLANEDPSDSTQSEEGLGSDDHQYIYRLAGGFSRSTGKGGDDKDDDEDDSGDDTFGDDDSGPGPKDRQEGGNSRLGSDEDSDDTIQASEESAPQGQDSAQDTTSESRELDNEDRVDSKPEGGDSTQESESEEHWVGGGSDGESSHGDGSELDDEGMQSDDPESIRSERGNSRMNSAGMKSKESGENSEQANTQDSGGSQLLEHPSRKIFRKSRISEEDDRSELDDNNTMEEVKSDSTENSNSRDTGLSQPRRDSKGDSQEDSKENLSQEESQNVDGPSSESSQEANLSSQENSSESQEEVVSESRGDNPDPTTSYVEDQEDSDSSEEDSSHTLSHSKSESREEQADSESSESLNFSEESPESPEDENSSSQEGLQSHSSSAESQSEESHSEEDDSDSQDSSRSKEDSNSTESKSSSEEDGQLKNIEIESRKLTVDAYHNKPIGDQDDNDCQDGY

SEQ ID NO: 19825 - protein, 919 aa, Homo sapiens
MQRSIMSFFHPKKEGKAKKPEKEASNSSRETEPPPKAALKEWNGVVSESDSPVKRPGRKAARVLGSEGEEEDEALSPAKGQKPALDCSQVSPPRPATSPENNASLSDTSPMDSSPSGIPKRRTARKQLPKRTIQEVLEEQSEDEDREAKRKKEEEEEETPKESLTEAEVATEKEGEDGDQPTTPPKPLKTSKAETPTESVSEPEVATKQELQEEEEQTKPPRRAPKTLSSFFTPRKPAVKKEVKEEEPGAPGKEGAAEGPLDPSGYNPAKNNYHPVEDACWKPGQKVPYLAVARTFEKIEEVSARLRMVETLSNLLRSVVALSPPDLLPVLYLSLNHLGPPQQGLELGVGDGVLLKAVAQATGRQLESVRAEAAEKGDVGLVAENSRSTQRLMLPPPPLTASGVFSKFRDIARLTGSASTAKKIDIIKGLFVACRHSEARFIARSLSGRLRLGLAEQSVLAALSQAVSLTPPGQEFPPAMVDAGKGKTAEARKTWLEEQGMILKQTFCEVPDLDRIIPVLLEHGLERLPEHCKLSPGIPLKPMLAHPTRGISEVLKRFEEAAFTCEYKYDGQRAQIHALEGGEVKIFSRNQEDNTGKYPDIISRIPKIKLPSVTSFILDTEAVAWDREKKQIQPFQVLTTRKRKEVDASEIQVQVCLYAFDLIYLNGESLVREPLSRRRQLLRENFVETEGEFVFATSLDTKDIEQIAEFLEQSVKDSCEGLMVKTLDVDATYEIAKRSHNWLKLKKDYLDGVGDTLDLVVIGAYLGRGKRAGRYGGFLLASYDEDSEELQAICKLGTGFSDEELEEHHQSLKALVLPSPRPYVRIDGAVIPDHWLDPSAVWEVKCADLSLSPIYPAARGLVDSDKGISLRFPRFIRVREDKQPEQATTSAQVACLYRKQSQIQNQQGEDSGSDPEDTY

SEQ ID NO: 19826 - protein, 801 aa, Homo sapiens
MQRSIMSFFHPKKEGKAKKPEKEASNSSRETEPPPKAALKEWNGVVSESDSPVKRPGRKAARVLGSEGEEEDEALSPAKGQKPALDCSQVSPPRPATSPENNASLSDTSPMDSSPSGIPKRRTARKQLPKRTIQEVLEEQSEDEDREAKRKKEEEEEETPKESLTEAEVATEKEGEDGDQPTTPPKPLKTSKAETPTESVSEPEVATKQELQEEEEQTKPPRRAPKTLSSFFTPRKPAVKKEVKEEEPGAPGKEGAAEGPLDPSGYNPAKNNYHPVEDACWKPGQKVPYLAVARTFEKIEEVSARLRMVETLSNLLRSVVALSPPDLLPVLYLSLNHLGPPQQGLELGVGDGVLLKAVAQATGRQLESVRAEAAEKGDVGLVAENSRSTQRLMLPPPPLTASGVFSKFRDIARLTGSASTAKKIDIIKGLFVACRHSEARFIARSLSGRLRLGLAEQSVLAALSQAVSLTPPGQEFPPAMVDAGKGKTAEARKTWLEEQGMILKQTFCEVPDLDRIIPVLLEHGLERLPEHCKLSPGIPLKPMLAHPTRGISEVLKRFEEAAFTCEYKYDGQRAQIHALEGGEVKIFSRNQEDNTGKYPDIISRIPKIKLPSVTSFILDTEAVAWDREKKQIQPFQVLTTRKRKEVDASEIQVQVCLYAFDLIYLNGESLVREPLSRRRQLLRENFVETEGEFVFATSLDTKDIEQIAEFLEQSVKDSCEGLMVKTLDVDATYEIAKRSHNWLKLKKDYLDGVGDTLDLVVIGAYLGRGKRAGRYGGFLLASYDEDSEELQAICKVLGNWG

SEQ ID NO: 19827 - protein, 888 aa, Homo sapiens
MQRSIMAALKEWNGVVSESDSPVKRPGRKAARVLGSEGEEEDEALSPAKGQKPALDCSQVSPPRPATSPENNASLSDTSPMDSSPSGIPKRRTARKQLPKRTIQEVLEEQSEDEDREAKRKKEEEEETPKESLTEAEVATEKEGEDGDQPTTPPKPLKTSKAETPTESVSEPEVATKQELQEEEEQTKPPRRAPKTLSSFFTPRKPAVKKEVKEEEPGAPGKEGAAEGPLDPSGYNPAKNNYHPVEDACWKPGQKVPYLAVARTFEKIEEVSARLRMVETLSNLLRSVVALSPPDLLPVLYLSLNHLGPPQQGLELGVGDGVLLKAVAQATGRQLESVRAEAAEKGDVGLVAENSRSTQRLMLPPPPLTASGVFSKFRDIARLTGSASTAKKIDIIKGLFVACRHSEARFIARSLSGRLRLGLAEQSVLAALSQAVSLTPPGQEFPPAMVDAGKGKTAEARKTWLEEQGMILKQTFCEVPDLDRIIPVLLEHGLERLPEHCKLSPGIPLKPMLAHPTRGISEVLKRFEEAAFTCEYKYDGQRAQIHALEGGEVKIFSRNQEDNTGKYPDIISRIPKIKLPSVTSFILDTEAVAWDREKKQIQPFQVLTTRKRKEVDASEIQVQVCLYAFDLIYLNGESLVREPLSRRRQLLRENFVETEGEFVFATSLDTKDIEQIAEFLEQSVKDSCEGLMVKTLDVDATYEIAKRSHNWLKLKKDYLDGVGDTLDLVVIGAYLGRGKRAGRYGGFLLASYDEDSEELQAICKLGTGFSDEELEEHHQSLKALVLPSPRPYVRIDGAVIPDHWLDPSAVWEVKCADLSLSPIYPAARGLVDSDKGISLRFPRFIRVREDKQPEQATTSAQVACLYRKQSQIQNQQGEDSGSDPEDTY

SEQ ID NO: 19828 - protein, 1845 aa, Homo sapiens
MAAAAASASQDELNQLERVFLRLGHAETDEQLQNIISKFLPPVLLKLSSTQEGVRKKVMELLVHLNKRIKSRPKIQLPVETLLVQYQDPAAVSFVTNFTIIYVKMGYPRLPVEKQCELAPTLLTAMEGKPQPQQDSLMHLLIPTLFHMKYPVESSKSASPFNLAEKPKTVQLLLDFMLDVLLMPYGYVLNESQSRQNSSSAQGSSSNSGGGSGIPQPPPGMSFYAAKRVIGDNPWTPEQLEQCKLGIVKFIEAEQVPELEAVLHLVIASSDTRHSVATAADLELKSKQSLIDWNNPAIINKMYKVYLGDIPLKTKEGAVLKPELKRDPVSTRVKLKIVPHLLRSRQAAETFPANIQVVYDGLFGTNTNSKLRTLSLQFVHHICITCPEIKIKPLGPMLLNGLTKLINEYKEDPKLLSMAYSAVGKLSSRMPHLFTKDIALVQQLFEALCKEEPETRLAIQEALSMMVGAYSTLEGAQRTLMEALVASYLIKPEVQVRQVAVKFASTVFPSDHIPSRYLLLLAAGDPREEVHGEAQRVLRCLPGRNRKESTSEQMPSFPEMVYYIQEKASHRMKTPVKYMTGTTVLPFNPAAFGEIVLYLRMCLAHSAGVVPTSQSLADMQDHAPAIGRYIRTLMSSGQMAPSSSNKSGETNPVQIYIGLLQQLLAGVGGLPVMYCLLEAVSVYPEKLATKFVDKTEWIKSLMNNSKEEMRELAALFYSVVVSTVSGNELKSMIEQLIKTTKDNHSPEIQHGSLLALGFTVGRYLAKKKMRMSEQQDLERNADTLPDQEELIQSATETIGSFLDSTSPLLAIAACTALGEIGRNGPLPIPSEGSGFTKLHLVESLLSRIPSSKETNKMKERAIQTLGYFPVGDGDFPHQKLLLQGLMDSVEAKQIELQFTIGEAITSAAIGTSSVAARDAWQMTEEEYTPPAGAKVNDVVPWVLDVILNKHIISPNPHVRQAACIWLLSLVRKLSTHKEVKSHLKEIQSAFVSVLSENDELSQDVASKGLGLVYELGNEQDQQELVSTLVETLMTGKRVKHEVSGETVVFQGGALGKTPDGQGLSTYKELCSLASDLSQPDLVYKFMNLANHHAMWNSRKGAAFGFNVIATRAGEQLAPFLPQLVPRLYRYQFDPNLGIRQAMTSIWNALVTDKSMVDKYLKEILQDLVKNLTSNMWRVRESSCLALNDLLRGRPLDDIIDKLPEIWETLFRVQDDIKESVRKAAELALKTLSKVCVKMCDPAKGAAGQRTIAALLPCLLDKGMMSTVTEVRALSINTLVKISKSAGAMLKPHAPKLIPALLESLSVLEPQVLNYLSLRATEQEKAAMDSARLSAAKSSPMMETINMCLQYLDVSVLGELVPRLCELIRSGVGLGTKGGCASVIVSLTTQCPQDLTPYSGKLMSALLSGLTDRNSVIQKSCAFAMGHLVRTSRDSSTEKLLQKLNGWYMEKEEPIYKTSCALTIHAIGRYSPDVLKNHAKEVLPLAFLGMHEIADEEKSEKEECNLWTEVWQENVPGSFGGIRLYLQELITITQKALQSQSWKMKAQGAIAMASIAKQTSSLVPPYLGMILTALLQGLAGRTWAGKEELLKAIACVVTACSAELEKSVPNQPSTNEILQAVLKECSKENVKYKIVAISCAADILKATKEDRFQEFSNIVIPLIKKNSLESSGVRTTKNEEENEKEKELQLEYLLGAFESLGKAWPRNAETQRCYRQELCKLMCERLKLSTWKVQLGVLQSMNAFFQGLMLLEEEHADPEALAEILLETCKSITYSLENKTYSSVRTEALSVIELLLKKLEESKQWECLTSECRVLLIESLATMEPDSRPELQEKAALLKKTLENLE

SEQ ID NO: 19829 - protein, 188 aa, Homo sapiens
MAETSLPELGGEDKATPCPSILELEELLRAGKSSCSRVDEVWPNLFIGDAATANNRFELWKLGITHVLNAAHKGLYCQGGPDFYGSSVSYLGVPAHDLPDFDISAYFSSAADFIHRALNTPGAKVLVHCVVGVSRSATLVLAYLMLHQRLSLRQAVITVRQHRWVFPNRGFLHQLCRLDQQLRGAGQS

SEQ ID NO: 19830 - protein, 60 aa, Homo sapiens
MAETSLPELGGEDKATPCPSILELEELLRAGKSSCSRVDEVWPNLFIGDANSIKCAETGG

SEQ ID NO: 19831 - protein, 67 aa, Homo sapiens
MAETSLPELGGEDKATPCPSILELEELLRAGKSSCSRVDEVWPNLFIGDAAGPYSLPWGSATLPPWH

SEQ ID NO: 19832 - protein, 92 aa, Homo sapiens
MAETSLPELGGEDKATPCPSILELEELLRAGKSSCSRVDEVWPNLFIGDARGPGTASLLVPWLGRHQVPFLPSPGPRQTTALSCGSWASPTC

SEQ ID NO: 19833 - protein, 166 aa, Homo sapiens
MAETSLPELGGEDKATPCPSILELEELLRAGKSSCSRVDEVWPNLFIGDAATANNRFELWKLGITHVLNAAHKGLYCQGGPDFYGSSVSYLGVPAHDLPDFDISAYFSSAADFIHRALNTPGELVLTPCHGALPLCHPGTDPAGAAGGSGPGGHTEDGGSPAWGRP

SEQ ID NO: 19834 - protein, 190 aa, Homo sapiens
MTASASSFSSSQGVQQPSIYSFSQITRSLFLSNGVAANDKLLLSSNRITAIVNASVEVVNVFFEGIQYIKVPVTDARDSRLYDFFDPIADLIHTIDMRQGRTLLHCMAGVSRSASLCLAYLMKYHSMSLLDAHTWTKSRRPIIRPNNGFWEQLINYEFKLFNNNTVRMINSPVGNIPDIYEKDLRMMISM

SEQ ID NO: 19835 - protein, 400 aa, Homo sapiens
MVRPLNPRPLPPVVLMLLLLLPPSPLPLAAGDPLPTESRLMNSCLQARRKCQADPTCSAAYHHLDSCTSSISTPLPSEEPSVPADCLEAAQQLRNSSLIGCMCHRRMKNQVACLDIYWTVHRARSLGNYELDVSPYEDTVTSKPWKMNLSKLNMLKPDSDLCLKFAMLCTLNDKCDRLRKAYGEACSGPHCQRHVCLRQLLTFFEKAAEPHAQGLLLCPCAPNDRGCGERRRNTIAPNCALPPVAPNCLELRRLCFSDPLCRSRLVDFQTHCHPMDILGTCATEQSRCLRAYLGLIGTAMTPNFVSNVNTSVALSCTCRGSGNLQEECEMLEGFFSHNPCLTEAIAAKMRFHSQLFSQDWPHPTFAVMAHQNENPAVRPQPWVPSLFSCTLPLILLLSLW

SEQ ID NO: 19836 - protein, 369 aa, Homo sapiens
MVRPLNPRPLPPVVLMLLLLLPPSPLPLAAGDPLPTESRLMNSCLQARRKCQADPTCSAAYHHLDSCTSSISTPLPSEEPSVPADCLEAAQQLRNSSLIGCMCHRRMKNQVACLDIYWTVHRARSLDSDLCLKFAMLCTLNDKCDRLRKAYGEACSGPHCQRHVCLRQLLTFFEKAAEPHAQGLLLCPCAPNDRGCGERRRNTIAPNCALPPVAPNCLELRRLCFSDPLCRSRLVDFQTHCHPMDILGTCATEQSRCLRAYLGLIGTAMTPNFVSNVNTSVALSCTCRGSGNLQEECEMLEGFFSHNPCLTEAIAAKMRFHSQLFSQDWPHPTFAVMAHQNENPAVRPQPWVPSLFSCTLPLILLLSLW

SEQ ID NO: 19837 - protein, 453 aa, Homo sapiens
MKIFKCYFKHTLQQKVFILFLTLWLLSLLKLLNVRRLFPQKDIYLVEYSLSTSPFVRNRYTHVKDEVRYEVNCSGIYEQEPLEIGKSLEIRRRDIIDLEDDDVVAMTSDCDIYQTLRGYAQKLVSKEEKSFPIAYSLVVHKDAIMVERLIHAIYNQHNIYCIHYDRKAPDTFKVAMNNLAKCFSNIFIASKLEAVEYAHISRLQADLNCLSDLLKSSIQWKYVINLCGQDFPLKSNFELVSELKKLNGANMLETVKPPNSKLERFTYHHELRRVPYEYVKLPIRTNISKEAPPHNIQIFVGSAYFVLSQAFVKYIFNNSIVQDFFAWSKDTYSPDEHFWATLIRVPGIPGEISRSAQDVSDLQSKTRLVKWNYYEGFFYPSCTGSHLRSVCIYGAAELRWLIKDGHWFANKFDSKVDPILIKCLAEKLEEQQRDWITLPSEKLFMDRNLTTTS

SEQ ID NO: 19838 - protein, 601 aa, Homo sapiens
MLTRKPSAAAPAAYPTGRGGDSAVRQLQASPGLGAGATRSGVGTGPPSPIALPPLRASNAAAAAHTIGGSKHTMNDHLHVGSHAHGQIQVQQLFEDNSNKRTVLTTQPNGLTTVGKTGLPVVPERQLDSIHRRQGSSTSLKSMEGMGKVKATPMTPEQAMKQYMQKLTAFEHHEIFSYPEIYFLGLNAKKRQGMTGGPNNGGYDDDQGSYVQVPHDHVAYRYEVLKVIGKGSFGQVVKAYDHKVHQHVALKMVRNEKRFHRQAAEEIRILEHLRKQDKDNTMNVIHMLENFTFRNHICMTFELLSMNLYELIKKNKFQGFSLPLVRKFAHSILQCLDALHKNRIIHCDLKPENILLKQQGRSGIKVIDFGSSCYEHQRVYTYIQSRFYRAPEVILGARYGMPIDMWSLGCILAELLTGYPLLPGEDEGDQLACMIELLGMPSQKLLDASKRAKNFVSSKGYPRYCTVTTLSDGSVVLNGGRSRRGKLRGPPESREWGNALKGCDDPLFLDFLKQCLEWDPAVRMTPGQALRHPWLRRRLPKPPTGEKTSVKRITESTGAITSISKLPPPSSSASKLRTNLAQMTDANGNIQQRTVLPKLVS

SEQ ID NO: 19839 - protein, 528 aa, Homo sapiens
MNDHLHVGSHAHGQIQVQQLFEDNSNKRTVLTTQPNGLTTVGKTGLPVVPERQLDSIHRRQGSSTSLKSMEGMGKVKATPMTPEQAMKQYMQKLTAFEHHEIFSYPEIYFLGLNAKKRQGMTGGPNNGGYDDDQGSYVQVPHDHVAYRYEVLKVIGKGSFGQVVKAYDHKVHQHVALKMVRNEKRFHRQAAEEIRILEHLRKQDKDNTMNVIHMLENFTFRNHICMTFELLSMNLYELIKKNKFQGFSLPLVRKFAHSILQCLDALHKNRIIHCDLKPENILLKQQGRSGIKVIDFGSSCYEHQRVYTYIQSRFYRAPEVILGARYGMPIDMWSLGCILAELLTGYPLLPGEDEGDQLACMIELLGMPSQKLLDASKRAKNFVSSKGYPRYCTVTTLSDGSVVLNGGRSRRGKLRGPPESREWGNALKGCDDPLFLDFLKQCLEWDPAVRMTPGQALRHPWLRRRLPKPPTGEKTSVKRITESTGAITSISKLPPPSSSASKLRTNLAQMTDANGNIQQRTVLPKLVS

SEQ ID NO: 19840 - protein, 564 aa, Homo sapiens
MLANSASVRILIKGGKVVNDDCTHEADVYIENGIIQQVGRELMIPGGAKVIDATGKLVIPGGIDTSTHFHQTFMNATCVDDFYHGTKAALVGGTTMIIGHVLPDKETSLVDAYEKCRGLADPKVCCDYALHVGITWWAPKVKAEMETLVREKGVNSFQMFMTYKDLYMLRDSELYQVLHACKDIGAIARVHAENGELVAEGAKEALDLGITGPEGIEISRPEELEAEATHRVITIANRTHCPIYLVNVSSISAGDVIAAAKMQGKVVLAETTTAHATLTGLHYYHQDWSHAAAYVTVPPLRLDTNTSTYLMSLLANDTLNIVASDHRPFTTKQKAMGKEDFTKIPHGVSGVQDRMSVIWERGVVGGKMDENRFVAVTSSNAAKLLNLYPRKGRIIPGADADVVVWDPEATKTISASTQVQGGDFNLYENMRCHGVPLVTISRGRVVYENGVFMCAEGTGKFCPLRSFPDTVYKKLVQREKTLKVRGVDRTPYLGDVAVVVHPGKKEMGTPLADTPTRPVTRHGGMRDLHESSFSLSGSQIDDHVPKRASARILAPPGGRSSGIW

SEQ ID NO: 19841 - protein, 34 aa, Homo sapiens
MLKMSGWQRQSQNQSWNLRRECSRRKCIFIHHHT

SEQ ID NO: 19842 - protein, 485 aa, Homo sapiens
MRSRVAVRACHKVCRCLLSGFGGRVDAGQPELLTERSSPKGGHVKSHAELEGNGEHPEAPGSGEGSEALLEICQRRHFLSGSKQQLSRDSLLSGCHPGFGPLGVELRKNLAAEWWTSVVVFREQVFPVDALHHKPGPLLPGDSAFRLVSAETLREILQDKELSKEQLVAFLENVLKTSGKLRENLLHGALEHYVNCLDLVNKRLPYGLAQIGVCFHPVFDTKQIRNGVKSIGEKTEASLVWFTPPRTSNQWLDFWLRHRLQWWRKFAMSPSNFSSSDCQDEEGRKGNKLYYNFPWGKELIETLWNLGDHELLHMYPGNVSKLHGRDGRKNVVPCVLSVNGDLDRGMLAYLYDSFQLTENSFTRKKNLHRKVLKLHPCLAPIKVALDVGRGPTLELRQVCQGLFNELLENGISVWPGYLETMQSSLEQLYSKYDEMSILFTVLVTETTLENGLIHLRSRDTTMKEMMHISKLKDFLIKYISSAKNV

SEQ ID NO: 19843 - protein, 225 aa, Homo sapiens
MLGLDACELGAQLLELLRLALCARVLLADKEGGPPAVDEVLDEAVPEYRAPGRKSLLEIRQLDPDDRSLAKYKRVLLGPLPPAVDPSLPNVQVTRLTLLSEQAPGPVVMDLTGDLAVLKDQVFVLKEGVDYRVKISFKVHREIVSGLKCLHHTYRRGLRVDKTVYMVGSYGPSAQEYEFVTPVEEAPRGALVRGPYLVVSLFTDDDRTHHLSWEWGLCICQDWKD

SEQ ID NO: 19844 - protein, 572 aa, Homo sapiens
MSFQGKKSIPRITSDRLLIRGGRIVNDDQSFYADVHVEDGLIKQIGENLIVPGGIKTIDAHGLMVLPGGVDVHTRLQMPVLGMTPADDFCQGTKAALAGGTTMILDHVFPDTGVSLLAAYEQWRERADSAACCDYSLHVDITRWHESIKEELEALVKEKGVNSFLVFMAYKDRCQCSDSQMYEIFSIIRDLGALAQVHAENGDIVEEEQKRLLELGITGPEGHVLSHPEEVEAEAVYRAVTIAKQANCPLYVTKVMSKGAADAIAQAKRRGVVVFGEPITASLGTDGSHYWSKNWAKAAAFVTSPPVNPDPTTADHLTCLLSSGDLQVTGSAHCTFTTAQKAVGKDNFALIPEGTNGIEERMSMVWEKCVASGKMDENEFVAVTSTNAAKIFNFYPRKGRVAVGSDADLVIWNPKATKIISAKTHNLNVEYNIFEGVECRGAPAVVISQGRVALEDGKMFVTPGAGRFVPRKTFPDFVYKRIKARNRLAEIHGVPRGLYDGPVHEVMVPAKPGSGAPARASCPGKISVPPVRNLHQSGFSLSGSQADDHIARRTAQKIMAPPGGRSNITSLS

SEQ ID NO: 19845 - protein, 351 aa, Homo sapiens
MLETLRERLLSVQQDFTSGLKTLSDKSREAKVKSKPRTVPFLPKYSAGLELLSRYEDTWAALHRRAKDCASAGELVDSEVVMLSAHWEKKKTSLVELQEQLQQLPALIADLESMTANLTHLEASFEEVENNLLHLEDLCGQCELERCKHMQSQQLENYKKNKRKELETFKAELDAEHAQKVLEMEHTQQMKLKERQKFFEEAFQQDMEQYLSTGYLQIAERREPIGSMSSMEVNVDMLEQMDLMDISDQEALDVFLNSGGEENTVLSPALGPESSTCQNEITLQVPNPSELRAKPPSSSSTCTDSATRDISEGGESPVVQSDEEEVQVDTALATSHTDREATPDGGEDSDS

SEQ ID NO: 19846 - protein, 303 aa, Homo sapiens
MLETLRERLLSVQQDFTSGLKTLSDKSREAKVKSKPRTVPFLPKYSAGLELLSRYEDTWAALHRRAKDCASAGELVDSEVVMLSAHWEKKKTSLVELQEQLQQLPALIADLESMTANLTHLEASFEEVENNLLHLEDLCGQCELERCKHMQSQQLENYKKNKRKELETFKAELDAEHAQKVLEMEHTQQMKLKERQKFFEEAFQQDMEQYLSTGYLQIAERREPIGSMSSMEVNVDMLEQMDLMDISDQEALDVFLNSGGEENTVLSPALGRVDKLALAEPGQYRCHSPPKVRRENHLPVTYA

SEQ ID NO: 19847 - protein, 270 aa, Homo sapiens
MLSAHWEKKKTSLVELQEQLQQLPALIADLESMTANLTHLEASFEEVENNLLHLEDLCGQCELERCKHMQSQQLENYKKNKRKELETFKAELDAEHAQKVLEMEHTQQMKLKERQKFFEEAFQQDMEQYLSTGYLQIAERREPIGSMSSMEVNVDMLEQMDLMDISDQEALDVFLNSGGEENTVLSPALGPESSTCQNEITLQVPNPSELRAKPPSSSSTCTDSATRDISEGGESPVVQSDEEEVQVDTALATSHTDREATPDGGEDSDS

SEQ ID NO: 19848 - protein, 384 aa, Homo sapiens
MKVTSLDGRQLRKMLRKEAAARCVVLDCRPYLAFAASNVRGSLNVNLNSVVLRRARGGAVSARYVLPDEAARARLLQEGGGGVAAVVVLDQGSRHWQKLREESAARVVLTSLLACLPAGPRVYFLKGGYETFYSEYPECCVDVKPISQEKIESERALISQCGKPVVNVSYRPAYDQGGPVEILPFLYLGSAYHASKCEFLANLHITALLNVSRRTSEACATHLHYKWIPVEDSHTADISSHFQEAIDFIDCVREKGGKVLVHCEAGISRSPTICMAYLMKTKQFRLKEAFDYIKQRRSMVSPNFGFMGQLLQYESEILPSTPNPQPPSCQGEAAGSSLIGHLQTLSPDMQGAYCTFPASVLAPVPTHSTVSELSRSPVATATSC

SEQ ID NO: 19849 - protein, 394 aa, Homo sapiens
MVTMEELREMDCSVLKRLMNRDENGGGAGGSGSHGTLGLPSGGKCLLLDCRPFLAHSAGYILGSVNVRCNTIVRRRAKGSVSLEQILPAEEEVRARLRSGLYSAVIVYDERSPRAESLREDSTVSLVVQALRRNAERTDICLLKGGYERFSSEYPEFCSKTKALAAIPPPVPPSATEPLDLGCSSCGTPLHDQGGPVEILPFLYLGSAYHAARRDMLDALGITALLNVSSDCPNHFEGHYQYKCIPVEDNHKADISSWFMEAIEYIDAVKDCRGRVLVHCQAGISRSATICLAYLMMKKRVRLEEAFEFVKQRRSIISPNFSFMGQLLQFESQVLATSCAAEAASPSGPLRERGKTPATPTSQFVFSFPVSVGVHSAPSSLPYLHSPITTSPSC

SEQ ID NO: 19850 - protein, 303 aa, Homo sapiens
MGRKVHSNGSQFAEHSRSPRRTGRDCKPVRAPSMALGVSQLAGRSRCLCSESQGGYERFSSEYPEFCSKTKALAAIPPPVPPSATEPLDLGCSSCGTPLHDQGGPVEILPFLYLGSAYHAARRDMLDALGITALLNVSSDCPNHFEGHYQYKCIPVEDNHKADISSWFMEAIEYIDAVKDCRGRVLVHCQAGISRSATICLAYLMMKKRVRLEEAFEFVKQRRSIISPNFSFMGQLLQFESQVLATSCAAEAASPSGPLRERGKTPATPTSQFVFSFPVSVGVHSAPSSLPYLHSPITTSPSC

SEQ ID NO: 19851 - protein, 384 aa, Homo sapiens
MEGLGRSCLWLRRELSPPRPRLLLLDCRSRELYESARIGGALSVALPALLLRRLRRGSLSVRALLPGPPLQPPPPAPVLLYDQGGGRRRRGEAEAEAEEWEAESVLGTLLQKLREEGYLAYYLQGGFSRFQAECPHLCETSLAGRAGSSMAPVPGPVPVVGLGSLCLGSDCSDAESEADRDSMSCGLDSEGATPPPVGLRASFPVQILPNLYLGSARDSANLESLAKLGIRYILNVTPNLPNFFEKNGDFHYKQIPISDHWSQNLSRFFPEAIEFIDEALSQNCGVLVHCLAGVSRSVTVTVAYLMQKLHLSLNDAYDLVKRKKSNISPNFNFMGQLLDFERSLRLEERHSQEQGSGGQASAASNPPSFFTTPTSDGAFELAPT

SEQ ID NO: 19852 - protein, 578 aa, Homo sapiens
MDPDKQDALNSIENSIYRTAFKLQSVQTLCQLDLIDSSLIQQVLLRPSFWEARKHSLSVQQLSQALQELFQKAREENPGQVHPRAPELTLSLLTTMYNSKGTGFLQLMPAAAALITLSGDSPLSKYRALFQLYAENSRGGYDSGPRMTRRVLRKLLTDLQQIPTFVGESRALCPVESATRSCFQGVLSPAIKEEKFLSWVQSEPPILLWLPTCHRLSAAERVTHPARCTLCRTFPITGLRYRCLKCLNFDICQMCFLSGLHSKSHQKSHPVIEHCIQMSAMQNTKLLFRTLRNNLLQGRCRKKEAARRQQLLDQVNPKGVPHHAQARLLKKQLNQYKDKLQAIYTSQEERICRFETRIHKLKTNQDSLWTKLQQIRRDLQARLQPPGPSSSSFQNVGNKVDHSSTEKVPKGGDYLQIKNATEDASTGEPLPKLDEVDRSHRSHTNAEHALRNPESPETTLHSTRAQSQTQKMPQKVISALPSYQEGLKQDIPKMVPAEMSSPALAAVEKKEAGNIKERKDELEEEELQELLSKLMDAFNLETPSGPESSVNMDLYSGAQRVCRAFSALVDQIALPNLK

SEQ ID NO: 19853 - protein, 667 aa, Homo sapiens
MIHELLLALSGYPGSIFTWNKRSGLQVSQDFPFLHPSETSVLNRLCRLGTDYIRFTEFIEQYTGHVQQQDHHPSQQGQGGLHGIYLRAFCTGLDSVLQPYRQALLDLEQEFLGDPHLSISHVNYFLDQFQLLFPSVMVVVEQIKSQKIHGCQILETVYKHSCGGLPPVRSALEKILAVCHGVMYKQLSAWMLHGLLLDQHEEFFIKQGPSSGNVSAQPEEDEEDLGIGGLTGKQLRELQDLRLIEEENMLAPSLKQFSLRVEILPSYIPVRVAEKILFVGESVQMFENQNVNLTRKGSILKNQEDTFAAELHRLKQQPLFSLVDFEQVVDRIRSTVAEHLWKLMVEESDLLGQLKIIKDFYLLGRGELFQAFIDTAQHMLKTPPTAVTEHDVNVAFQQSAHKVLLDDDNLLPLLHLTIEYHGKEHKADATQAREGPSRETSPREAPASGWAALGLSYKVQWPLHILFTPAVLEKYNVVFKYLLSVRRVQAELQHCWALQMQRKHLKSNQTDAIKWRLRNHMAFLVDNLQYYLQVDVLESQFSQLLHQINSTRDFESIRLAHDHFLSNLLAQSFILLKPVFHCLNEILDLCHSFCSLVSQNLGPLDERGAAQLSILVKGFSRQSSLLFKILSSVRNHQINSDLAQLLLRLDYNKYYTQAGGTLGSFGM

SEQ ID NO: 19854 - protein, 666 aa, Homo sapiens
MIHELLLALSGYPGSIFTWNKRSGLQVSQDFPFLHPSETSVLNRLCRLGTDYIRFTEFIEQYTGHVQQQDHHPSQQGQGGLHGIYLRAFCTGLDSVLQPYRQALLDLEQEFLGDPHLSISHVNYFLDQFQLLFPSVMVVVEQIKSQKIHGCQILETVYKHSCGGLPPVRSALEKILAVCHGVMYKQLSAWMLHGLLLDQHEEFFIKQGPSSGNVSAQPEEDEEDLGIGGLTGKQLRELQDLRLIEEENMLAPSLKQFSLRVEILPSYIPVRVAEKILFVGESVQMFENQNVNLTRKGSILKNQEDTFAAELHRLKQQPLFSLVDFEQVVDRIRSTVAEHLWKLMVEESDLLGQLKIIKDFYLLGRGELFQAFIDTAQHMLKTPPTAVTEHDVNVAFQQSAHKVLLDDDNLLPLLHLTIEYHGKEHKDATQAREGPSRETSPREAPASGWAALGLSYKVQWPLHILFTPAVLEKYNVVFKYLLSVRRVQAELQHCWALQMQRKHLKSNQTDAIKWRLRNHMAFLVDNLQYYLQVDVLESQFSQLLHQINSTRDFESIRLAHDHFLSNLLAQSFILLKPVFHCLNEILDLCHSFCSLVSQNLGPLDERGAAQLSILVKGFSRQSSLLFKILSSVRNHQINSDLAQLLLRLDYNKYYTQAGGTLGSFGM

SEQ ID NO: 19855 - protein, 717 aa, Homo sapiens
MTSQPLRLAEEYGPSPGESELAVNPFDGLPFSSRYYELLKQRQALPIWAARFTFLEQLESNPTGVVLVSGEPGSGKSTQIPQWCAEFALARGFQKGQVTVTQPYPLAARSLALRVADEMDLTLGHEVGYSIPQEDCTGPNTLLRFCWDRLLLQEVASTRGTGAWGVLVLDEAQERSVASDSLQGLLQDARLEKLPGDLRVVVVTDPALEPKLRAFWGNPPIVHIPREPGERPSPIYWDTIPPDRVEAACQAVLELCRKELPGDVLVFLPSEEEISLCCESLSREVESLLLQGLPPRVLPLHPDCGRAVQAVYEDMDARKVVVTHWLADFSFSLPSIQHVIDSGLELRSVYNPRIRAEFQVLRPISKCQAEARRLRARGFPPGSCLCLYPKSFLELEAPPLPQPRVCEENLSSLVLLLKRRQIAEPGECHFLDQPAPEALMQALEDLDYLAALDDDGDLSDLGVILSEFPLAPELAKALLASCEFDCVDEMLTLAAMLTAAPGFTRPPLSAEEAALRRALEHTDGDHSSLIQVYEAFIQSGADEAWCQARGLNWAALCQAHKLRGELLELMQRIELPLSLPAFGSEQNRRDLQKALVSGYFLKVARDTDGTGNYLLLTHKHVAQLSSYCCYRSRRAPARPPPWVLYHNFTISKDNCLSIVSEIQPQMLVELAPPYFLSNLPPSESRDLLNQLREGMADSTAGSKSSSAQEFRDPCVLQ

SEQ ID NO: 19856 - protein, 599 aa, Homo sapiens
MDLTLGHEVGYSIPQEDCTGPNTLLRFCWDRLLLQEVASTRGTGAWGVLVLDEAQERSVASDSLQGLLQDARLEKLPGDLRVVVVTDPALEPKLRAFWGNPPIVHIPREPGERPSPIYWDTIPPDRVEAACQAVLELCRKELPGDVLVFLPSEEEISLCCESLSREVESLLLQGLPPRVLPLHPDCGRAVQAVYEDMDARKVVVTHWLADFSFSLPSIQHVIDSGLELRSVYNPRIRAEFQVLRPISKCQAEARRLRARGFPPGSCLCLYPKSFLELEAPPLPQPRVCEENLSSLVLLLKRRQIAEPGECHFLDQPAPEALMQALEDLDYLAALDDDGDLSDLGVILSEFPLAPELAKALLASCEFDCVDEMLTLAAMLTAAPGFTRPPLSAEEAALRRALEHTDGDHSSLIQVYEAFIQSGADEAWCQARGLNWAALCQAHKLRGELLELMQRIELPLSLPAFGSEQNRRDLQKALVSGYFLKVARDTDGTGNYLLLTHKHVAQLSSYCCYRSRRAPARPPPWVLYHNFTISKDNCLSIVSEIQPQMLVELAPPYFLSNLPPSESRDLLNQLREGMADSTAGSKSSSAQEFRDPCVLQ

SEQ ID NO: 19857 - protein, 357 aa, Homo sapiens
MTSQPLRLAEEYGPSPGESELAVNPFDGLPFSSRYYELLKQRQALPIWAARFTFLEQLESNPTGVVLVSGEPGSGKSTQIPQWCAEFALARGFQKGQVTVTQPYPLAARSLALRVADEMDLTLGHEVGYSIPQEDCTGPNTLLRFCWDRLLLQEVASTRGTGAWGVLVLDEAQERSVASDSLQGLLQDARLEKLPGDLRVVVVTDPALEPKLRAFWGNPPIVHIPREPGERPSPIYWDTIPPDRVEAACQAVLELCRKELPGDVLVFLPSEEEISLCCESLSREVESLLLQGLPPRVLPLHPDCGRAVQAVYEDMDARKVVVTHWLADFSFSLPSIQHVIDSGLELRSVSEREIAVG

SEQ ID NO: 19858 - protein, 177 aa, Homo sapiens
MESIYLQKHLGACLTQGLAEVARVRPVDPIEYLALWIYKYKENVTMEQLRQKEMAKLERERELALMEQEMMERLKAEELLLQQQQLALQLELEMQEKERQRIQELQRAQEQLGKEMRMNMENLVRNEDILHSEEATLDSGKTLAEISDRYGAPNLSRVEELDEPMFSDIALNIDQDL

SEQ ID NO: 19859 - protein, 184 aa, Homo sapiens
MESIYLQKHLGACLTQGLAEVARVRPVDPIEYLALWIYKYKENVTMEQLRQKEMAKLERERELALMEQEMMERLKAEELLLQQQQLALQLELEMQEKERQRIQELQRAQEQLGKEMRMNMENLVRNEDILHSEEATLDSGKTLAEISDRYGAPNLSRVEELDEPMFSDVSISVFCEKTRFCFCF

SEQ ID NO: 19860 - protein, 238 aa, Homo sapiens
MLCFLRGMAFVPFLLVTWSSAAFIISYVVAVLSGHVNPFLPYISDTGTTPPESGIFGFMINFSAFLGAATMYTRYKIVQKQNQTCYFSTPVFNLVSLVLGLVGCFGMGIVANFQELAVPVVHDGGALLAFVCGVVYTLLQSIISYKSCPQWNSLSTCHIRMVISAVSCAAVIPMIVCASLISITKLEWNPREKDYVYHVVSAICEWTVAFGFIFYFLTFIQDFQSVTLRISTEINGDI

SEQ ID NO: 19861 - protein, 128 aa, Homo sapiens
MLCFLRGMAFVPFLLVTWSSAAFIISYVVAVLSGHVNPFLPYISDTGTTPPESGIFGFMINFSAFLGAATMYTRYKIVQKQNQTCYFSTPVFNLVSLVLGLVGCFGMGIVANFQSVTLRISTEINGDI

SEQ ID NO: 19862 - protein, 767 aa, Homo sapiens
MQSPAATAEGLSGPLFGAYTFPTFKFQPRHDSMDWRRISTLDVDRVARELDVATLQENIAGITFCNLDREVCSRCGQPVDPALLKVLRLAQLIIEYLLHCQDCLSASVAQLEARLQTSLGQQQRGQQELGRQADELKGVREESRRRRKMISTLQQLLMQTGTHSYHTCHLCDKTFMNATFLRGHIQRRHAGVAEGGKQKKQEQPVEEVLEELRAKLKWTQGELEAQREAERQRQLQEAELIHQREIEAKKEFDKWKEQEWTKLYGEIDKLKKLFWDEFKNVAKQNSTLEEKLRALQSHSVMESKLGSLRDEESEEWLRQARELQALREKTEIQKTEWKRKVKELHEEHMAEKKELQEENQRLQASLSQDQKKAAAQSQCQISTLRAQLQEQARIIASQEEMIQSLSLRKVEGIHKVPKAVDTEEDSPEEEMEDSQDEQHKVLAALRRNPTLLKHFRPILEDTLEEKLESMGIRKDAKGISIQTLRHLESLLRVQREQKARKFSEFLSLRGKLVKEVTSRAKERQENGAVVSQPDGQPSVKSQQSTLVTREAQPKTRTLQVALPSTPAEPPPPTRQSHGSHGSSLTQVSAPAPRPGLHGPSSTPPSSGPGMSTPPFSSEEDSEGDRVQRVSLQPPKVPSRMVPRPKDDWDWSDTETSEENAQPPGQGSGTLVQSMVKNLEKQLEAPAKKPAGGVSLFFMPNAGPQRAATPGRKPQLSEDESDLEISSLEDLPLDLDQREKPKPLSRSKLPEKFGTGPQSSGQPRVPAW

SEQ ID NO: 19863 - protein, 539 aa, Homo sapiens
MQSPAATAEGLSGPLFGAYTFPTFKFQPRHDSMDWRRISTLDVDRVARELDVATLQENIAGITFCNLDREVCSRCGQPVDPALLKVLRLAQLIIEYLLHCQDCLSASVAQLEARLQTSLGQQQRGQQELGRQADELKGVREESRRRRKMISTLQQLLMQTGTHSYHTCHLCDKTFMNATFLRGHIQRRHAGVAEGGKQKKQEQPVEEVLEELRAKLKWTQGELEAQREAERQRQLQEAELIHQREIEAKKEFDKWKEQEWTKLYGEIDKLKKLFWDEFKNVAKQNSTLEEKLRALQSHSVMESKLGSLRDEESEEWLRQARELQALREKTEIQKTEWKRKVKELHEEHMAEKKELQEENQRLQASLSQDQKKAAAQSQCQISTLRAQLQEQARIIASQEEMIQSLSLRKVEGIHKVPKAVDTEEDSPEEEMEDSQDEQHKVLAALRRNPTLLKHFRPILEDTLEEKLESMGIRKDAKGISIQTLRHLESLLRVQREQKARKFSEFLSLRGKLVKEVTSRAKERQENGAVVSQPDGQPSG

SEQ ID NO: 19864 - protein, 117 aa, Homo sapiens
MSWRGRSTYYWPRPRRYVQPPEMIGPMRPEQFSDEVEPATPEEGEPATQCQDPAAAQEGEDEGASAGQGPKPEAHSQEQGHPQTGCECEDGPDGQEMDPPNPEEVKTPEEGEKQSQC

SEQ ID NO: 19865 - protein, 1024 aa, Homo sapiens
MARHGPPWSRLDAQQERDVRELVRGVAGLQDEADPNFQLALNFAWSNFRFHRFLDVNSHKIEKTIEGIYEKFVIHSDLSKAASWKRLTEEFLNAPLPSIKEIKTDAHYSILSLLLCLSDSPSNSSYVETPRNKEVEKKDDFDWGKYLMEDEEMDIGPYMDTPNWSEESEEENDQQPLSREDSGIQVDRTPLEEQDQNRKLDPCISWKDEPDDRSWLEHHVVHQYWTARPSQFPHSLHLHSNLAAVWDQHLYSSDPLYVPDDRVLVTETQVIRETLWLLSGVKKLFIFQLIDGKVTVRNNIIVTHLTHSCLRSVLEQIAAYGQVVFRLQEFIDEVMGHSSESMLPGSGSVPKKSTEAPFRTYQAFMWALYKYFISFKEELAEIEKCIINNDTTITLAIVVDKLAPRLSQLKVLHKVFSTGVAEVPPDTRNVVRASHLLNTLYKAILEYDNVGEASEQTVSLLFSLWVETVRPYLQTVDEWIVHGHLWDGAREFIIQRNKNVPVNHRDFWYATYTLYSVSEKTENEEKMSDNASASSGSDQGPSSRQHTMVSFLKPVLKQIIMAGKSMQLLKNLQCAESTTCQAGARDAERKSLYTLFLESVQSRLRHGEDSTPQVLTEQQATKENLMKMQSIAESHLELDDVHDPLLAINFARMYLEQSDFHEKFAGGDVCVDRSSESVTCQTFELTLRSCLYPHIDKQYLDCCGNLMQTLKKDYRLVEYLQAMRNFFLMEGGDTMYDFYTSIFDKIREKETWQNVSFLNVQLQEAVGQRYPEDSSRLSISFENVDTAKKKLPVHILDGLTLSYKVPWPVDIVISLECQKIYNQVFLLLLQIKWAKYSLDVLLFGELVSTAEKPRLKEGLIHEQDTVAQFGPQKEPVRQQIHRMFLLRVKLMHFVNSLHNYIMTRILHSTGLEFQHQVEEAKDLDQLIKIHYRYLSTIHDRCLLREKVSFVKEAIMKVLNLALMFADGWQAGLGTWRMESIEKMESDFKNCHMFLVTILNKAVCRGSFPHLESLALSLMAGMEQS

SEQ ID NO: 19866 - protein, 1024 aa, Homo sapiens
MARHGPPWSRLDAQQERDVRELVRGVAGLQDEADPNFQLALNFAWSNFRFHRFLDVNSHKIEKTIEGIYEKFVIHSDLSKAASWKRLTEEFLNAPLPSIKEIKTDAHYSILSLLLCLSDSPSNSSYVETPRNKEVEKKDDFDWGKYLMEDEEMDIGPYMDTPNWSEESEEENDQQPLSREDSGIQVDRTPLEEQDQNRKLDPCISWKDEPDDRSWLEHHVVHQYWTARPSQFPHSLHLHSNLAAVWDQHLYSSDPLYVPDDRVLVTETQVIRETLWLLSGVKKLFIFQLIDGKVTVRNNIIVTHLTHSCLRSVLEQIAAYGQVVFRLQEFIDEVMGHSSESMLPGSGSVPKKSTEAPFRTYQAFMWALYKYFISFKEELAEIEKCIINNDTTITLAIVVDKLAPRLSQLKVLHKVFSTGVAEVPPDTRNVVRASHLLNTLYKAILEYDNVGEASEQTVSLLFSLWVETVRPYLQTVDEWIVHGHLWDGAREFIIQRNKNVPVNHRDFWYATYTLYSVSEKTENEEKMSDNASASSGSDQGPSSRQHTMVSFLKPVLKQIIMAGKSMQLLKNLQCAESTTCQAGARDAERKSLYTLFLESVQSRLRHGEDSTPQVLTEQQATKENLMKMQSIAESHLELDDVHDPLLAINFARMYLEQSDFHEKFAGGDVCVDRSSESVTCQTFELTLRSCLYPHIDKQYLDCCGNLMQTLKKDYRLVEYLQAMRNFFLMEGGDTMYDFYTSIFDKIREKETWQNVSFLNVQLQEAVGQRYPEDSSRLSISFENVDTAKKKLPVHILDGLTLSYKVPWPVDIVISLECQKIYNQVFLLLLQIKWAKYSLDVLLFGELVSTAEKPRLKEGLIHEQDTVAQFGPQKEPVRQQIHRMFLLRVKLMHFVNSLHNYIMTRILHSTGLEFQHQVEEAKDLDQLIKIHYRYLSTIHDRCLLREKVSFVKEAIMKVLNLALMFADGWQAGLGTWRMESIEKMESDFKNCHMFLVTILNKAVCRGSFPHCEYIMLKYFYLCISL

SEQ ID NO: 19867 - protein, 117 aa, Homo sapiens
MSWRGRSTYYWPRPRRYVQPPEMIGPMRPEQFSDEVEPATPEEGEPATQRQDPAAAQEGEDEGASAGQGPKPEAHSQEQGHPQTGCECEDGPDGQEMDPPNPEEVKTPEEGEKQSQC

SEQ ID NO: 19868 - protein, 75 aa, Homo sapiens
MSWRGRSTYYWPRPRRYVQPPEMIGPMRPEQFSDEVEPATPEEGEPATQRQDPAAAQEGEDEGASAGQGEKQSQC

SEQ ID NO: 19869 - protein, 117 aa, Homo sapiens; identical to SEQ ID NO: 19867

SEQ ID NO: 19870 - protein, 117 aa, Homo sapiens
MSWRGRSTYYWPRPRRYVQPPEMIGPMRPEQFSDEVEPATPEEGEPATQCQDPAAAQKGEDEGASAGQGPKPEAHSQEQGHPQTGCECEDGPDGQEMDPPNPEEVKTPEEGEKQSQC

SEQ ID NO: 19871 - protein, 117 aa, Homo sapiens; identical to SEQ ID NO: 19867

SEQ ID NO: 19872 - protein, 528 aa, Homo sapiens
MAAVLNAERLEVSVDGLTLSPDPEERPGAEGAPLLPPPLPPPSPPGSGRGPGASGEQPEPGEAAAGGAAEEARRLEQRWGFGLEELYGLALRFFKEKDGKAFHPTYEEKLKLVALHKQVLMGPYNPDTCPEVGFFDVLGNDRRREWAALGNMSKEDAMVEFVKLLNRCCHLFSTYVASHKIEKEEQEKKRKEEEERRRREEEERERLQKEEEKRRREEEERLRREEEERRRIEEERLRLEQQKQQIMAALNSQTAVQFQQYAAQQYPGNYEQQQILIRQLQEQHYQQYMQQLYQVQLAQQQAALQKQQEVVVAGSSLPTSSKVNATVPSNMMSVNGQAKTHTDSSEKELEPEAAEEALENGPKESLPVIAAPSMWTRPQIKDFKEKIQQDADSVITVGRGEVVTVRVPTHEEGSYLFWEFATDNYDIGFGVYFEWTDSPNTAVSVHVSESSDDDEEEEENIGCEEKAKKNANKPLLDEIVPVYRRDCHEEVYAGSHQYPGRGVYLLKFDNSYSLWRSKSVYYRVYYTR

SEQ ID NO: 19873 - protein, 117 aa, Homo sapiens
MSWRGRSTYYWPRPRPYVQPPEMIGPMRPEQFSDEVEPATPEEGEPATQRQDPAAAQEGEDEGASAGQGPKPEADSQEQGHPQTGCECEDGPDGQEMDPPNPEEVKTPEEGKKQSQC

SEQ ID NO: 19874 - protein, 1819 aa, Homo sapiens
MASITQLFDDLCEALLPAAKTHLGQRSVNRKRAKRSLKKVAYNALFTNLFQDETQQLQPDMSKLPARNKILMLSFDLRVGGLGPKADRLEELVEELEAAPCCPLLEVGSVLDLLVQLAGSGPPQVLPRKRDYFLNNKHVGRNVPYSGYDCDDLSVFEMDVQSLISREECLCHSMIQETLQVMEAAPGTGLPTVGLFSFGDPCGDRFERDTRVSLFGALVHSRTYDMDVRLGLPPVPDNADLSGLAIKVPPSVDQWEDEGFQSASNLTPDSQSEPSVTPDVDLWEAALTYEASKRRCWERVGCPPGHREEPYLTEAGRDAFDKFCRLHQGELQLLAGGVLQAPQPVLVKECELVKDVLNVLIGVVSATFSLCQPAQAFVVKRGVHVSGASPESISSLLSEVAEYGTCYTRLSHFSLQPVLDSLYSKGLVFQAFTSGLRRYLQYYRACVLSTPPTLSLLTIGFLFKKLGRQLRYLAELCGVGAVLPGTCGGGPRAAFPTGVKLLSYLYQEALHNCSNEHYPVLLSLLKTSCEPYTRFIHDWVYSGVFRDAYGEFMIQVNHEYLSFRDKLYWTHGYVLISKEVEDCVPVFLKHIAHDIYVCGKTINLLKLCCPRHYLCWSDVPVPRISVIFSLEELKEIEKDCAVYVGRMERVARHSSVSKEEKELRMEIAKQELIAHAREAASRVLSALSDRQMSERMALDARKREQFQRLKEQFVKDQERRQAARQEELDDDFSYARELRDRERRLKSLEEELERKARQALVDHYSKLSAEAARREQKALWRIQRHRLESARLRFLLEDEKHIQEMLKAVSEAHQPQEPPDVLLSVHPQVTSPGPEHPEGGQGCDSGSAEQHSPAWDGWNRPGLLTPQPLKPLAVGAGGRGLQQAEGARPFSDSLSIGDFLPVGPGAEPSVQTGMVPLLEVALQTINLDLPPSAPGEAPAAASTQPSRPQEYDFSTVLRPAVATSPAPGPLQAAECSLGSSGLQLWEDSCGKMDACGSASRETLLPSHPPRRAALEEGSSQPTERLFGQVSGGGLPTGDYASEIAPTRPRWNTHGHVSDASIRVGENVSDVAPTQPRWNTHGHVSNASISLGESVSDVAPTRPRWNIHGHVSNASIRVGENVSDVAPTRPRWNTHGHVSNASIRVGENVSDVAPTRPRWNTHGHVSDASISLGESVSDMAPARPRWNTHGHVSDASISLGESVSDMAPTRPRWNTHGHVSDTSIRVGENVSDVAPIRSRCNTHGHVSDASISLGEPVSDVVSTRPRWNTHVPIPPPHMVLGALSPEAEPNTPRPQQSPPGHTSQSALSLGAQSTVLDCGPRLPVEVGPSLSSPSSGCGEGSISVGENVSDVAPTQPWWPNTPGDSVSEELGPGRSGDTEDLSPNWPLNSQEDTAAQSSPGRGEEAEASAAEAQGGEQAYLAGLAGQYHLERYPDSYESMSEPPIAHLLRPVLPRAFAFPVDPQVQSAADETAVQLSELLTLPVLMKRSITAPLAAHISLVNKAAVDYFFVELHLEAHYEALRHFLLMEDGEFAQSLSDLLFEKLGAGQTPGELLNPLVLNSVLSKALQCSLHGDTPHASNLSLALKYLPEVFAPNAPDVLSCLELRYKVDWPLNIVITEGCVSKYSGVFSFLLQLKLMMWALKDVCFHLKRTALLSHMAGSVQFRQLQLFKHEMQHFVKVIQGYIANQILHVTWCEFRARLATVGDLEEIQRAHAEYLHKAVFRGLLTEKAAPVMNVIHSIFSLVLKFRSQLISQAWGPPGGPRGAEHPNFALMQQSYNTFKYYSHFLFKVVTKLVNRGYQPHLEDFLLRINFNNYYQDA

SEQ ID NO: 19875 - protein, 1785 aa, Homo sapiens
MASITQLFDDLCEALLPAAKTHLGQRSVNRKRAKRSLKKVAYNALFTNLFQDETQQLQPDMSKLPARNKILMLSFDLRVGGLGPKADRLEELVEELEAAPCCPLLEVGSVLDLLVQLAGSGPPQVLPRKRDYFLNNKHVGRNVPYSGYDCDDLSVFEMDVQSLISREECLCHSMIQETLQVMEAAPGTGLPTVGLFSFGDPCGDRFERDTRVSLFGALVHSRTYDMDVRLGLPPVPDNADLSGLAIKVPPSVDQWEDEGFQSASNLTPDSQSEPSVTPDVDLWEAALTYEASKRRCWERVGCPPGHREEPYLTEAGRDAFDKFCRLHQGELQLLAGGVLQAPQPVLVKECELVKDVLNVLIGVVSATFSLCQPAQAFVVKRGVHVSGASPESISSLLSEVAEYGTCYTRLSHFSLQPVLDSLYSKGLVFQAFTSGLRRYLQYYRACVLSTPPTLSLLTIGFLFKKLGRQLRYLAELCGVGAVLPGTCGGGPRAAFPTGVKLLSYLYQEALHNCSNEHYPVLLSLLKTSCEPYTRFIHDWVYSGVFRDAYGEFMIQVNHEYLSFRDKLYWTHGYVLISKEVEDCVPVFLKHIAHDIYVCGKTINLLKLCCPRHYLCWSDVPVPRISVIFSLEELKEIEKDCAVYVGRMERVARHSSVSKEEKELRMEIAKQELIAHAREAASRVLSALSDRQMSERMALDARKREQFQRLKEQFVKDQERRQAARQEELDDDFSYARELRDRERRLKSLEEELERKARQALVDHYSKLSAEAARREQKALWRIQRHRLESARLRFLLEDEKHIQEMLKAVSEAHQPQEPPDVLLSVHPQVTSPGPEHPEGGQGCDSGSAEQHSPAWDGWNRPGLLTPQPLKPLAVGAGGRGLQQAEGARPFSDSLSIGDFLPVGPGAEPSVQTGMVPLLEVALQTINLDLPPSAPGEAPAAASTQPSRPQEYDFSTVLRPAVATSPAPGPLQAAECSLGSSGLQLWEDSCGKMDACGSASRETLLPSHPPRRAALEEGSSQPTERLFGQVSGGGLPTGDYASEIAPTRPRWNTHGHVSDASIRVGENVSDVAPTQPRWNTHGHVSNASISLGESVSDVAPTRPRWNIHGHVSNASIRVGENVSDVAPTRPRWNTHGHVSNASIRVGENVSDVAPTRPRWNTHGHVSDASISLGESVSDMAPARPRWNTHGHVSDASISLGESVSDMAPTRPRWNTHGHVSDTSIRVGENVSDVAPIRSRCNTHGHVSDASISLGEPVSDVVSTRPRWNTHVPIPPPHMVLGALSPEAEPNTPRPQQSPPGHTSQSALSLGAQSTVLDCGPRLPVEVGPSLSSPSSGCGEGSISVGENVSDVAPTQPWWPNTPGDSVSEELGPGRSGDTEDLSPNWPLNSQEDTAAQSSPGRGEEAEASAAEAQGGEQAYLAGLAGQYHLERYPDSYESMSEPPIAHLLRPVLPRAFAFPVDPQVQSAADETAVQLSELLTLPVLMKRSITAPLAAHISLVNKAAVDYFFVELHLEAHYEALRHFLLMEDGEFAQSLSDLLFEKLGAGQTPGELLNPLVLNSVLSKALQCSLHGDTPHASNLSLALKYLPEVFAPNAPDVLSCLELRYKVDWPLNIVITEGCVSKYSGVFSFLLQLKLMMWALKDVCFHLKRTALLSHMAGSVQFRQLQLFKHEMQHFVKVIQGYIANQILHVTWCEFRARLATVGDLEEIQRAHAEYLHKAVFRPPGGPRGAEHPNFALMQQSYNTFKYYSHFLFKVVTKLVNRGYQPHLEDFLLRINFNNYYQDA

SEQ ID NO: 19876 - protein, 1802 aa, Homo sapiens
MASITQLFDDLCEALLPAAKTHLGQRSVNRKRAKRSLKKVAYNALFTNLFQDETQQLQPDMSKLPARNKILMLSFDLRVGGLGPKADRLEELVEELEAAPCCPLLEVGSVLDLLVQLAGSGPPQVLPRKRDYFLNNKHVGRNVPYSGYDCDDLSVFEMDVQSLISREECLCHSMIQETLQVMEAAPGTGLPTVGLFSFGDPCGDRFERDTRVSLFGALVHSRTYDMDVRLGLPPVPDNADLSGLAIKVPPSVDQWEDEGFQSASNLTPDSQSEPSVTPDVDLWEAALTYEASKRRCWERVGCPPGHREEPYLTEAGRDAFDKFCRLHQGELQLLAGGVLQAPQPVLVKECELVKDVLNVLIGVVSATFSLCQPAQAFVVKRGVHVSGASPESISSLLSEVAEYGTCYTRLSHFSLQPVLDSLYSKGLVFQAFTSGLRRYLQYYRACVLSTPPTLSLLTIGFLFKKLGRQLRYLAELCGVGAVLPGTCGGGPRAAFPTGVKLLSYLYQEALHNCSNEHYPVLLSLLKTSCEPYTRFIHDWVYSGVFRDAYGEFMIQVNHEYLSFRDKLYWTHGYVLISKEVEDCVPVFLKHIAHDIYVCGKTINLLKLCCPRHYLCWSDVPVPRISVIFSLEELKEIEKDCAVYVGRMERVARHSSVSKEEKELRMEIAKQELIAHAREAASRVLSALSDRQMSERMALDARKREQFQRLKEQFVKDQERRQAARQEELDDDFSYARELRDRERRLKSLEEELERKARQALVDHYSKLSAEAARREQKALWRIQRHRLESARLRFLLEDEKHIQEMLKAVSEAHQPQEPPDVLLSVHPQVTSPGPEHPEGGQGCDSGSAEQHSPAWDGWNRPGLLTPQPLKPLAVGAGGRGLQQAEGARPFSDSLSIGDFLPVGPGAEPSVQTGMVPLLEVALQTINLDLPPSAPGEAPAAASTQPSRPQEYDFSTVLRPAVATSPAPGPLQAAECSLGSSGLQLWEDSCGKMDACGSASRETLLPSHPPRRAALEEGSSQPTERLFGQVSGGGLPTGDYASEIAPTRPRWNTHGHVSDASIRVGENVSDVAPTQPRWNTHGHVSNASISLGESVSDVAPTRPRWNIHGHVSNASIRVGENVSDVAPTRPRWNTHGHVSNASIRVGENVSDVAPTRPRWNTHGHVSDASISLGESVSDMAPARPRWNTHGHVSDASISLGESVSDMAPTRPRWNTHGHVSDTSIRVGENVSDVAPIRSRCNTHGHVSDASISLGEPVSDVVSTRPRWNTHVPIPPPHMVLGALSPEAEPNTPRPQQSPPGHTSQSALSLGAQSTVLDCGPRLPVEVGPSLSSPSSGCGEGSISVGENVSDVAPTQPWWPNTPGDSVSEELGPGRSGDTEDLSPNWPLNSQEDTAAQSSPGRGEEAEASAAEAQGGEQAYLAGLAGQYHLERYPDSYESMSEPPIAHLLRPVLPRAFAFPVDPQVQSAADETAVQLSELLTLPVLMKRSITAPLAAHISLVNKAAVDYFFVELHLEAHYEALRHFLLMEDGEFAQSLSDLLFEKLGAGQTPGELLNPLVLNSVLSKALQCSLHGDTPHASNLSLALKYLPEVFAPNAPDVLSCLELRYKVDWPLNIVITEGCVSKYSGVFSFLLQLKLMMWALKDVCFHLKRTFRQLQLFKHEMQHFVKVIQGYIANQILHVTWCEFRARLATVGDLEEIQRAHAEYLHKAVFRAAPVMNVIHSIFSLVLKFRSQLISQAWGPPGGPRGAEHPNFALMQQSYNTFKYYSHFLFKVVTKLVNRGYQPHLEDFLLRINFNNYYQDA

SEQ ID NO: 19877 - protein, 761 aa, Homo sapiens
MSRKGPRAEVCADCSAPDPGWASISRGVLVCDECCSVHRSLGRHISIVKHLRHSAWPPTLLQMVHTLASNGANSIWEHSLLDPAQVQSGRRKANPQDKVHPIKSEFIRAKYQMLAFVHKLPCRDDDGVTAKDLSKQLHSSVRTGNLETCLRLLSLGAQANFFHPEKGTTPLHVAAKAGQTLQAELLVVYGADPGSPDVNGRTPIDYARQAGHHELAERLVECQYELTDRLAFYLCGRKPDHKNGHYIIPQMADSLDLSELAKAAKKKLQALSNRLFEELAMDVYDEVDRRENDAVWLATQNHSTLVTERSAVPFLPVNPEYSATRNQGRQKLARFNAREFATLIIDILSEAKRRQQGKSLSSPTDNLELSLRSQSDLDDQHDYDSVASDEDTDQEPLRSTGATRSNRARSMDSSDLSDGAVTLQEYLELKKALATSEAKVQQLMKVNSSLSDELRRLQREIHKLQAENLQLRQPPGPVPTPPLPSERAEHTPMAPGGSTHRRDRQAFSMYEPGSALKPFGGPPGDELTTRLQPFHSTELEDDAIYSVHVPAGLYRIRKGVSASAVPFTPSSPLLSCSQEGSRHTSKLSRHGSGADSDYENTQSGDPLLGLEGKRFLELGKEEDFHPELESLDGDLDPGLPSTEDVILKTEQVTKNIQELLRAAQEFKHDSFVPCSEKIHLAVTEMASLFPKRPALEPVRSSLRLLNASAYRLQSECRKTVPPEPGAPVDFQLLTQQVIQCAYDIAKAAKQLVTITTREKKQ

SEQ ID NO: 19878 - protein, 176 aa, Homo sapiens
MSRKGPRAEVCADCSAPDPGWASISRGVLVCDECCSVHRSLGRHISIVKHLRHSAWPPTLLQMVHTLASNGANSIWEHSLLDPAQVQSGRRKANPQDKVHPIKSEFIRAKYQMLAFVHKLPCRDDDGVTAKDLTGHRSWATPDINPHPNRATGTSALSAATLPGSQVPWCPPLSSP

SEQ ID NO: 19879 - protein, 770 aa, Homo sapiens
MSRKGPRAEVCADCSAPDPGWASISRGVLVCDECCSVHRSLGRHISIVKHLRHSAWPPTLLQMVHTLASNGANSIWEHSLLDPAQVQSGRRKANPQDKVHPIKSEFIRAKYQMLAFVHKLPCRDDDGVTAKDLSKQLHSSVRTGNLETCLRLLSLGAQANFFHPEKGTTPLHVAAKAGQTLQAELLVVYGADPGSPDVNGRTPIDYARQAGHHELAERLVECQYELTDRLAFYLCGRKPDHKNGHYIIPQMADRSRQKCMSQSLDLSELAKAAKKKLQALSNRLFEELAMDVYDEVDRRENDAVWLATQNHSTLVTERSAVPFLPVNPEYSATRNQGRQKLARFNAREFATLIIDILSEAKRRQQGKSLSSPTDNLELSLRSQSDLDDQHDYDSVASDEDTDQEPLRSTGATRSNRARSMDSSDLSDGAVTLQEYLELKKALATSEAKVQQLMKVNSSLSDELRRLQREIHKLQAENLQLRQPPGPVPTPPLPSERAEHTPMAPGGSTHRRDRQAFSMYEPGSALKPFGGPPGDELTTRLQPFHSTELEDDAIYSVHVPAGLYRIRKGVSASAVPFTPSSPLLSCSQEGSRHTSKLSRHGSGADSDYENTQSGDPLLGLEGKRFLELGKEEDFHPELESLDGDLDPGLPSTEDVILKTEQVTKNIQELLRAAQEFKHDSFVPCSEKIHLAVTEMASLFPKRPALEPVRSSLRLLNASAYRLQSECRKTVPPEPGAPVDFQLLTQQVIQCAYDIAKAAKQLVTITTREKKQ

SEQ ID NO: 19880 - protein, 592 aa, Homo sapiens
MASEIHMTGPMCLIENTNGRLMANPEALKILSAITQPMVVVAIVGLYRTGKSYLMNKLAGKKKGFSLGSTVQSHTKGIWMWCVPHPKKPGHILVLLDTEGLGDVEKGDNQNDSWIFALAVLLSSTFVYNSIGTINQQAMDQLYYVTELTHRIRSKSSPDENENEVEDSADFVSFFPDFVWTLRDFSLDLEADGQPLTPDEYLTYSLKLKKGTSQKDETFNLPRLCIRKFFPKKKCFVFDRPVHRRKLAQLEKLQDEELDPEFVQQVADFCSYIFSNSKTKTLSGGIQVNGPRLESLVLTYVNAISSGDLPCMENAVLALAQIENSAAVQKAIAHYEQQMGQKVQLPTETLQELLDLHRDSEREAIEVFIRSSFKDVDHLFQKELAAQLEKKRDDFCKQNQEASSDRCSALLQVIFSPLEEEVKAGIYSKPGGYRLFVQKLQDLKKKYYEEPRKGIQAEEILQTYLKSKESMTDAILQTDQTLTEKEKEIEVERVKAESAQASAKMLQEMQRKNEQMMEQKERSYQEHLKQLTEKMENDRVQLLKEQERTLALKLQEQEQLLKEGFQKESRIMKNEIQDLQTKMRRRKACTIS

SEQ ID NO: 19881 - protein, 668 aa, Homo sapiens
MLMWPQPHLPTHPHLPTHPHLPTHPHLPTHPHLPTHPHLPTHPHLPTHPMMSKETRQSKLAEAKEQLTDHHPQTNPSVGTAASDTKKKKINNGTNPETTTSGGCHSPEDEQKASHQHQEALRRELEAQVHTIRILTCQKTELQMALYYSQHAVKQLEGEARDLISRLHDSWKFAGELEQALSAVATQKKKADRYIEELTKERDALSLELYRNTITDEELKEKNAKLQEKLQLVESEKSEIQLNVKELKRKLERAKLLLPQQQLQAEADHLGKELQSVSAKLQAQVEENELWNRLNQQQEEKMWRQEEKIQEWEEKIQEQEEKIREQEEKIREQEEKMRRQEEMMWEKEEKMRRQEEMMWEKEEKMRRLEEMMWEKEEKIRELEEKMHEQEKIREQEEKRQEEEKIREQEKRQEQEAKMWRQEEKIREQEEKIREQEKKMWRQEEKIHEQEKIREEEKRQEQEEMWRQEEKIREQEEIWRQKEKMHEQEKIRKQEEKVWRQEEKMHDQEEKIREQEEKMWRQEEKIREQEEKIREQEEKIREQEEMMQEQEEKMGEQEEKMQEQEKMRRQEEKIREQEEKIREQKEKIREQEEKIWEQEEKIREQEEMMQEQEEKMWEQEEKMCEQEEKMQEQEEKMRRQEEKMWEQEVRLRQQEEKMQEHQEHLEAAI

SEQ ID NO: 19882 - protein, 909 aa, Homo sapiens
MWPQPHLPPHPMMSEKTRQNKLAEAKKKFTDYRQWNIAGVGTRATDTKKKKINNGTNPETTTSEGCHSPEDTQQNRAQLKEEKKASHQHQEALRREIEAQDHTIRILTCQKTELETALYYSQDAARKFEDGNLGTPSSFNLALSQAFRGSPLGCVSTSLIPGESKDLAGRLHHSWHFAGELQRALSAVSTWHKKADRYIEELTKERDALSLELYRNTITNEELKKKNAELQEKLRLAESEKSEIQLNVKELKRKLERAKFLLPQVQTNTLQEEMWRQEEELREQEKKIRKQEEKMWRQEERLREQEGKMREQEEKMRRQEKRLREQEKELREQEKELREQKKLREQEEQMQEQEEKMWEQEEKMREQEEKMWRQEERLWEQEKQMREQEQKMRDQEERMWEQDERLREKEERMREQEKMWEQVEKMREEKKMQEQEKKTRDQEEKMQEEERIREREKKMREEEETMREQEEKMQKQEENMWEQEEKEWQQQRLPEQKEKLWEQEKMQEQEEKIWEQEEKIRDQEEMWGQEKKMWRQEKMREQEDVETGGEAAGAGEADVGAGGEDAGSGAEDVGPGGEDVGAGREAAGEGGENAGAEEDVAAGGEDAGGEEDAGAGEEDMGPGGEDARGGEDAGAGEEDAGGGGDDAGAGGEDAGAGREDAGAGGEDVGAGREDAGAGGEDVGAGGEDVGAGRRRCGSSRGCRNRRRSCGNTRRCRSRRSGAEDVGPEGEDVGAGREAAGEGGENAGAEDVAAGGEDAGEEEDAGGEDAGAAREDAGAGGDDVGAGREDAGAGGEDVGAGGEDAGAGGEDAGAGGEDAGPGGEDAGAGGEDAGPGGEDAGAGGEDAGPGGEDVGPGGEDVGAGGEDVGAGGDAREGGEDTRSEREDAGEAARARGAVLRALPPSLQSSL

SEQ ID NO: 19883 - protein, 650 aa, Homo sapiens
MWPQPHLPPHPMMSEKTRQNKLAEAKKKFTDYRQWNIAGVGTRATDTKKKKINNGTNPETTTSEGCHSPEDTQQNRAQLKEEKKASHQHQEALRREIEAQDHTIRILTCQKTELETALYYSQDAARKFEDGNLGTPSSFNLALSQAFRGSPLGCVSTSLIPGESKDLAGRLHHSWHFAGELQRALSAVSTWHKKADRYIEELTKERDALSLELYRNTITNEELKKKNAELQEKLRLAESEKSEIQLNVKELKRKLERAKFLLPQVQTNTLQEEMWRQEEELREQEKKIRKQEEKMWRQEERLREQEGKMREQEEKMRRQEKRLREQEKELREQEKELREQKKLREQEEQMQEQEEKMWEQEEKMREQEEKMWRQEERLWEQEKQMREQEQKMRDQEERMWEQDERLREKEERMREQEKMWEQVEKMREEKKMQEQEKKTRDQEEKMQEEERIREREKKMREEEETMREQEEKMQKQEENMWEQEEKEWQQQRLPEQKEKLWEQEKMQEQEEKIWEQEEKIRDQEEMWGQEKKMWRQEKMREQEEEMREKEERIRDQKEKMQERLPEHEERCSEPCLPPSKVLCNMSHTGSVEPAGGEAGEGSPQDNPTAQEIMQLFCGMKNAQQCPGLGSTSCIPFFYRGDKRKMKIINI

SEQ ID NO: 19884 - protein, 426 aa, Homo sapiens
MWPQPHLPPHPMMSEKTRQNKLAEAKKKFTDYRQWNIAGVGTRATDTKKKKINNGTNPETTTSEGCHSPEDTQQNRAQLKEEKKASHQHQEALRREIEAQDHTIRILTCQKTELETALYYSQDAARKFEDGNLGTPSSFNLALSQAFRGSPLGCVSTSLIPGESKDLAGRLHHSWHFAGELQRALSAVSTWHKKADRYIEELTKERDALSLELYRNTITNEELKKKNAELQEKLRLAESEKSEIQLNVKELKRKLERAKFLLPQVQTNTLQEEMWRQEEELREQEKKIRKQEEKMWRQEERLREQEGKMREQEEKMWRQEMMREKEERIRDQKEKMQERLPEHEERCSEPCLPPSKVLCNMSHTGSVEPAGGEAGEGSPQDNPTAQEIMQLFCGMKNAQQCPGLGSTSCIPFFYRGDKRKMKIINI

SEQ ID NO: 19885 - protein, 591 aa, Homo sapiens
MAPEINLPGPMSLIDNTKGQLVVNPEALKILSAITQPVVVVAIVGLYRTGKSYLMNKLAGKKNGFSLGSTVKSHTKGIWMWCVPHPKKPEHTLVLLDTEGLGDIEKGDNENDSWIFALAILLSSTFVYNSMGTINQQAMDQLHYVTELTDRIKANSSPGNNSVDDSADFVSFFPAFVWTLRDFTLELEVDGEPITADDYLELSLKLRKGTDKKSKSFNDPRLCIRKFFPKRKCFVFDWPAPKKYLAHLEQLKEEELNPDFIEQVAEFCSYILSHSNVKTLSGGIPVNGPRLESLVLTYVNAISSGDLPCMENAVLALAQIENSAAVEKAIAHYEQQMGQKVQLPTETLQELLDLHRDSEREAIEVFMKNSFKDVDQMFQRKLGAQLEARRDDFCKQNSKASSDCCMALLQDIFGPLEEDVKQGTFSKPGGYRLFTQKLQELKNKYYQVPRKGIQAKEVLKKYLESKEDVADALLQTDQSLSEKEKAIEVERIKAESAEAAKKMLEEIQKKNEEMMEQKEKSYQEHVKQLTEKMERDRAQLMAEQEKTLALKLQEQERLLKEGFENESKRLQKDIWDIQMRSKSLEPICNIL

SEQ ID NO: 19886 - protein, 463 aa, Homo sapiens
MWPQPRLPPHPAMSEKTQQGKLAAAKKKLKAYWQRKSPGIPAGANRKKKINGSSPDTATSGGYHSPGDSATGIYGEGRASSTTLEDLESQYQELAVALDSSSAIISQLTENINSLVRTSKEEKKHEIHLVQKLGRSLFKLKNQTAEPLAPEPPAGPSKVEQLQDETNHLRKELESVGRQLQAEVENNQMLSLLNRRQEERLREQEERLREQEERLREQEERLCEQEERLREQEERLREQEERLCEQEERLREHEERLCEQEERLCEQEERLREQEERLHEQEERLCEQEERLREQEERLCEQEERLREQEERLCEQEERLREQEERLCEQEKLPGQERLLEEVEKLLEQERRQEEQERLLERERLLEEVEKLLEQERRQEEQERLLEREELLDEVEELLEQERLRQQDERLWQQETLQELERLRELERMLELGWEALYEQRAEPRSGFEELVRCPTWGGCPLP

SEQ ID NO: 19887 - protein, 574 aa, Homo sapiens
MWPQPRFPPHPAMSEKTQQGKLAAAKKKLKAYWQRKSPGIPAGANRKKKINGSSPDTATSGGYHSPGDSATGIYGEGRASSTTLEDLESQYQELAVALDSSSAIISQLTENINSLVRTSKEEKKHEIHLVQKLGRSLFKLKNQTAEPLAPEPPAGPSKVEQLQDETNHLRKELESVGRQLQAEVENNQMLSLLNRRQEERLREQEERLREQEERLREQEDRLHEQEERLREQEERLCEQEERLREHEERLCEQEERLCEQEERLREQEERLHEQEERLREQEERLCEQEERLREQEERLCEQEERLREQEERLCEQEKLPGQERLLEEVEKLLEQERRQEEQERLLERERLLEEVEKLLEQERQQEEQERLLERERLLEEVEKLLEQERRQEEQERLLERERLLDEVEELLDEVEELLEQERLRQQDERLWQQETLQELERLRELERLRELERMLELGWEALYEQRAEPRSGFEELNNENKSTLQLEQQVKELKKSGGAEEPRGSESAAAARPVAGAPVPQGAWMCGQAGWTPQEHPGLSGEAVGTGEAAGGAGEAACHSFRAAENRELNITII

SEQ ID NO: 19888 - protein, 724 aa, Homo sapiens
MLMWPQPHLPTHPHLPTHPHLPTHPHLPTHPHLPTHPMMSKETRQSKLAEAKEQLTDHHPQTNPSVGTAASDTKKKKINNGTNPETTTSGGCHSPEDEQKASHQHQEALRRELEAQVHTIRILTCQKTELQMALYYSQHAVKQLEGEARDLISRLHDSWKFAGELEQALSAVATQKKKADRYIEELTKERDALSLELYRNTITDEELKEKNAELQEKLQLVESEKSEIQLNVKELKRKLERAKLLLPQQQLQAEADHLGKELQSVSAKLQAQVEENELWNRLNQQQEEKMWRQEEKIQEWEEKIQEQEEKIREQEEKIREQEEKMRRQEEMMWEKEEKMRRQEEMMWEKEEKMRRQEEMMWEKEEKIRELEEKMHEQEKIREQEEKRQEEEKIREQEKRQEQEAKMWRQEEKIREQEEKIREQEKKMWRQEEKIHEQEKIREEEKRQEQEEMWRQEEKIREQEEIWRQKEKMHEQEEKIRKQEEKVWRQEEKIREQEEKIREQEEKMWRQEEKIREQEEMWREEEKMHEQEKIWEEEKRQEQEDKMWRQEEKIREQEEKVWRQEEKIREQEEKRQEQEEKMWKQEEKIREQEEKIREQEEKIREQEEKIREQEEMTQEQEEKMGEQEEKMCEQEEKMQEQEETMWRQEEKIREQEKKIREQEEKIREQEEMMQEQEEKMWEQEEKMCEQEEKMQEQEEKMRRQEEKMWEQEVRLRQQEEKMQEH

SEQ ID NO: 19889 - protein, 622 aa, Homo sapiens
MMSEKTQQRKLAGTKKKFTDYHQWNSAGVGTGATDTKKKKINHGANPETTTSGGCHSPEDKQQNRAQLKEENKASHQHQQALRRQLEAQDHTIRILMCQKTELETALHDSQDAARKFEEDSKDLAARLHHSWHFAGELQRALSAMSAEHERADKYIKELTKEREAMSLELFRNIITNKELKEKNAELQEKLRLVETEKSEIQLHIKELKRKLETDKIPLPQVQTNTLQEKMWRQEEELRDQEELRDQEKLRKHEEKMWRQEQRLRDQEKELREQEQQMQEQEEQMRKQEEQMRKQEEQMRKQEEQMRKQEEQMRKQEEQMRKQEEQMGKQEEQMGEQEEQMRKQEKQMLKQKEQMRKQEEQMWKQEEQIGEQEEQMRKQEEQMWKQEEQIGEQEEQMRKQEEQMWKQEEQMGEQMRKQEEQMGEQEEQIRKQEEQMGEQEEQMRKQEEQMGEQEEQMRKQEEQMGEQEEQMRKQEEQMGEQEEQMGEQEEQMRKQVERLQFKEERLWDEYEKMQEEEEKIRRQVEKRREKKERMGEQEKTQEERCSEPCLPPSKYPSDMSHPGSLEPAREAGKGYSHDNRTAQIMQLPPGMKNAQERPGLGSTSCIPFFYGGDKKKIKIISI

SEQ ID NO: 19890 - protein, 432 aa, Homo sapiens
MWPQPRLPPHPAMSEKTQQGKLAAAKKKLKAYWQRKSPGIPAGANRKKKINGSSPDTFTSGGYHSPGDSATGIYGEGRASSTTLQDLESQYQELAVALDSSSAIISQLTENINSLVRTSKEEKKHEIHLVQKLGRSLFKLKNQTAEPLAPQPPAGPSKMEQLQDETNHLRKELESVGRQLQAEVENNQMLSLLNRRQEERLREQEERLREQEERLCEQEERLCEQEERLREQEERLCEQEKLPGQERLLEEVEKLLEQERRQEEQERLLERERLLDEVEELLEQERLRQQDERLWQQETLRELERLRELERMLELGWEALYEQRAEPRSGFEELNNENKSTLQLEQQVKELEKSGGAEEPRGSESAAAARPVAGAPVPQGAWMCGQAGWTPQEHPGLSGEAVGTGEAAGGAGEAACHSFRAAENRELNITII

SEQ ID NO: 19891 - protein, 274 aa, Homo sapiens
MEQLQDETNHLRKELESVGRQLQAEVENNQMLSLLNRRQEERLREQEERLREQEERLCEQEERLCEQEERLREQEERLCEQEKLPGQERLLEEVEKLLEQERRQEEQERLLERERLLDEVEELLEQERLRQQDERLWQQETLRELERLRELERMLELGWEALYEQRAEPRSGFEELNNENKSTLQLEQQVKELEKSGGAEEPRGSESAAAARPVAGAPVPQGAWMCGQAGWTPQEHPGLSGEAVGTGEAAGGAGEAACHSFRAAENRELNITII

SEQ ID NO: 19892 - protein, 522 aa, Homo sapiens
MWPQPRLPPHPAMSEKTQQGKLAAAKKKLKAYWQRKSPGIPAGANRKKKVNGSSPDTATSGGYHSPGDSATGIYGEGRASSTTLQDLESQYQELAVALDSSSAIISQLTENINSLVRTSKEEKKHEIHLVQKLGRSLFKLKNQTAEPLAPEPPAGPSKVEQLQDETNHLRKELESVGRQLQAEVENNQMLSLLNRRQEERLREQEERLHEQEERLHEQEERLCEQEERLREQEERLCEQEERLREQEERLCEQEERLREQEERLCEQEERLREQEERLREQEERLCEQEERLCEQEERLREQEERLCEQEERLCEQEERLCEQEKLPGQERLLEEVEKLLEQERRQEEQERLLERERLLDEVEELLEQERLRQQDERLWQQETLRELERLRELERLRELERMLELGWEALYEQRAEPRSGFEELNNENKSTLQLEQQVKELEKSGGAEEPRGSESAAAARPVPGAPVPQGAWMCGQAGWTPQEHPGLSGEAVGTGEAAGGAEEAACHSFRAAENRELNITII

SEQ ID NO: 19893 - protein, 550 aa, Homo sapiens
MWPQPRLPPHPAMSEKTQQGKLAAAKKKLKAYWQRKSPGIPAGANRKKKVNGSSPDTATSGGYHSPGDSATGVYGEGRASSTTLQDLESQYQELAVALDSSSAIISQLTENINSLVRTSKEEKKHEIHLVQKLGRSLFKLKNQTAEPLAPEPPAGPSKVEQLQDETNHLRKELESVGRQLQAEVENNQMLSLLNRRQEERLREQEERLHEQEERLHEQEERLCEQEERLREQEERLCEQEERLREQEERLCEQEERLREQEERLCEQEERLREQEERLCEQEERLREQEERLCEQEERLREQEERLCEQEERLREQEERLCEQEERLCEQEERLCEQEERLCEQEERLCEQEKLPGQERLLEEVEKLLEQERRQEEQERLLERERLLDEVEELLEQERLRQQDERLWQQETLRELERLRELERLRELERMLELGWEALYEQRAEPRSGFEELNNENKSTLQLEQQVKELEKSGGAEEPRGSESAAAARPVPGAPVPQGAWMCGQAGWTPQEHPGLSGEAVGTGEAAGGAEEAACHSFRAAENRELNITII

SEQ ID NO: 19894 - protein, 759 aa, Homo sapiens
MSKRLRSSEVCADCSGPDPSWASVNRGTFLCDECCSVHRSLGRHISQVRHLKHTPWPPTLLQMVETLYNNGANSIWEHSLLDPASIMSGRRKANPQDKVHPNKAEFIRAKYQMLAFVHRLPCRDDDSVTAKDLSKQLHSSVRTGNLETCLRLLSLGAQANFFHPEKGNTPLHVASKAGQILQAELLAVYGADPGTQDSSGKTPVDYARQGGHHELAERLVEIQYELTDRLAFYLCGRKPDHKNGQHFIIPQMADSSLDLSELAKAAKKKLQSLSNHLFEELAMDVYDEVDRRETDAVWLATQNHSALVTETTVVPFLPVNPEYSSTRNQGRQKLARFNAHEFATLVIDILSDAKRRQQGSSLSGSKDNVELILKTINNQHSVESQDNDQPDYDSVASDEDTDLETTASKTNRQKSLDSDLSDGPVTVQEFMEVKNALVASEAKIQQLMKVNNNLSDELRIMQKKLQTLQSENSNLRKQATTNVYQVQTGSEYTDTSNHSSLKRRPSARGSRPMSMYETGSGQKPYLPMGEASRPEESRMRLQPFPAHIGRSALVTSSSSLPSFPSTLSWSRDESARRASRLEKQNSTPESDYDNTPNDMEPDGMGSSRKGRQRSMVWPGDGLVPDTAEPHVAPSPTLPSTEDVIRKTEQITKNIQELLRAAQENKHDSYIPCSERIHVAVTEMAALFPKKPKSDMVRTSLRLLTSSAYRLQSECKKTLPGDPGSPTDVQLVTQQVIQCAYDIAKAAKQLVTITTKENNN

SEQ ID NO: 19895 - protein, 471 aa, Homo sapiens
MSKRLRSSEVCADCSGPDPSWASVNRGTFLCDECCSVHRSLGRHISQVRHLKHTPWPPTLLQMVETLYNNGANSIWEHSLLDPASIMSGRRKANPQDKVHPNKAEFIRAKYQMLAFVHRLPCRDDDSVTAKDLSKQLHSSVRTGNLETCLRLLSLGAQANFFHPEKGNTPLHVASKAGQILQAELLAVYGADPGTQDSSGKTPVDYARQGGHHELAERLVEIQYELTDRLAFYLCGRKPDHKNGQHFIIPQMADSSLDLSELAKAAKKKLQSLSNHLFEELAMDVYDEVDRRETDAVWLATQNHSALVTETTVVPFLPVNPEYSSTRNQGRQKLARFNAHEFATLVIDILSDAKRRQQGSSLSGSKDNVELILKTINNQHSVESQDNDQPDYDSVASDEDTDLETTASKTNRQKSLDSDLSDGPVTVQEFMEVKNALVASEAKIQQLMKVNNNLSDELRIMQKKLLGKDAN

SEQ ID NO: 19896 - protein, 744 aa, Homo sapiens
MSKRLRSSEVCADCSGPDPSWASVNRGTFLCDECCSVHRSLGRHISQVRHLKHTPWPPTLLQMVETLYNNGANSIWEHSLLDPASIMSGRRKANPQDKVHPNKAEFIRAKYQMLAFVHRLPCRDDDSVTAKDLSKQLHSSVRTGNLETCLRLLSLGAQANFFHPEKGNTPLHVASKAGQILQAELLAVYGADPGTQDSSGKTPVDYARQGGHHELAERLVEIQYELTDRLAFYLCGRKPDHKNGQHFIIPQMADSSLDLSELAKAAKKKLQSLSNHLFEELAMDVYDEVDRRETDAVWLATQNHSALVTETTVVPFLPVNPEYSSTRNQGRQKLARFNAHEFATLVIDILSDAKRRQQGSSLSGSKDNVELILKTINNQHSVESQDNDQPDYDSVASDEDTDLETTASKTNRQKSLDSDLSDGPVTVQEFMEVKNALVASEAKIQQLMKLQTLQSENSNLRKQATTNVYQVQTGSEYTDTSNHSSLKRRPSARGSRPMSMYETGSGQKPYLPMGEASRPEESRMRLQPFPAHIGRSALVTSSSSLPSFPSTLSWSRDESARRASRLEKQNSTPESDYDNTPNDMEPDGMGSSRKGRQRSMVWPGDGLVPDTAEPHVAPSPTLPSTEDVIRKTEQITKNIQELLRAAQENKHDSYIPCSERIHVAVTEMAALFPKKPKSDMVRTSLRLLTSSAYRLQSECKKTLPGDPGSPTDVQLVTQQVIQCAYDIAKAAKQLVTITTKENNN

SEQ ID NO: 19897 - protein, 709 aa, Homo sapiens
MSKRLRSSEVCADCSGPDPSWASVNRGTFLCDECCSVHRSLGRHISQVRHLKHTPWPPTLLQMVETLYNNGANSIWEHSLLDPASIMSGRRKANPQDKVHPNKAEFIRAKYQMLAFVHRLPCRDDDSVTAKDLSKQLHSSVRTGNLETCLRLLSLGAQANFFHPEKGNTPLHVASKAGQILQAELLAVYGADPGTQDSSGKTPVDYARQGGHHELAERLVEIQYELTDRLAFYLCGRKPDHKNGQHFIIPQMADSSLDLSELAKAAKKKLQSLSNHLFEELAMDVYDEVDRRETDAVWLATQNHSALVTETTVVPFLPVNPEYSSTRNQGRQKLARFNAHEFATLVIDILSDAKRRQQGSSLSGSKDNVELILKTINNQHSVESQDNDQPDYDSVASDEDTDLETTASKTNRQKLQTLQSENSNLRKQATTNVYQVQTGSEYTDTSNHSSLKRRPSARGSRPMSMYETGSGQKPYLPMGEASRPEESRMRLQPFPAHIGRSALVTSSSSLPSFPSTLSWSRDESARRASRLEKQNSTPESDYDNTPNDMEPDGMGSSRKGRQRSMVWPGDGLVPDTAEPHVAPSPTLPSTEDVIRKTEQITKNIQELLRAAQENKHDSYIPCSERIHVAVTEMAALFPKKPKSDMVRTSLRLLTSSAYRLQSECKKTLPGDPGSPTDVQLVTQQVIQCAYDIAKAAKQLVTITTKENNN

SEQ ID NO: 19898 - protein, 729 aa, Homo sapiens
MSKRLRSSEVCADCSGPDPSWASVNRGTFLCDECCSVHRSLGRHISQVRHLKHTPWPPTLLQMVETLYNNGANSIWEHSLLDPASIMSGRRKANPQDKVHPNKAEFIRAKYQMLAFVHRLPCRDDDSVTAKDLSKQLHSSVRTGNLETCLRLLSLGAQANFFHPEKGNTPLHVASKAGQILQAELLAVYGADPGTQDSSGKTPVDYARQGGHHELAERLVEIQYELTDRLAFYLCGRKPDHKNGQHFIIPQMADSSLDLSELAKAAKKKLQSLSNHLFEELAMDVYDEVDRRETDAVWLATQNHSALVTETTVVPFLPVNPEYSSTRNQGRQKLARFNAHEFATLVIDILSDAKRRQQGSSLSGSKDNVELILKTINNQHSVESQDNDQPDYDSVASDEDTDLETTASKTNRQKSLDSDLSDGPVTVQEFMEVKNALVASEAKIQQLMKVNNNLSDELRIMQKKLQTLQSENSNLRKQATTNVYQVQTGSEYTDTSNHSSLKRRPSARGSRPMSMYETGSGQKPYLPMGEASRPEESRMRLQPFPAHASRLEKQNSTPESDYDNTPNDMEPDGMGSSRKGRQRSMVWPGDGLVPDTAEPHVAPSPTLPSTEDVIRKTEQITKNIQELLRAAQENKHDSYIPCSERIHVAVTEMAALFPKKPKSDMVRTSLRLLTSSAYRLQSECKKTLPGDPGSPTDVQLVTQQVIQCAYDIAKAAKQLVTITTKENNN

SEQ ID NO: 19899 - protein, 661 aa, Homo sapiens
MSKRLRSSEVCADCSGPDPSWASVNRGTFLCDECCSVHRSLGRHISQVRHLKHTPWPPTLLQMVETLYNNGANSIWEHSLLDPASIMSGRRKANPQDKVHPNKAEFIRAKYQMLAFVHRLPCRDDDSVTAKDLSKQLHSSVRTGNLETCLRLLSLGAQANFFHPEKGNTPLHVASKAGQILQAELLAVYGADPGTQDSSGKTPVDYARQGGHHELAERLVEIQYELTDRLAFYLCGRKPDHKNGQHFIIPQMADSSLDLSELAKAAKKKLQSLSNHLFEELAMDVYDEVDRRETDAVWLATQNHSALVTETTVVPFLPVNPEYSSTRNQGRQKLARFNAHEFATLVIDILSDAKRRQQGSSLSGSKDNVELILKTINNQHSVESQDNDQPDYDSVASDEDTDLETTASKTNRQKSLDSDLSDGPVTVQEFMEVKNALVASEAKIQQLMKIGRSALVTSSSSLPSFPSTLSWSRDESARRASRLEKQNSTPESDYDNTPNDMEPDGMGSSRKGRQRSMVWPGDGLVPDTAEPHVAPSPTLPSTEDVIRKTEQITKNIQELLRAAQENKHDSYIPCSERIHVAVTEMAALFPKKPKSDMVRTSLRLLTSSAYRLQSECKKTLPGDPGSPTDVQLVTQQVIQCAYDIAKAAKQLVTITTKENNN

SEQ ID NO: 19900 - protein, 646 aa, Homo sapiens
MSKRLRSSEVCADCSGPDPSWASVNRGTFLCDECCSVHRSLGRHISQVRHLKHTPWPPTLLQMVETLYNNGANSIWEHSLLDPASIMSGRRKANPQDKVHPNKAEFIRAKYQMLAFVHRLPCRDDDSVTAKDLSKQLHSSVRTGNLETCLRLLSLGAQANFFHPEKGNTPLHVASKAGQILQAELLAVYGADPGTQDSSGKTPVDYARQGGHHELAERLVEIQYELTDRLAFYLCGRKPDHKNGQHFIIPQMADSSLDLSELAKAAKKKLQSLSNHLFEELAMDVYDEVDRRETDAVWLATQNHSALVTETTVVPFLPVNPEYSSTRNQGRQKLARFNAHEFATLVIDILSDAKRRQQGSSLSGSKDNVELILKTINNQHSVESQDNDQPDYDSVASDEDTDLETTASKTNRQKSLDSDLSDGPVTVQEFMEVKNALVASEAKIQQLMKVNNNLSDELRIMQKKASRLEKQNSTPESDYDNTPNDMEPDGMGSSRKGRQRSMVWPGDGLVPDTAEPHVAPSPTLPSTEDVIRKTEQITKNIQELLRAAQENKHDSYIPCSERIHVAVTEMAALFPKKPKSDMVRTSLRLLTSSAYRLQSECKKTLPGDPGSPTDVQLVTQQVIQCAYDIAKAAKQLVTITTKENNN

SEQ ID NO: 19901 - protein, 694 aa, Homo sapiens
MSKRLRSSEVCADCSGPDPSWASVNRGTFLCDECCSVHRSLGRHISQVRHLKHTPWPPTLLQMVETLYNNGANSIWEHSLLDPASIMSGRRKANPQDKVHPNKAEFIRAKYQMLAFVHRLPCRDDDSVTAKDLSKQLHSSVRTGNLETCLRLLSLGAQANFFHPEKGNTPLHVASKAGQILQAELLAVYGADPGTQDSSGKTPVDYARQGGHHELAERLVEIQYELTDRLAFYLCGRKPDHKNGQHFIIPQMADSSLDLSELAKAAKKKLQSLSNHLFEELAMDVYDEVDRRETDAVWLATQNHSALVTETTVVPFLPVNPEYSSTRNQGRQKLARFNAHEFATLVIDILSDAKRRQQGSSLSGSKDNVELILKTINNQHSVESQDNDQPDYDSVASDEDTDLETTASKTNRQKVNNNLSDELRIMQKKLQTLQSENSNLRKQATTNVYQVQTGSEYTDTSNHSSLKRRPSARGSRPMSMYETGSGQKPYLPMGEASRPEESRMRLQPFPAHASRLEKQNSTPESDYDNTPNDMEPDGMGSSRKGRQRSMVWPGDGLVPDTAEPHVAPSPTLPSTEDVIRKTEQITKNIQELLRAAQENKHDSYIPCSERIHVAVTEMAALFPKKPKSDMVRTSLRLLTSSAYRLQSECKKTLPGDPGSPTDVQLVTQQVIQCAYDIAKAAKQLVTITTKENNN

SEQ ID NO: 19902 - protein, 648 aa, Homo sapiens
MSKRLRSSEVCADCSGPDPSWASVNRGTFLCDECCSVHRSLGRHISQVRHLKHTPWPPTLLQMVETLYNNGANSIWEHSLLDPASIMSGRRKANPQDKVHPNKAEFIRAKYQMLAFVHRLPCRDDDSVTAKDLSKQLHSSVRTGNLETCLRLLSLGAQANFFHPEKGNTPLHVASKAGQILQAELLAVYGADPGTQDSSGKTPVDYARQGGHHELAERLVEIQYELTDRLAFYLCGRKPDHKNGQHFIIPQMADSSLDLSELAKAAKKKLQSLSNHLFEELAMDVYDEVDRRETDAVWLATQNHSALVTETTVVPFLPVNPEYSSTRNQGRQKSLDSDLSDGPVTVQEFMEVKNALVASEAKIQQLMKVNNNLSDELRIMQKKLQTLQSENSNLRKQATTNVYQVQTGSEYTDTSNHSSLKRRPSARGSRPMSMYETGSGQKPYLPMGEASRPEESRMRLQPFPAHASRLEKQNSTPESDYDNTPNDMEPDGMGSSRKGRQRSMVWPGDGLVPDTAEPHVAPSPTLPSTEDVIRKTEQITKNIQELLRAAQENKHDSYIPCSERIHVAVTEMAALFPKKPKSDMVRTSLRLLTSSAYRLQSECKKTLPGDPGSPTDVQLVTQQVIQCAYDIAKAAKQLVTITTKENNN

SEQ ID NO: 19903 - protein, 681 aa, Homo sapiens
MSKRLRSSEVCADCSGPDPSWASVNRGTFLCDECCSVHRSLGRHISQVRHLKHTPWPPTLLQMVETLYNNGANSIWEHSLLDPASIMSGRRKANPQDKVHPNKAEFIRAKYQMLAFVHRLPCRDDDSVTAKDLSKQLHSSVRTGNLETCLRLLSLGAQANFFHPEKGNTPLHVASKAGQILQAELLAVYGADPGTQDSSGKTPVDYARQGGHHELAERLVEIQYELTDRLAFYLCGRKPDHKNGQHFIIPQMADRRLSLDLSELAKAAKKKLQSLSNHLFEELAMDVYDEVDRRETDAVWLATQNHSALVTETTVVPFLPVNPEYSSTRNQGRQKLARFNAHEFATLVIDILSDAKRRQQGSSLSGSKDNVELILKTINNQHSVESQDNDQPDYDSVASDEDTDLETTASKTNRQKLQTLQSENSNLRKQATTNVYQVQTGSEYTDTSNHSSLKRRPSARGSRPMSMYETGSGQKPYLPMGEASRPEESRMRLQPFPAHASRLEKQNSTPESDYDNTPNDMEPDGMGSSRKGRQRSMVWPGDGLVPDTAEPHVAPSPTLPSTEDVIRKTEQITKNIQELLRAAQENKHDSYIPCSERIHVAVTEMAALFPKKPKSDMVRTSLRLLTSSAYRLQSECKKTLPGDPGSPTDVQLVTQQVIQCAYDIAKAAKQLVTITTKENNN

SEQ ID NO: 19904 - protein, 631 aa, Homo sapiens
MSKRLRSSEVCADCSGPDPSWASVNRGTFLCDECCSVHRSLGRHISQVRHLKHTPWPPTLLQMVETLYNNGANSIWEHSLLDPASIMSGRRKANPQDKVHPNKAEFIRAKYQMLAFVHRLPCRDDDSVTAKDLSKQLHSSVRTGNLETCLRLLSLGAQANFFHPEKGNTPLHVASKAGQILQAELLAVYGADPGTQDSSGKTPVDYARQGGHHELAERLVEIQYELTDRLAFYLCGRKPDHKNGQHFIIPQMADSSLDLSELAKAAKKKLQSLSNHLFEELAMDVYDEVDRRETDAVWLATQNHSALVTETTVVPFLPVNPEYSSTRNQGRQKLARFNAHEFATLVIDILSDAKRRQQGSSLSGSKDNVELILKTINNQHSVESQDNDQPDYDSVASDEDTDLETTASKTNRQKSLDSDLSDGPVTVQEFMEVKNALVASEAKIQQLMKASRLEKQNSTPESDYDNTPNDMEPDGMGSSRKGRQRSMVWPGDGLVPDTAEPHVAPSPTLPSTEDVIRKTEQITKNIQELLRAAQENKHDSYIPCSERIHVAVTEMAALFPKKPKSDMVRTSLRLLTSSAYRLQSECKKTLPGDPGSPTDVQLVTQQVIQCAYDIAKAAKQLVTITTKENNN

SEQ ID NO: 19905 - protein, 810 aa, Homo sapiens [sequence omitted]

SEQ ID NO: 19906 - protein, 595 aa, Homo sapiens
MAPEIHMTGPMCLIENTNGELVANPEALKILSAITQPVVVVAIVGLYRTGKSYLMNKLAGKNKGFSLGSTVKSHTKGIWMWCVPHPKKPEHTLVLLDTEGLGDVKKGDNQNDSWIFTLAVLLSSTLVYNSMGTINQQAMDQLYYVTELTHRIRSKSSPDENENEDSADFVSFFPDFVWTLRDFSLDLEADGQPLTPDEYLEYSLKLTQGTSQKDKNFNLPRLCIRKFFPKKKCFVFDLPIHRRKLAQLEKLQDEELDPEFVQQVADFCSYIFSNSKTKTLSGGIKVNGPRLESLVLTYINAISRGDLPCMENAVLALAQIENSAAVQKAIAHYDQQMGQKVQLPAETLQELLDLHRVSEREATEVYMKNSFKDVDHLFQKKLAAQLDKKRDDFCKQNQEASSDRCSALLQVIFSPLEEEVKAGIYSKPGGYCLFIQKLQDLEKKYYEEPRKGIQAEEILQTYLKSKESVTDAILQTDQILTEKEKEIEVECVKAESAQASAKMVEEMQIKYQQMMEEKEKSYQEHVKQLTEKMERERAQLLEEQEKTLTSKLQEQARVLKERCQGESTQLQNEIQKLQKTLKKKTKRYMSHKLKI

SEQ ID NO: 19907 - protein, 544 aa, Homo sapiens
MAPEIHMTGPMCLIENTNGELVANPEALKILSAITQPVVVVAIVGLYRTGKSYLMNKLAGKNKGFSLGSTVKSHTKGIWMWCVPHPKKPEHTLVLLDTEGLGDVKKGDNQNDSWIFTLAVLLSSTLVYNSMGTINQQAMDQLYYVTELTHRIRSKSSPDENENEDSADFVSFFPDFVWTLRDFSLDLEADGQPLTPDEYLEYSLKLTQGTSQKDKNFNLPRLCIRKFFPKKKCFVFDLPIHRRKLAQLEKLQDEELDPEFVQQVADFCSYIFSNSKTKTLSGGIKVNGPRLESLVLTYINAISRGDLPCMENAVLALAQIENSAAVQKAIAHYDQQMGQKVQLPAETLQELLDLHRAQLDKKRDDFCKQNQEASSDRCSALLQVIFSPLEEEVKAGIYSKPGGYCLFIQKLQDLEKKYYEEPRKGIQAEEILQTYLKSKESVTDAILQTDQILTEKEKEIEVECVKAESAQASAKMVEEMQIKYQQMMEEKEKSYQEHVKQLTEKMERERAQLLEEQEKTLTSKLQVSKCITLWFVFLFSLCSS

SEQ ID NO: 19908 - protein, 640 aa, Homo sapiens
MGERTLHAAVPTPGYPESESIMMAPICLVENQEEQLTVNSKALEILDKISQPVVVVAIVGLYRTGKSYLMNRLAGKRNGFPLGSTVQSETKGIWMWCVPHLSKPNHTLVLLDTEGLGDVEKSNPKNDSWIFALAVLLSSSFVYNSVSTINHQALEQLHYVTELAELIRAKSCPRPDEAEDSSEFASFFPDFIWTVRDFTLELKLDGNPITEDEYLENALKLIPGKNPKIQNSNMPRECIRHFFRKRKCFVFDRPTNDKQYLNHMDEVPEENLERHFLMQSDNFCSYIFTHAKTKTLREGIIVTGKRLGTLVVTYVDAINSGAVPCLENAVTALAQLENPAAVQRAADHYSQQMAQQLRLPTDTLQELLDVHAACEREAIAVFMEHSFKDENHEFQKKLVDTIEKKKGDFVLQNEEASAKYCQAELKRLSEHLTESILRGIFSVPGGHNLYLEEKKQVEWDYKLVPRKGVKANEVLQNFLQSQVVVEESILQSDKALTAGEKAIAAERAMKEAAEKEQELLREKQKEQQQMMEAQERSFQEYMAQMEKKLEEERENLLREHERLLKHKLKVQEEMLKEEFQKKSEQLNKEINQLKEKIESTKNEQLRLLKILDMASNIMIVTLPGASKLLGVGTKYLGSRI

SEQ ID NO: 19909 - protein, 639 aa, Homo sapiens
MEPAMEPETLEARINRATNPLNKELDWASINGFCEQLNEDFEGPPLATRLLAHKIQSPQEWEAIQALTVLETCMKSCGKRFHDEVGKFRFLNELIKVVSPKYLGSRTSEKVKNKILELLYSWTVGLPEEVKIAEAYQMLKKQGIVKSDPKLPDDTTFPLPPPRPKNVIFEDEEKSKMLARLLKSSHPEDLRAANKLIKEMVQEDQKRMEKISKRVNAIEEVNNNVKLLTEMVMSHSQGGAAAGSSEDLMKELYQRCERMRPTLFRLASDTEDNDEALAEILQANDNLTQVINLYKQLVRGEEVNGDATAGSIPGSTSALLDLSGLDLPPAGTTYPAMPTRPGEQASPEQPSASVSLLDDELMSLGLSDPTPPSGPSLDGTGWNSFQSSDATEPPAPALAQAPSMESRPPAQTSLPASSGLDDLDLLGKTLLQQSLPPESQQVRWEKQQPTPRLTLRDLQNKSSSCSSPSSSATSLLHTVSPEPPRPPQQPVPTELSLASITVPLESIKPSNILPVTVYDQHGFRILFHFARDPLPGRSDVLVVVVSMLSTAPQPIRNIVFQSAVPKVMKVKLQPPSGTELPAFNPIVHPSAITQVLLLANPQKEKVRLRYKLTFTMGDQTYNEMGDVDQFPPPETWGSL

SEQ ID NO: 19910 - protein, 606 aa, Homo sapiens
MEPAMEPETLEARINRATNPLNKELDWASINGFCEQLNEDFEGPPLATRLLAHKIQSPQEWEAIQALTYLGSRTSEKVKNKILELLYSWTVGLPEEVKIAEAYQMLKKQGIVKSDPKLPDDTTFPLPPPRPKNVIFEDEEKSKMLARLLKSSHPEDLRAANKLIKEMVQEDQKRMEKISKRVNAIEEVNNNVKLLTEMVMSHSQGGAAAGSSEDLMKELYQRCERMRPTLFRLASDTEDNDEALAEILQANDNLTQVINLYKQLVRGEEVNGDATAGSIPGSTSALLDLSGLDLPPAGTTYPAMPTRPGEQASPEQPSASVSLLDDELMSLGLSDPTPPSGPSLDGTGWNSFQSSDATEPPAPALAQAPSMESRPPAQTSLPASSGLDDLDLLGKTLLQQSLPPESQQVRWEKQQPTPRLTLRDLQNKSSSCSSPSSSATSLLHTVSPEPPRPPQQPVPTELSLASITVPLESIKPSNILPVTVYDQHGFRILFHFARDPLPGRSDVLVVVVSMLSTAPQPIRNIVFQSAVPKVMKVKLQPPSGTELPAFNPIVHPSAITQVLLLANPQKEKVRLRYKLTFTMGDQTYNEMGDVDQFPPPETWGSL

SEQ ID NO: 19911 - protein, 566 aa, Homo sapiens
MKSCGKRFHDEVGKFRFLNELIKVVSPKYLGSRTSEKVKNKILELLYSWTVGLPEEVKIAEAYQMLKKQGIVKSDPKLPDDTTFPLPPPRPKNVIFEDEEKSKMLARLLKSSHPEDLRAANKLIKEMVQEDQKRMEKISKRVNAIEEVNNNVKLLTEMVMSHSQGGAAAGSSEDLMKELYQRCERMRPTLFRLASDTEDNDEALAEILQANDNLTQVINLYKQLVRGEEVNGDATAGSIPGSTSALLDLSGLDLPPAGTTYPAMPTRPGEQASPEQPSASVSLLDDELMSLGLSDPTPPSGPSLDGTGWNSFQSSDATEPPAPALAQAPSMESRPPAQTSLPASSGLDDLDLLGKTLLQQSLPPESQQVRWEKQQPTPRLTLRDLQNKSSSCSSPSSSATSLLHTVSPEPPRPPQQPVPTELSLASITVPLESIKPSNILPVTVYDQHGFRILFHFARDPLPGRSDVLVVVVSMLSTAPQPIRNIVFQSAVPKVMKVKLQPPSGTELPAFNPIVHPSAITQVLLLANPQKEKVRLRYKLTFTMGDQTYNEMGDVDQFPPPETWGSL

SEQ ID NO: 19912 - protein, 552 aa, Homo sapiens
MEPAMEPETLEARINRATNPLNKELDWASINGFCEQLNEDFEGPPLATRLLAHKIQSPQEWEAIQALTVLETCMKSCGKRFHDEVGKFRFLNELIKVVSPKYLGSRTSEKVKNKILELLYSWTVGLPEEVKIAEAYQMLKKQGIVKSDPKLPDDTTFPLPPPRPKNVIFEDEEKSKMLARLLKSSHPEDLRAANKLIKEMVQEDQKRMEKISKRVNAIEEVNNNVKLLTEMVMSHSQGGAAAGSSEDLMKELYQRCERMRPTLFRLASDTEDNDEALGLSDPTPPSGPSLDGTGWNSFQSSDATEPPAPALAQAPSMESRPPAQTSLPASSGLDDLDLLGKTLLQQSLPPESQQVRWEKQQPTPRLTLRDLQNKSSSCSSPSSSATSLLHTVSPEPPRPPQQPVPTELSLASITVPLESIKPSNILPVTVYDQHGFRILFHFARDPLPGRSDVLVVVVSMLSTAPQPIRNIVFQSAVPKVMKVKLQPPSGTELPAFNPIVHPSAITQVLLLANPQKEKVRLRYKLTFTMGDQTYNEMGDVDQFPPPETWGSL

SEQ ID NO: 19913 - protein, 89 aa, Homo sapiens
MEPAMEPETLEARINRATNPLNKELDWASINGFCEQLNEDFEGPPLATRLLAHKIQSPQEWEAIQALTVRRGEATIRPPPCDDTKGGQD

SEQ ID NO: 19914 - protein, 656 aa, Homo sapiens
MEPAMEPETLEARINRATNPLNKELDWASINGFCEQLNEDFEGPPLATRLLAHKIQSPQEWEAIQALTVRRGEATIRPPPCDDTKVLETCMKSCGKRFHDEVGKFRFLNELIKVVSPKYLGSRTSEKVKNKILELLYSWTVGLPEEVKIAEAYQMLKKQGIVKSDPKLPDDTTFPLPPPRPKNVIFEDEEKSKMLARLLKSSHPEDLRAANKLIKEMVQEDQKRMEKISKRVNAIEEVNNNVKLLTEMVMSHSQGGAAAGSSEDLMKELYQRCERMRPTLFRLASDTEDNDEALAEILQANDNLTQVINLYKQLVRGEEVNGDATAGSIPGSTSALLDLSGLDLPPAGTTYPAMPTRPGEQASPEQPSASVSLLDDELMSLGLSDPTPPSGPSLDGTGWNSFQSSDATEPPAPALAQAPSMESRPPAQTSLPASSGLDDLDLLGKTLLQQSLPPESQQVRWEKQQPTPRLTLRDLQNKSSSCSSPSSSATSLLHTVSPEPPRPPQQPVPTELSLASITVPLESIKPSNILPVTVYDQHGFRILFHFARDPLPGRSDVLVVVVSMLSTAPQPIRNIVFQSAVPKVMKVKLQPPSGTELPAFNPIVHPSAITQVLLLANPQKEKVRLRYKLTFTMGDQTYNEMGDVDQFPPPETWGSL

SEQ ID NO: 19915 - protein, 586 aa, Homo sapiens
MALEIHMSDPMCLIENFNEQLKVNQEALEILSAITQPVVVVAIVGLYRTGKSYLMNKLAGKNKGFSVASTVQSHTKGIWIWCVPHPNWPNHTLVLLDTEGLGDVEKADNKNDIQIFALALLLSSTFVYNTVNKIDQGAIDLLHNVTELTDLLKARNSPDLDRVEDPADSASFFPDLVWTLRDFCLGLEIDGQLVTPDEYLENSLRPKQGSDQRVQNFNLPRLCIQKFFPKKKCFIFDLPAHQKKLAQLETLPDDELEPEFVQQVTEFCSYIFSHSMTKTLPGGIMVNGSRLKNLVLTYVNAISSGDLPCIENAVLALAQRENSAAVQKAIAHYDQQMGQKVQLPMETLQELLDLHRTSEREAIEVFMKNSFKDVDQSFQKELETLLDAKQNDICKRNLEASSDYCSALLKDIFGPLEEAVKQGIYSKPGGHNLFIQKTEELKAKYYREPRKGIQAEEVLQKYLKSKESVSHAILQTDQALTETEKKKKEAQVKAEAEKAEAQRLAAIQRQNEQMMQERERLHQEQVRQMEIAKQNWLAEQQKMQEQQMQEQAAQLSTTFQAQNRSLLSELQHAQRTVNNDDPCVLL

SEQ ID NO: 19916 - protein, 489 aa, Homo sapiens
MALEIHMSDPMCLIENFNEQLKVNQEALEILSAITQPVVVVAIVGLYRTGKSYLMNKLAGKNKGFSVASTVQSHTKGIWIWCVPHPNWPNHTLVLLDTEGLGDVEKADNKNDIQIFALALLLSSTFVYNTVNKIDQGAIDLLHNVTELTDLLKARNSPDLDRVEDPADSASFFPDLVWTLRDFCLGLEIDGQLVTPDEYLENSLRPKQGSDQRVQNFNLPRLCIQKFFPKKKCFIFDLPAHQKKLAQLETLPDDELEPEFVQQVTEFCSYIFSHSMTKTLPGGIMVNGSRLKNLVLTYVNAISSGDLPCIENAVLALAQRENSAAVQKAIAHYDQQMGQKVQLPMETLQELLDLHRTSEREAIEVFMKNSFKDVDQSFQKELETLLDAKQNDICKRNLEASSDYCSALLKDIFGPLEEAVKQGIYSKPGGHNLFIQKTEELKAKYYREPRKGIQAEEVLQKYLKSKESVSHAILQTDQALTETEKKKKK

SEQ ID NO: 19917 - protein, 4516 aa, Homo sapiens
MAAQVAAREARDFREAPTLRLTSGAGLEAVGAVELEEEEENEEEAAARRARSFAQDARVRFLGGRLAMMLGFTEEKWSQYLESEDNRQVLGEFLESTSPACLVFSFAASGRLAASQEIPRDANHKLVFISKKITESIGVNDFSQVVLFGELPALSLGHVSAFLDEILVPVLSNKNNHKSWSCFTSQDMEYHIEVMKKKMYIFRGKMSRRTLLPIPTVAGKMDLDQNCSENKPPSNERIILHAIESVVIEWSHQIQEIIERDSVQRLLNGLHLSPQAELDFWMMRRENLSCIYDQLQAPVVLKMVKILTTKQSSYFPTLKDIFLAVENALLEAQDVELYLRPLRRHIQCLQETEFPQTRILIAPLFHTICLIWSHSKFYNTPARVIVLLQEFCNLFINQATAYLSPEDLLRGEIEESLEKVQVAVNILKTFKNSFFNYRKKLASYFMGRKLRPWDFQSHLVFCRFDKFLDRLIKIEDIFATTLEFEKLERLEFGGTKGAILNGQVHEMSEELMELCKLFKQSTYDPSDCTNMEFESDYVAFKSKTLEFDRRLGTIICEAFFNCNGLEAAFKLLTIFGNFLEKPVVMEIFSLHYSTLVHMFNTELDVCKQLYNEHMKQIECGHVVLNKNMPFTSGNMKWAQQVLQRLQMFWSNFASLRYLFLGNPDHALVYQKYVEMTTLLDQFESRIYNEWKSNVDEICEFNLNQPLVKFSAINGLLCVNFDPKLVAVLREVKYLLMLKKQDIPDSALAIFKKRNTILKYIGNLDLLVQGYNKLKQTLLEVEYPLIEDELRAIDEQLTAATTWLTWQDDCWGYIERVRAATSELEHRVERTQKNVKVIQQTMRGWARCVLPPRREHRREAAFTLEDKGDLFTKKYKLIQGDGCKIHNLVEENRKLFKANPSLDTWKIYVEFIDDIVVEGFFQAIMHDLDFFLKNTEKQLKPAPFFQAQMILLPPEIVFKPSLDREAGDGFYDLVEEMLCNSFRMSAQMNRIATHLEIKNYQNDMDNMLGLAEVRQEIMNRVVNVINKVLDFRNTLETHTYLWVDDRAEFMKHFLLYGHAVSSDEMDAHANEEIPEQPPTLEQFKEQIDIYEALYVQMSKFEDFRVFDSWFKVDMKPFKVSLLTIIKKWSWMFQEHLLRFVIDSLNELQEFIKETDSGLQRELNEGDHDGLVDIMVHLLAVRSRQRATDELFEPLKETITLLESYGQKMPEQVYIQLEELPERWETTKKIAATVRHEVSPLHNAEVTLIRKKCILFDAKQAEFRERFRHYAPLGFNAENPYTALDKANEELEALEEEMLQMQESTRLFEVALPEYKQMKQCRKEIKLLKGLWDVIIYVRRSIDNWTKTQWRQIHVEQMDVELRRFAKEIWSLNKEVRVWDAYTGLEGTVKDMTASLRAITELQSPALRDRHWHQLMKAIGVKFLINEATTLADLLALRLHRVEDDVRRIVDKAVKELGTEKVITEISQTWATMKFSYEVHYRTGIPLLKSDEQLFETLEHNQVQLQTLLQSKYVEYFIEQVLSWQNKLNIADLVIFTWMEVQRTWSHLESIFVCSEDIRIQLVKDARRFDGVDAEFKELMFKTAKVENVLEATCRPNLYEKLKDLQSRLSLCEKALAEYLETKRIAFPRFYFVSSADLLDILSKGAQPKQVTCHLAKLFDSIADLQFEDNQDVSAHRAVGMYSKEKEYVPFQAECECVGHVETWLLQLEQTMQETVRHSITEAIVAYEEKPRELWIFDFPAQVALTSSQIWWTTDVGIAFSRLEEGYETALKDFHKKQISQLNTLITLLLGELPPGDRQKIMTICTIDVHARDVVAKLISQKVVSPQAFTWLSQLRHRWEDTQKHCFVNICDAQFQYFYEYLGNSPRLVITPLTDRCYITLTQSLHLTMSGAPAGPAGTGKTETTKDLGRALGMMVYVFNCSEQMDYKSIGNIYKGLVQTGAWGCFDEFNRISVEVLSVVAVQVKMIHDAIRNRKKRFVFLGEAITLKPSVGIFITMNPGYAGRTELPENLKALFRPCAMVAPDIELICEILLVAEGFVDARALARKFITLYTLCKELLSKQDHYDWGLRAIKSVLVVAGSLKRGDKNRPEDQVLMRALRDFNMPKIVTDDIPVFLGLVGDLFPALDVPRRRKLHFEQMVRQSTLELRLQPEESFILKVVQLEELLAVRHSVFVVGNAGTGKSKILRTLNRTYVNMKQKPVWNDLNPKAVTTDELFGFIHHATREWKDGKIVYSYFIGLFSSILREQANLKHDGPKWIVLDGDIDPMWIESLNTVMDDNKVLTLASNERIALTPFMRLLFEIHHLRSATPATVSRAGILYVNPQDLGWNPYVASWIDRRRHQSEKANLTILFDKYVPACLDKLRTSFKTITSIPESSLVQTLCVLLECLLTPENVPSDSPKEVYEVYFVFACIWAFGGTLLQDQISDYQADFSRWWQKEMKAVKFPSQGTIFDYYVDHKTKKLLPWADKIAQFTMDPDVPLQTVLVHTTETARLRYFMELLLEKGKPLMLVGNAGVGKTVFVGDTLASLSEDYIVSRVPFNYYTTSTALQKILEKPLEKKAGHNYGPGGNKKLIYFIDDMNMPEVDLYGTVQPHTLIRQHIDYGHWYDRQKVMLKEIHNCQYVACMNPMVGSFTINPRLQRHFTVFAFNFPSLDALNTIYGQIFSFHFQQQAFAPSILRSGPTLIQATIAFHQTMMCNFLPTAIKFHYIFNLRDLSNVFQGILFASPECLKGPLDLIHLWLHESARVYGDKLIDKKDCDLFQRRMLETAYKYFEGIDSHMLLQQPLIYCHFADRGKDPHYMPVKDWEVLKTILTETLDNYNELNAAMHLVLFEDAMQHVCRISRILRTPQGCALLVGVGGSGKQSLSRLAAYLRGLEVFQITLTEGYGIQELRVDLANLYIRTGAKNMPTVFLLTDAQVLDESFLVLINDLLASGEIPDLFSDEDVDKIISGIHNEVHALGMVDSRENCWKFFMARVRLQLKIILCFSPVGRTLRVRARKFPAIVNCTAIDWFHAWPQEALVSVSRRFIEETKGIEPVHKDSISLFMAHVHTTVNEMSTRYYQNERRHNYTTPKSFLEQISLFKNLLKKKQNEVSEKKERLVNGIQKLKTTASQVGDLKARLASQEAELQLRNHDAEALITKIGLQTEKVSREKTIADAEERKVTAIQTEVFQKQRECEADLLKAEPALVAATAALNTLNRVNLSELKAFPNPPIAVTNVTAAVMVLLAPRGRVPKDRSWKAAKVFMGKVDDFLQALINYDKEHIPENCLKVVNEHYLKDPEFNPNLIRTKSFAAAGLCAWVINIIKFYEVYCDVEPKRQALAQANLELAAATEKLEAIRKKLVDLDRNLSRLTASFEKATAEKVRCQEEVNQTNKTIKLANRLVKELEAKKIRWGQSIKSFEAQEKTLCGDVLLTAAFVSYVGPFTRQYRQELVHCKWVPFLQQKVSIPLTEGLDLISMLTDDATIAAWNNEGLPSDRMSTENAAILTHCERWPLVIDPQQQGIKWIKNKYGMDLKVTHLGQKGFLNAIETALAFGDVILIENLEETIDPVLDPLLGRNTIKKGKYIRIGDKECEFNKNFRLILHTKLANPHYKPELQAQTTLLNFTVTEDGLEAQLLAEVVSIERPDLEKLKLVLTKHQNDFKIELKYLEDDLLLRLSAAEGSFLDDTKLVERLEATKTTVAEIEHKVIEAKENERKINEARECYRPVAARASLLYFVINDLQKINPLYQFSLKAFNVLFHRAIEQADKVEDMQGRISILMESITHAVFLYTSQALFEKDKLTFLSQMAFQILLRKKEIDPLELDFLLRFTVEHTHLSPVDFLTSQSWSAIKAIAVMEEFRGIDRDVEGSAKQWRKWVESECPEKEKLPQEWKKKSLIQKLILLRAMRPDRMTYALRNFVEEKLGAKYVERTRLDLVKAFEESSPATPIFFILSPGVDALKDLEILGKRLGFTIDSGKFHNVSLGQGQETVAEVALEKASKGGHWVILQNVHLVAKWLGTLEKLLERFSQGSHRDYRVFMSAESAPTPDEHIIPQGLLENSIKITNEPPTGMLANLHAALYNFDQDTLEICSKEQEFKSILFSLCYFHACVAGRLRFGPQGWSRSYPFNPGDLTICASVLYNYLEANSKVPWEDLRYLFGEIMYGGHITDDWDRKLCRVYLEEFMNPSLTEDELMLAPGFAAPPYLDYAGYHQYIEEMLPPESPALYGLHPNAEIEFLTVTSNTLFRTLLEMQPRNALSGDELGQSTEEKVKNVLDDILEKLPEEFNMAEIMQKNSNRSPYVLVCFQECERMNILIREIRISLEQLDLSLKGELALSPAVEAQQFALSYDTVPDTWSKLAYPSTYGLAQWFNDLLLRCRELDTWTQDLTLPAVVWLSGFFNPQSFLTAIMQTMARKNEWPLDKTRLTADVTKKTKEDYGHPPREGAYLHGLFMEGARWDTQAGTIVEARLKELACPMPVIFAKATPVDRQETKQTYECPVYRTKLRGPSYIWTFRLKSEEKTAKWVLAGVALLLEA

SEQ ID NO: 19918 - protein, 613 aa, Homo sapiens
MAATAVAAAVAGTESAQGPPGPAASLELWLNKATDPSMSEQDWSAIQNFCEQVNTDPNGPTHAPWLLAHKIQSPQEKEALYALTVLEMCMNHCGEKFHSEVAKFRFLNELIKVLSPKYLGSWATGKVKGRVIEILFSWTVWFPEDIKIRDAYQMLKKQGIIKQDPKLPVDKILPPPSPWPKSSIFDADEEKSKLLTRLLKSNHPEDLQAANRLIKNLVKEEQEKSEKVSKRVSAVEEVRSHVKVLQEMLSMYRRPGQAPPDQEALQVVYERCEKLRPTLFRLASDTTDDDDALAEILQANDLLTQGVLLYKQVMEGRVTFGNRVTSSLGDIPVSRVFQNPAGCMKTCPLIDLEVDNGPAQMGTVVPSLLHQDLAALGISDAPVTGMVSGQNCCEEKRNPSSSTLPGGGVQNPSADRNLLDLLSAQPAPCPLNYVSQKSVPKEVPPGTKSSPGWSWEAGPLAPSPSSQNTPLAQVFVPLESVKPSSLPPLIVYDRNGFRILLHFSQTGAPGHPEVQVLLLTMMSTAPQPVWDIMFQVAVPKSMRVKLQPASSSKLPAFSPLMPPAVISQMLLLDNPHKEPIRLRYKLTFNQGGQPFSEVGEVKDFPDLAVLGAA

SEQ ID NO: 19919 - protein, 723 aa, Homo sapiens
MAEAEGESLESWLNKATNPSNRQEDWEYIIGFCDQINKELEGPQIAVRLLAHKIQSPQEWEALQALTVLEACMKNCGRRFHNEVGKFRFLNELIKVVSPKYLGDRVSEKVKTKVIELLYSWTMALPEEAKIKDAYHMLKRQGIVQSDPPIPVDRTLIPSPPPRPKNPVFDDEEKSKLLAKLLKSKNPDDLQEANKLIKSMVKEDEARIQKVTKRLHTLEEVNNNVRLLSEMLLHYSQEDSSDGDRELMKELFDQCENKRRTLFKLASETEDNDNSLGDILQASDNLSRVINSYKTIIEGQVINGEVATLTLPDSEGNSQCSNQGTLIDLAELDTTNSLSSVLAPAPTPPSSGIPILPPPPQASGPPRSRSSSQAEATLGPSSTSNALSWLDEELLCLGLADPAPNVPPKESAGNSQWHLLQREQSDLDFFSPRPGTAACGASDAPLLQPSAPSSSSSQAPLPPPFPAPVVPASVPAPSAGSSLFSTGVAPALAPKVEPAVPGHHGLALGNSALHHLDALDQLLEEAKVTSGLVKPTTSPLIPTTTPARPLLPFSTGPGSPLFQPLSFQSQGSPPKGPELSLASIHVPLESIKPSSALPVTAYDKNGFRILFHFAKECPPGRPDVLVVVVSMLNTAPLPVKSIVLQAAVPKSMKVKLQPPSGTELSPFSPIQPPAAITQVMLLANPLKEKVRLRYKLTFALGEQLSTEVGEVDQFPPVEQWGNL

SEQ ID NO: 19920 - protein, 690 aa, Homo sapiens
MAEAEGESLESWLNKATNPSNRQEDWEYIIGFCDQINKELEGPQIAVRLLAHKIQSPQEWEALQALTYLGDRVSEKVKTKVIELLYSWTMALPEEAKIKDAYHMLKRQGIVQSDPPIPVDRTLIPSPPPRPKNPVFDDEEKSKLLAKLLKSKNPDDLQEANKLIKSMVKEDEARIQKVTKRLHTLEEVNNNVRLLSEMLLHYSQEDSSDGDRELMKELFDQCENKRRTLFKLASETEDNDNSLGDILQASDNLSRVINSYKTIIEGQVINGEVATLTLPDSEGNSQCSNQGTLIDLAELDTTNSLSSVLAPAPTPPSSGIPILPPPPQASGPPRSRSSSQAEATLGPSSTSNALSWLDEELLCLGLADPAPNVPPKESAGNSQWHLLQREQSDLDFFSPRPGTAACGASDAPLLQPSAPSSSSSQAPLPPPFPAPVVPASVPAPSAGSSLFSTGVAPALAPKVEPAVPGHHGLALGNSALHHLDALDQLLEEAKVTSGLVKPTTSPLIPTTTPARPLLPFSTGPGSPLFQPLSFQSQGSPPKGPELSLASIHVPLESIKPSSALPVTAYDKNGFRILFHFAKECPPGRPDVLVVVVSMLNTAPLPVKSIVLQAAVPKSMKVKLQPPSGTELSPFSPIQPPAAITQVMLLANPLKEKVRLRYKLTFALGEQLSTEVGEVDQFPPVEQWGNL

SEQ ID NO: 19921 - protein, 592 aa, Homo sapiens
MALPEEAKIKDAYHMLKRQGIVQSDPPIPVDRTLIPSPPPRPKNPVFDDEEKSKLLAKLLKSKNPDDLQEANKLIKSMVKEDEARIQKVTKRLHTLEEVNNNVRLLSEMLLHYSQEDSSDGDRELMKELFDQCENKRRTLFKLASETEDNDNSLGDILQASDNLSRVINSYKTIIEGQVINGEVATLTLPDSEGNSQCSNQGTLIDLAELDTTNSLSSVLAPAPTPPSSGIPILPPPPQASGPPRSRSSSQAEATLGPSSTSNALSWLDEELLCLGLADPAPNVPPKESAGNSQWHLLQREQSDLDFFSPRPGTAACGASDAPLLQPSAPSSSSSQAPLPPPFPAPVVPASVPAPSAGSSLFSTGVAPALAPKVEPAVPGHHGLALGNSALHHLDALDQLLEEAKVTSGLVKPTTSPLIPTTTPARPLLPFSTGPGSPLFQPLSFQSQGSPPKGPELSLASIHVPLESIKPSSALPVTAYDKNGFRILFHFAKECPPGRPDVLVVVVSMLNTAPLPVKSIVLQAAVPKSMKVKLQPPSGTELSPFSPIQPPAAITQVMLLANPLKKQVLSFLGKACLQPWGQAILLTTSCLA

SEQ ID NO: 19922 - protein, 651 aa, Homo sapiens
MKNCGRRFHNEVGKFRFLNELIKVVSPKYLGDRVSEKVKTKVIELLYSWTMALPEEAKIKDAYHMLKRQGIVQSDPPIPVDRTLIPSPPPRPKNPVFDDEEKSKLLAKLLKSKNPDDLQEANKLIKSMVKEDEARIQKVTKRLHTLEEVNNNVRLLSEMLLHYSQEDSSDGDRELMKELFDQCENKRRTLFKLASETEDNDNSLGDILQASDNLSRVINSYKTIIEGQVINGEVATLTLPDSEGNSQCSNQGTLIDLAELDTTNSLSSVLAPAPTPPSSGIPILPPPPQASGPPRSRSSSQAEATLGPSSTSNALSWLDEELLCLGLADPAPNVPPKESAGNSQWHLLQREQSDLDFFSPRPGTAACGASDAPLLQPSAPSSSSSQAPLPPPFPAPVVPASVPAPSAGSSLFSTGVAPALAPKVEPAVPGHHGLALGNSALHHLDALDQLLEEAKVTSGLVKPTTSPLIPTTTPARPLLPFSTGPGSPLFQPLSFQSQGSPPKGPELSLASIHVPLESIKPSSALPVTAYDKNGFRILFHFAKECPPGRPDVLVVVVSMLNTAPLPVKSIVLQAAVPKSMKVKLQPPSGTELSPFSPIQPPAAITQVMLLANPLKEKVRLRYKLTFALGEQLSTEVGEVDQFPPVEQWGNL

SEQ ID NO: 19923 - protein, 366 aa, Homo sapiens
MASAVLSSVPTTASRFALLQVDSGSGSDSEPGKGKGRNTGKSQTLGSKSTTNEKKREKRRKKKEQQQSEANELRNLAFKKIPQKSSHAVCNAQHDLPLSNPVQKDSREENWQEWRQRDEQLTSEMFEADLEKALLLSKLEYEEHKKEYEDAENTSTQSKVMNKKDKRKNHQGKDRPLTVSLKDFHSEDHISKKTEELSSSQTLSHDGGFFNRLEDDVHKILIREKRREQLTEYNGTDNCTAHEHNQEVVLKDGRIERLKLELERKDAEIQKLKNVITQWEAKYKEVKARNAQLLKMLQEGEMKDKAEILLQVDESQSIKNELTIQVTSLHAALEQERSKVKVLQAELAKYQGGRKGKRNSESDQCR

SEQ ID NO: 19924 - protein, 315 aa, Homo sapiens
MASAVLSSVPTTASRFALLQVDSGSGSDSEPGKGKGRNTGKSQTLGSKSTTNEKKREKRRKKKEQQQSEANELRNLAFKKIPQKSSHAVCNAQHDLPLSNPVQKDSREENWQEWRQRDEQLTSEMFEADLEKALLLSKLEYEEHKKEYEDAENTSTQSKVMNKKDKRKNHQGKDRPLTVSLKDFHSEDHISKKTEEVVLKDGRIERLKLELERKDAEIQKLKNVITQWEAKYKEVKARNAQLLKMLQEGEMKDKAEILLQVDESQSIKNELTIQVTSLHAALEQERSKVKVLQAELAKYQGGRKGKRNSESDQCR

SEQ ID NO: 19925 - protein, 4462 aa, Homo sapiens
MTMAPDVRLEYLEEVASIVLKFKPDKWSKLIGAEENVALFTEFFEKPDVQVLVLTLNAAGMIIPCLGFPQSLKSKGVYFIKTKSENINKDNYRARLLYGDISPTPVDQLIAVVEEVLSSLLNQSENMAGWPQVVSEDIVKQVHRLKNEMFVMSGKIKGKTLLPIPEHLGSLDGTLESMERIPSSLDNLLLHAIETTIIDWSHQIRDVLSKDSAQALLDGLHPLPQVEFEFWDTRLLNLKCIHEQLNRPKVNKIVEILEKAKSCYWPALQNVYTNVTEGLKEANDIVLYLKPLRILLEEMEQADFTMLPTFIAKVLDTICFIWATSEYYNTPARIIVILQEFCNQIIEMTRTFLSPEEVLKGLQGEIEEVLSGISLAVNVLKELYQTYDFCCVNMKLFFKDKEPVPWEFPSSLAFSRINSFFQRIQTIEELYKTAIEFLKLEKIELGGVRGNLLGSLVTRIYDEVFELVKVFADCKYDPLDPGDSNFDRDYADFEIKIQDLDRRLATIFCQGFDDCSCIKSSAKLLYMCGGLMERPLILAEVAPRYSVMLELFDAELDNAKILYDAQMAASEEGNIPLIHKNMPPVAGQLKWSLELQERLEVSMKHLKHVEHPVMSGAEAKLTYQKYDEMMELLRCHREKIYQQWVAGVDQDCHFNLGQPLILRDAASNLIHVNFSKALVAVLREVKYLNFQQQKEIPDSAESLFSENETFRKFVGNLELIVGWYNEIKTIVKAVEFLLIKSELEAIDVKLLSAETTLFWNGEGVFQYIQEVREILHNLQNRMQKAKQNIEGISQAMKDWSANPLFERKDNKKEALLDLDGRIANLNKRYAAVRDAGVKIQAMVAENAELFRADTLSLPWKDYVIYIDDMVLDEFDQFIRKSLSFLMDNMVIDESIAPLFEIRMELDEDGLTFNPTLEVGSDRGFLALIEGLVNDIYNVARLIPRLAKDRMNYKMDLEDNTDLIEMREEVSSLVINAMKEAEEYQDSFERYSYLWTDNLQEFMKNFLIYGCAVTAEDLDTWTDDTIPKTPPTLAQFQEQIDSYEKLYEEVSKCENTKVFHGWLQCDCRPFKQALLSTIRRWGFMFKRHLSNHVTNSLADLEAFMKVARMGLTKPLKEGDYDGLVEVMGHLMKVKERQAATDNMFEPLKQTIELLKTYGEEMPEEIHLKLQELPEHWANTKKLAIQVKLTVAPLQANEVSILRRKCQQFELKQHEFRERFRREAPFSFSDPNPYKSLNKQQKSISAMEGIMEALSKSGGLFEVPVPDYKQLKACHREVRLLKELWDMVVVVNTSIEDWKTTKWKDINVEQMDIDCKKFAKDMRSLDKEMKTWDAFVGLDNTVKNVITSLRAVSELQNPAIRERHWQQLMQATQVKFKMSEETTLADLLQLNLHSYEDEVRNIVDKAVKESGMEKVLKALDSTWSMMEFQHEPHPRTGTMMLKSSEVLVETLEDNQVQLQNLMMSKYLAHFLKEVTSWQQKLSTADSVISIWFEVQRTWSHLESIFIGSEDIRTQLPGDSQRFDDINQEFKALMEDAVKTPNVVEATSKPGLYNKLEALKKSLAICEKALAEYLETKRLAFPRFYFVSSADLLDILSNGNDPVEVSRHLSKLFDSLCKLKFRLDASDKPLKVGLGMYSKEDEYMVFDQECDLSGQVEVWLNRVLDRMCSTLRHEIPEAVVTYEEKPREQWILDYPAQVALTCTQIWWTTEVGLAFARLEEGYENAIRDYNKKQISQLNVLITLLMGNLNAGDRMKIMTICTIDVHARDVVAKMIVAKVESSQAFTWQAQLRHRWDEEKRHCFANICDAQIQYSYEYLGNTPRLVITPLTDRCYITLTQSLHLIMGGAPAGPAGTGKTETTKDLGRALGTMVYVFNCSEQMDYKSCGNIYKGLAQTGAWGCFDEFNRISVEVLSVIAVQVKCVQDAIRAKKKAFNFLGEIIGLIPTVGIFITMNPGYAGRAELPENLKALFRPCAMVVPDFELICEIMLMAEGFLEARLLARKFITLYTLCKELLSKQDHYDWGLRAIKSVLVVAGSLKRGDPSRAEDQVLMRALRDFNIPKIVTDDLPVFMGLIGDLFPALDVPRKRDLNFEKIIKQSIVELKLQAEDSFVLKVVQLEELLQVRHSVFIVGNAGSGKSQVLKSLNKTYQNLKRKPVAVDLDPKAVTCDELFGIINPVTREWKDGLFSTIMRDLANITHDGPKWIILDGDIDPMWIESLNTVMDDNKVLTLASNERIPLNRTMRLVFEISHLRTATPATVSRAGILYINPADLGWNPVVSSWIERRKVQSEKANLMILFDKYLPTCLDKLRFGFKKITPVPEITVIQTILYLLECLLTEKTVPPDSPRELYELYFVFTCFWAFGGAMFQDQLVDYRVEFSKWWINEFKTIKFPSQGTIFDYYIDPDTKKFLPWTDKVPSFELDPDVPLQASLVHTTETIRIRYFMDLLMEKSWPVMLVGNAGTGKSVLMGDKLESLNTDNYLVQAVPFNFYTTSAMLQGVLEKPLEKKSGRNYGPPGTKKLVYFIDDMNMPEVDKYGTVAPHTLIRQHMDHRHWYDRHKLTLKDIHNCQYVACMNPTSGSFTIDSRLQRHFCVFAVSFPGQEALTTIYNTILTQHLAFRSVSMAIQRISSQLVAAALALHQKITATFLPTAIKFHYVFNLRDLSNIFQGLLFSTAEVLKTPLDLVRLWLHETERVYGDKMVDEKDQETLHRVTMASTKKFFDDLGDELLFAKPNIFCHFAQGIGDPKYVPVTDMAPLNKLLVDVLDSYNEVNAVMNLVLFEDAVAHICRINRILESPRGNALLVGVGGSGKQSLSRLAAYISGLDVFQITLKKGYGIPDLKIDLAAQYIKAAVKNVPSVFLMTDSQVAEEQFLVLINDLLASGEIPGLFMEDEVENIISSMRPQVKSLGMNDTRETCWKFFIEKVRRQLKVILCFSPVGSVLRVRARKFPAVVNCTAIDWFHEWPEDALVSVSARFLEETEGIPWEVKASISFFMSYVHTTVNEMSRVYLATERRYNYTTPKTFLEQIKLYQNLLAKKRTELVAKIERLENGLMKLQSTASQVDDLKAKLAIQEAELKQKNESADQLIQVVGIEAEKVSKEKAIADQEEVKVEVINKNVTEKQKACETDLAKAEPALLAAQEALDTLNKNNLTELKSFGSPPDAVVNVTAAVMILTAPGGKIPKDKSWKAAKIMMGKVDTFLDSLKKFDKEHIPEACLKAFKPYQGNPTFDPEFIRSKSTAAAGLCSWCINIVRFYEVYCDVAPKRQALEEANAELAEAQEKLSRIKNKIAELNANLSNLTSAFEKATAEKIKCQQEADATNRVILLANRLVGGLASENIRWAESVENFRSQGVTLCGDVLLISAFVSYVGYFTKKYRNELMEKFWIPYIHNLKVPIPITNGLDPLSLLTDDADVATWNNQGLPSDRMSTENATILGNTERWPLIVDAQLQGIKWIKNKYRSELKAIRLGQKSYLDVIEQAISEGDTLLIENIGETVDPVLDPLLGRNTIKKGKYIKIGDKEVEYHPKFRLILHTKYFNPHYKPEMQAQCTLINFLVTRDGLEDQLLAAVVAKERPDLEQLKANLTKSQNEFKIVLKELEDSLLARLSAASGNFLGDTALVENLETTKHTASEIEEKVVEAKITEVKINEARENYRPAAERASLLYFILNDLNKINPVYQFSLKAFNVVFEKAIQRTTPANEVKQRVINLTDEITYSVYMYTARGLFERDKLIFLAQVTFQVLSMKKELNPVELDFLLRFPFKAGVVSPVDFLQHQGWGGIKALSEMDEFKNLDSDIEGSAKRWKKLVESEAPEKEIFPKEWKNKTALQKLCMVRCLRPDRMTYAIKNFVEEKMGSKFVEGRSVEFSKSYEESSPSTSIFFILSPGVDPLKDVEALGKKLGFTIDNGKLHNVSLGQGQEVVAENALDVAAEKGHWVILQNIHLVARWLGTLDKKLEHYSTGSHEDYRVFISAEPAPSPETHIIPQGILENAIKITNEPPTGMHANLHKALDLFTQDTLEMCTKEMEFKCMLFALCYFHAVVAERRKFGAQGWNRSYPFNNGDLTISINVLYNYLEANPKVPWDDLRYLFGEIMYGGHITDDWDRRLCRTYLAEYIRTEMLEGDVLLAPGFQIPPNLDYKGYHEYIDENLPPESPYLYGLHPNAEIGFLTVTSEKLFRTVLEMQPKETDSGAGTGVSREEKVKAVLDDILEKIPETFNMAEIMAKAAEKTPYVVVAFQECERMNILTNEMRRSLKELNLGLKGELTITTDVEDLSTALFYDTVPDTWVARAYPSMMGLAAWYADLLLRIRELEAWTTDFALPTTVWLAGFFNPQSFLTAIMQSMARKNEWPLDKMCLSVEVTKKNREDMTAPPREGSYVYGLFMEGARWDTQTGVIAEARLKELTPAMPVIFIKAIPVDRMETKNIYECPVYKTRIRGPTYVWTFNLKTKEKAAKWILAAVALLLQV

SEQ ID NO: 19926 - protein, 566 aa, Homo sapiens
MEQADFTMLPTFIAKVLDTICFIWATSEYYNTPARIIVILQEFCNQIIEMTRTFLSPEEVLKGLQGEIEEVLSGISLAVNVLKELYQTYDFCCVNMKLFFKDKEPVPWEFPSSLAFSRINSFFQRIQTIEELYKTAIEFLKLEKIELGGVRGNLLGSLVTRIYDEVFELVKVFADCKYDPLDPGDSNFDRDYADFEIKIQDLDRRLATIFCQGFDDCSCIKSSAKLLYMCGGLMERPLILAEVAPRYSVMLELFDAELDNAKILYDAQMAASEEGNIPLIHKNMPPVAGQLKWSLELQERLEVSMKHLKHVEHPVMSGAEAKLTYQKYDEMMELLRCHREKIYQQWVAGVDQDCHFNLGQPLILRDAASNLIHVNFSKALVAVLREVKYLNFQQQKEIPDSAESLFSENETFRKFVGNLELIVGWYNEIKTIVKAVEFLLIKSELEAIDVKLLSAETTLFWNGEGVFQYIQEVREILHNLQNRMQKAKQNIEGISQAMKDWSANPLFERKDNKKEALLDLDGRIANLNKRYAAVRDAGVKIQAMVAVRKHPGGFLRTHLLLAGRRE

SEQ ID NO: 19927 - protein, 185 aa, Homo sapiens
MKFTIVFAGLLGVFLAPALANYNINVNDDNNNAGSGQQSVSVNNEHNVANVDNNNGWDSWNSIWDYGNGFAATRLFQKKTCIVHKMNKEVMPSIQSLDALVKEKKLQGKGPGGPPPKGLMYSVNPNKVDDLSKFGKNIANMCRGIPTYMAEEMQEASLFFYSGTCYTTSVLWIVDISFCGDTVEN

SEQ ID NO: 19928 - protein, 266 aa, Homo sapiens
MVCLKLPGGSCMTALTVTLMVLSSPLALSGDTRPRFLWQPKRECHFFNGTERVRFLDRYFYNQEESVRFDSDVGEFRAVTELGRPDAEYWNSQKDILEQARAAVDTYCRHNYGVVESFTVQRRVQPKVTVYPSKTQPLQHHNLLVCSVSGFYPGSIEVRWFLNGQEEKAGMVSTGLIQNGDWTFQTLVMLETVPRSGEVYTCQVEHPSVTSPLTVEWRARSESAQSKMLSGVGGFVLGLLFLGAGLFIYFRNQKGHSGLQPTGFLS

SEQ ID NO: 19929 - protein, 266 aa, Homo sapiens
MVCLKLPGGSYMAKLTVTLMVLSSPLALAGDTRPRFLQQDKYECHFFNGTERVRFLHRDIYNQEEDLRFDSDVGEYRAVTELGRPDAEYWNSQKDFLEDRRAAVDTYCRHNYGVGESFTVQRRVEPKVTVYPARTQTLQHHNLLVCSVNGFYPGSIEVRWFRNSQEEKAGVVSTGLIQNGDWTFQTLVMLETVPRSGEVYTCQVEHPSVTSPLTVEWRAQSESAQSKMLSGVGGFVLGLLFLGAGLFIYFKNQKGHSGLHPTGLVS

SEQ ID NO: 19930 - protein, 4158 aa, Homo sapiens
MTFRATDSEFDLTNIEEYAENSALSRLNNIKAKQRVSYVTSTENESDTQILTFRHITKAQEKTRKRQQPIKLEPLPVLKVYQDHKQPEYIHEQNRFQLMTAGIIKRPVSIAKKSFATSSTQFLEHQDAVKKMQIHRPYVEVFSPSPPKLPHTGIGKRGLFGTRSSAYPKYTFHDREEVVKANIRDPLQIIKIIRENEHLGFLYMIPAVPRSSIEYDTYNLKVVSYENINKNDYYTISQRAVTHIYNEDIEFIEIDRWEQEYLYHRELTKIPIFSLFRKWKAFSVWRKNVRSKKITGCQKSLQKNLFIVNPHLRPALLKINELCYHLSFMGLCYIEKCHTYTLQEFKAAQVIRLAEVTERLGEFRNEAKYVVRRACRFALRAAGFVPDDCAFGPFEDYHKVQSSGSFINTPHELPTYGDSEKMTYTEQASKRHYCMRLTCFIRLNDYLIENTMHILTVNAVNSLLNHLTDKLKRTPSADVIQKWITEEKPEVPDKKGTLMVEKQEEDESLIPMFLTELMLTVQSLLFEPSLEDFLDGILGAVNHCQNTVLSVPNLVPDSYFDAFTSPYINNKLEGKTCGTGPSLAAVFEDDKNFHTIISQIKETIQAAFESARIYAATFEKFQIFFKENESLDLQALKLQEPDINFFSEQLEKYHKQHKDAVALRPTRNVGLLLIDTRLLREKLIPSPLRCLEVLNFMLPRQSKKKVDAIIFEAQDAEYKLEFVPTTTTEYVHSLLFLDEIQERIESLEDEGNIVTQMYKLMEQYQVPTPPEDFAVFATMKPSIVAVRNAIDKSVGDRESSIKQFCVHLGSDLEELNNEVNEVKLQAQDPQILDISADQDKIRLILNNLQSVLADLQKRAFQYKSYQKNFKVEVSKFEALEEVSAELKLKQLLWDSFSEWDKLQQEWLKSKFDCLDPEVLNGQVSKYAKFVTQLEKGLPPNSVVPQLKYKVEKMKEKLPVIIDLRNPTLKARHWAAIEQTVDATLVDAEIPLTLERLSQLHVFDFGQEIQDISGQASGEAALEAILKKVEDSWKTTEFVILPHRDSKDVFILGGTDDIQVLLDDSTINVATLASSRYLGPLKTRVDEWQKQLALFNQTLEEWLTCQRNWLYLESIFNAPDIQRQLPAEAKMFLQVDKSWKEIMRKVNRLPNALRAATQPGLLETFQNNNALLDQIQKCLEAYLESKRVIFPRFYFLSNDELLEILAQTRNPQAVQPHLRKCFDSISKLEFALMPPAEGKIPGIDGEPEKVYTNDILAMLSPEGERVSLGKGLKARGNVEEWLGKVEEAMFTSLRRLCKAAIADYQGKLRTDWVVAGHPSQVILTVSQIMWCRDLTECLETEHSNHIQALKNFEKVNFERLNALAAIVQGSLPKLHRNILTALITIDVHARDIVTELVQSKVETVESFDWQRQLRYYWDIDLDNCVARMALSQYTYGYEYLGACPRLVITPLTDRCYLCLMGALQLDLGGAPAGPAGTGKTETTKDLAKALAIQCVVFNCSDGLDYKMMGRFFSGLAQSGAWCCFDEFNRIDIEVLSVIAQQLITIRNAKAAKLSRFMFEGREIKLVMTCAAFITMNPGYAGRTELPDNLKALFRPFAMMVPNYALIAEVILYSEGFESSKILARKMTQMYKLCSEQLSQQDHYDFGMRAVKSVLVMAGSLKRENPDLNEDVVLIRALQDSNLPKFLTDDALLFSGIISDLFPGVQIPEHDYGILQSTIVDVMNRQNLQPEMCMVRKVIQFYETMLVRHGVMLVGPTGGGKTTVYRILAETLGNLQKLGIENSFYQAVKTYVLNPKSITMGELYGEVNNLTLEWKDGLMALSVRAAVNDTSEDHKWIISDGPVDALWIENMNTVLDDNKMLCLANSERIKLTPQIHMLFEVQDLRVASPATVSRCGMVFVDPEELKWMPYVKTWMKGISKKLTEETQEYILNLFQRYVDEGLHFINKKCSQAIPQVDISKVTTLCCLLESLILGKDGVNLAMEQTKLNTILCQTFVFCYLWSLGGNLTENYYDSFDTFIRTQFDDNPDARLPNSGDLWSIHMDFDTKRLDPWERIIPTFKYNRDVPFFEMLVPTTDTVRYGYLMEKLLAVKHSVLFTGITGVGKSVIAKGLLNKIQESAGYVPVYLNFSAQTSSARTQEIIESKLERKRKNILGAPGNKRIVIFVDDLNMPRLDRYGSQPPIELLRQYQDFGGFYDRNKLFWKEIQDVTIISACAPPGGGRNPVTPRFIRHFSMLCLPMPSEHSLKQIFQAILNGFLSDFPPAVKQTASSIVEASVEIYNKMSVDLLPTPAKSHYVFNLRDLSKCVQGILQCDPGTIREEIQIFRLFCHECQRVFHDRLINNEDKHYFHVILTEMANKHFGIAIDLEYFLNKPIIFGDFIKFGADKADRIYDDMPDIEKTANVLQDYLDDYNLTNPKEVKLVFFQDAIEHVSRIARMIRQERGNALLVGVGGTGKQSLTRLAAHICGYKCLQIELSRGYNYDSFHEDLRKLYKMAGVEDKNMVFLFTDTQIVVEEFLEDINNILNSGEVPNLFEKDELEQVLAATRPRAKEVGISEGNRDEVFQYFISKVRQKLHIVLCMSPVGEAFRSRCRMFPSLVNCCTIDWFVQWPREALLSVSKTFFSQVDAGNEELKEKLPLMCVNVHLSVSSMAERYYNELRRRYYTTPTSYLELINLYLSMLSEKRKQIISARDRVKNGLTKLLETNILVDKMKLDLSALEPVLLAKSEDVEALMEKLAVDQESADQVRNTVQEDEATAKVKAEETQAIADDAQRDLDEALPALDAANKALDSLDKADISEIRVFTKPPDLVMTVMEAISILLNAKPDWPSAKQLLGDSNFLKRLLEYDKENIKPQILAKLQKYINNPDFVPEKVEKVSKACKSMCMWVRAMDLYSRVVKVVEPKRQKLRAAQAELDITMATLREKQALLRQVEDQIQALQDEYDKGVNEKESLAKTMALTKARLVRAGKLTAALEDEQVRWEESIQKFEEEISNITGNVFIAAACVAYYGAFTAQYRQSLIECWIQDCQSLEIPIDPSFSLINILGDPYEIRQWNTDGLPRDLISTENGILVTQGRRWPLMIDPQDQANRWIRNKESKSGLKIIKLTDSNFLRILENSIRLGLPVLLEELKETLDPALEPILLKQIFISGGRLLIRLGDSDIDYDKNFRFYMTTKMPNPHYLPEVCIKVTIINFTVTKSGLEDQLLSDVVRLEKPRLEEQRIKLIVRINTDKNQLKTIEEKILRMLFTSEGNILDNEELIDTLQDSKITSGAIKTRLEEAESTEQMINVAREKYRPVATQGSVMYFVIASLSEIDPMYQYSLKYFKQLFNTTIETSVKTENLQQRLDVLLEQTLLTAYVNVSRGLFEQHKLIYSFMLCVEMMRQQGTLSDAEWNFFLRGSAGLEKERPPKPEAPWLPTATWFACCDLEESFPVFHGLTQNILSHPISIRLGSFETYINPQKWEGYSKMKHEDKHMRQEKEAAHQDPWSAGLSSFHKLILIKCCKEEKVVFALTDFVIENLGKQFIETPPVDLPTLYQDMSCNTPLVFILSTGSDPMGAFQRFARESGYSERVQSISLGQGQGPIAEKMVKDAMKSGNWVFLQNCHLAVSWMLAMEELIKTFTDPDSAIKDTFRLFLSSMPSNTFPVTVLQNSVKVTNEPPKGLRANIRRAFTEMTPSFFEENILGKKWRQIIFGICFFHAIIQERKKFGPLGWNICYEFNDSDRECALLNLKLYCKEGKIPWDALIYITGEITYGGRVTDSWDQRCLRTILKRFFSPETLEEDYKYSESGIYFAPMADSLQEFKDYIENLPLIDDPEIFGMHENANLVFQYKETSTLINTILEVQPRSSTGGEGKSNDEIVQELVASVQTRVPEKLEMEGASESLFVKDLQGRLNSLTTVLGQEVDRFNNLLKLIHTSLETLNKAIAGFVVMSEEMEKVYNSFLNNQVPALWSNTAYPSLKPLGSWVKDLILRTSFVDLWLKRGQPKSYWISGFFFPQGFLTGTLQNHARKYNLPIDELSFKYSVIPTYRDQAAVIEAAKTVQFGQELPMDMELPSPEDGVLVHGMFMDASRWDDKEMVIEDALPGQMNPVLPVVHFEPQQNYKPSPTLYHCPLYKTGARAGTLSTTGHSTNFVVTVLLPSKRSKDYWIAKGSALLCQLSE

SEQ ID NO: 19931 - protein, 592 aa, Homo sapiens
MLFTSEGNILDNEELIDTLQDSKITSGAIKTRLEEAESTEQMINVAREKYRPVATQGSVMYFVIASLSEIDPMYQYSLKYFKQLFNTTIETSVKTENLQQRLDVLLEQTLLTAYVNVSRGLFEQHKLIYSFMLCVEMMRQQGTLSDAEWNFFLRGSAGLEKERPPKPEAPWLPTATWFACCDLEESFPVFHGLTQNILSHPISIRLGSFETYINPQKWEGYSKMKHEDKHMRQEKEAAHQDPWSAGLSSFHKLILIKCCKEEKVVFALTDFVIENLGKQFIETPPVDLPTLYQDMSCNTPLVFILSTGSDPMGAFQRFARESGYSERVQSISLGQGQGPIAEKMVKDAMKSGNWVFLQNCHLAVSWMLAMEELIKTFTDPDSAIKDTFRLFLSSMPSNTFPVTVLQNSVKVTNEPPKGLRANIRRAFTEMTPSFFEENILGKKWRQIIFGICFFHAIIQERKKFGPLGWNICYEFNDSDRECALLNLKLYCKEGKIPWDALIYITGEITYGGRVTDSWDQRCLRTILKRFFSPETLEEDYKYSESGIYFAPMADSLQEFKDYIENLPLIDDPEIFGMHENANLVFQVCGLSS

SEQ ID NO: 19932 - protein, 408 aa, Homo sapiens
MTYTEQASKRHYCMRLTCFIRLNDYLIENTMHILTVNAVNSLLNHLTDKLKRTPSADVIQKWITEEKPEVPDKKGTLMVEKQEEDESLIPMFLTELMLTVQSLLFEPSLEDFLDGILGAVNHCQNTVLSVPNLVPDSYFDAFTSPYINNKLEGKTCGTGPSLAAVFEDDKNFHTIISQIKETIQAAFESARIYAATFEKFQIFFKENESLDLQALKLQEPDINFFSEQLEKYHKQHKDAVALRPTRNVGLLLIDTRLLREKLIPSPLRCLEVLNFMLPRQSKKKVDAIIFEAQDAEYKLEFVPTTTTEYVHSLLFLDEIQERIESLEDEGNIVTQMYKLMEQYQVPTPPEDFAVFATMKPSIVAVRNAIDKSVGDRESSIKQFCVHLGSDLEELNNEVNEVKLQAQVS

SEQ ID NO: 19933 - protein, 2530 aa, Homo sapiens
MTFRATDSEFDLTNIEEYAENSALSRLNNIKAKQRVSYVTSTENESDTQILTFRHITKAQEKTRKRQQPIKLEPLPVLKVYQDHKQPEYIHEQNRFQLMTAGIIKRPVSIAKKSFATSSTQFLEHQDAVKKMQIHRPYVEVFSPSPPKLPHTGIGKRGLFGTRSSAYPKYTFHDREEVVKANIRDPLQIIKIIRENEHLGFLYMIPAVPRSSIEYDTYNLKVVSYENINKNDYYTISQRAVTHIYNEDIEFIEIDRWEQEYLYHRELTKIPIFSLFRKWKAFSVWRKNVRSKKITGCQKSLQKNLFIVNPHLRPALLKINELCYHLSFMGLCYIEKCHTYTLQEFKAAQVIRLAEVTERLGEFRNEAKYVVRRACRFALRAAGFVPDDCAFGPFEDYHKVQSSGSFINTPHELPTYGDSEKMTYTEQASKRHYCMRLTCFIRLNDYLIENTMHILTVNAVNSLLNHLTDKLKRTPSADVIQKWITEEKPEVPDKKGTLMVEKQEEDESLIPMFLTELMLTVQSLLFEPSLEDFLDGILGAVNHCQNTVLSVPNLVPDSYFDAFTSPYINNKLEGKTCGTGPSLAAVFEDDKNFHTIISQIKETIQAAFESARIYAATFEKFQIFFKENESLDLQALKLQEPDINFFSEQLEKYHKQHKDAVALRPTRNVGLLLIDTRLLREKLIPSPLRCLEVLNFMLPRQSKKKVDAIIFEAQDAEYKLEFVPTTTTEYVHSLLFLDEIQERIESLEDEGNIVTQMYKLMEQYQVPTPPEDFAVFATMKPSIVAVRNAIDKSVGDRESSIKQFCVHLGSDLEELNNEVNEVKLQAQDPQILDISADQDKIRLILNNLQSVLADLQKRAFQYKSYQKNFKVEVSKFEALEEVSAELKLKQLLWDSFSEWDKLQQEWLKSKFDCLDPEVLNGQVSKYAKFVTQLEKGLPPNSVVPQLKYKVEKMKEKLPVIIDLRNPTLKARHWAAIEQTVDATLVDAEIPLTLERLSQLHVFDFGQEIQDISGQASGEAALEAILKKVEDSWKTTEFVILPHRDSKDVFILGGTDDIQVLLDDSTINVATLASSRYLGPLKTRVDEWQKQLALFNQTLEEWLTCQRNWLYLESIFNAPDIQRQLPAEAKMFLQVDKSWKEIMRKVNRLPNALRAATQPGLLETFQNNNALLDQIQKCLEAYLESKRVIFPRFYFLSNDELLEILAQTRNPQAVQPHLRKCFDSISKLEFALMPPAEGKIPGIDGEPEKVYTNDILAMLSPEGERVSLGKGLKARGNVEEWLGKVEEAMFTSLRRLCKAAIADYQGKLRTDWVVAGHPSQVILTVSQIMWCRDLTECLETEHSNHIQALKNFEKVNFERLNALAAIVQGSLPKLHRNILTALITIDVHARDIVTELVQSKVETVESFDWQRQLRYYWDIDLDNCVARMALSQYTYGYEYLGACPRLVITPLTDRCYLCLMGALQLDLGGAPAGPAGTGKTETTKDLAKALAIQCVVFNCSDGLDYKMMGRFFSGLAQSGAWCCFDEFNRIDIEVLSVIAQQLITIRNAKAAKLSRFMFEGREIKLVMTCAAFITMNPGYAGRTELPDNLKALFRPFAMMVPNYALIAEVILYSEGFESSKILARKMTQMYKLCSEQLSQQDHYDFGMRAVKSVLVMAGSLKRENPDLNEDVVLIRALQDSNLPKFLTDDALLFSGIISDLFPGVQIPEHDYGILQSTIVDVMNRQNLQPEMCMVRKVIQFYETMLVRHGVMLVGPTGGGKTTVYRILAETLGNLQKLGIENSFYQAVKTYVLNPKSITMGELYGEVNNLTLEWKDGLMALSVRAAVNDTSEDHKWIISDGPVDALWIENMNTVLDDNKMLCLANSERIKLTPQIHMLFEVQDLRVASPATVSRCGMVFVDPEELKWMPYVKTWMKGISKKLTEETQEYILNLFQRYVDEGLHFINKKCSQAIPQVDISKVTTLCCLLESLILGKDGVNLAMEQTKLNTILCQTFVFCYLWSLGGNLTENYYDSFDTFIRTQFDDNPDARLPNSGDLWSIHMDFDTKRLDPWERIIPTFKYNRDVPFFEMLVPTTDTVRYGYLMEKLLAVKHSVLFTGITGVGKSVIAKGLLNKIQESAGYVPVYLNFSAQTSSARTQEIIESKLERKRKNILGAPGNKRIVIFVDDLNMPRLDRYGSQPPIELLRQYQDFGGFYDRNKLFWKEIQDVTIISACAPPGGGRNPVTPRFIRHFSMLCLPMPSEHSLKQIFQAILNGFLSDFPPAVKQTASSIVEASVEIYNKMSVDLLPTPAKSHYVFNLRDLSKCVQDKHFGIAIDLEYFLNKPIIFGDFIKFGADKADRIYDDMPDIEKTANVLQDYLDDYNLTNPKEVKLVFFQDAIEHVSRIARMIRQERGNALLVGVGGTGKQSLTRLAAHICGYKCLQIELSRGYNYDSFHEDLRKLYKMAGVEDKNMVFLFTDTQIVVEEFLEDINNILNSGEVPNLFEKDELEQVLAATRPRAKEVGISEGNRDEVGCARVVMWLYHKNVSSPFI

SEQ ID NO: 19934 - protein, 781 aa, Homo sapiens
MHDECTPQQTMSSIQDTKAADIAARGELNVIETATVSPTNGEESHYTNQVQLEKNKTHMSSALVEKENNTSLNGRVLGQEESQNKMFPDNAENEDDKQIEHMTVENINGNREETHGIIQTTETEIQETSESPREEMTTSSIICDISKKYINSTLPNDSENIKHKNNIMEKEYLDVLSDVTGPQVSCYITAPSYVLQQLECRIINHMSSLIVGDNEELVSNVITIECSDKEKRVPFPIGIAIPFTARYRGNYRDIMVKVCDINLQSSYLNPNSLEGMKGGYKGTCASVKVYKLGIFSVVSCLKKESFTVTKKGLALKSSMDSRISLNYPPGVFTSPVLVQLKIQPVDPALVAHLKAQQDTFYSVQSTSPLIHIQHPSTYPFQKPVTLFLPCSPYLDKNNLGSEIDHKRRASATINRITPSYFNRTKIASIRKPRKNASECLKLLGFRSQDSGWCGLDDVVKTIQSGLVSVELYEHLERFIVLHLSSTMDNSHLVTFVKSLEEAMLSTTACIVLSHQKDNPHRIAVLVVPSKDLSQVLKDLHLEGFGGPPEPSRHFQVREGEQLLLRFTGNIFASSNGKDYGKDYTLIFHLQRKPRLELQIKEVDEFGNYSCPHYKGTIVVYKVPKGKIVPNLNQSLVINENHSQLPICKLPLKLPKHKKLINRPQSTKRVSKDPVEALWDNLLHWLAEELSEENAESLSSTLPLRRSTIQLIKLKNPDDLTEQIHEFLCFWKKSLPTFTDKLRLLARHLRKIGRSDLAEELKFKWENKVFTEPQQCFDVAPE

SEQ ID NO: 19935 - protein, 616 aa, Homo sapiens
MCLEKRYLDVLSDVTGPQVSCYITAPSYVLQQLECRIINHMSSLIVGDNEELVSNVITIECSDKEKRVPFPIGIAIPFTARYRGNYRDIMVKVCDINLQSSYLNPNSLEGMKGGYKGTCASVKVYKLGIFSVVSCLKKESFTVTKKGLALKSSMDSRISLNYPPGVFTSPVLVQLKIQPVDPALVAHLKAQQDTFYSVQSTSPLIHIQHPSTYPFQKPVTLFLPCSPYLDKNNLGSEIDHKRRASATINRITPSYFNRTKIASIRKPRKNASECLKLLGFRSQDSGWCGLDDVVKTIQSGLVSVELYEHLERFIVLHLSSTMDNSHLVTFVKSLEEAMLSTTACIVLSHQKDNPHRIAVLVVPSKDLSQVLKDLHLEGFGGPPEPSRHFQVREGEQLLLRFTGNIFASSNGKDYGKDYTLIFHLQRKPRLELQIKEVDEFGNYSCPHYKGTIVVYKVPKGKIVPNLNQSLVINENHSQLPICKLPLKLPKHKKLINRPQSTKRVSKDPVEALWDNLLHWLAEELSEENAESLSSTLPLRRSTIQLIKLKNPDDLTEQIHEFLCFWKKSLPTFTDKLRLLARHLRKIGRSDLAEELKFKWENKVFTEPQQCFDVAPE

SEQ ID NO: 19936 - protein, 4486 aa, Homo sapiens
MRLAEERAALAAENADGEPGADRRLRLLGTYVAMSLRPAAGAWERCAGSAEAEQLLQAFLGRDAAEGPRPLLVVRPGPRGLAIRPGLEVGPESGLAGAKALFFLRTGPEPPGPDSFRGAVVCGDLPAAPLEHLAALFSEVVLPVLANEKNRLNWPHMICEDVRRHAHSLQCDLSVILEQVKGKTLLPLPAGSEKMEFADSKSETVLDSIDKSVIYAIESAVIKWSYQVQVVLKRESSQPLLQGENPTPKVELEFWKSRYEDLKYIYNQLRTITVRGMAKLLDKLQSSYFPAFKAMYRDVVAALAEAQDIHVHLIPLQRHLEALENAEFPEVKPQLRPLLHVVCLIWATCKSYRSPGRLTVLLQEICNLLIQQASNYLSPEDLLRSEVEESQRKLQVVSDTLSFFKQEFQDRRENLHTYFKENQEVKEWDFQSSLVFVRLDGFLGQLHVVEGLLKTALDFHKLGKVEFSGVRGNALSQQVQQMHEEFQEMYRLLSGSSSDCLYLQSTDFENDVSEFNQKVEDLDRRLGTIFIQAFDDAPGLEHAFKLLDIAGNLLERPLVARDTSDKYLVLIQMFNKDLDAVRMIYSQHVQEEAELGFSPVHKNMPTVAGGLRWAQELRQRIQGPFSNFGRITHPCMESAEGKRMQQKYEDMLSLLEKYETRLYEDWCRTVSEKSQYNLSQPLLKRDPETKEITINFNPQLISVLKEMSYLEPREMKHMPETAAAMFSSRDFYRQLVANLELMANWYNKVMKTLLEVEFPLVEEELQNIDLRLRAAEETLNWKTEGICDYVTEITSSIHDLEQRIQKTKDNVEEIQNIMKTWVTPIFKTKDGKRESLLSLDDRHDRMEKYYNLIKESGLKIHALVQENLGLFSADPTSNIWKTYVNSIDNLLLNGFFLAIECSLKYLLENTECKAGLTPIFEAQLSLAIPELVFYPSLESGVKGGFCDIVEGLITSIFRIPSLVPRLSPQNGSPHYQVDLDGIPDLANMRRTLMERVQRMMGLCCGYQSTFSQYSYLYVEDRKEVLGQFLLYGHILTPEEIEDHVEDGIPENPPLLSQFKVQIDSYETLYEEVCRLEPIKVFDGWMKIDIRPFKASLLNIIKRWSLLFKQHLVDHVTHSLANLDAFIKKSESGLLKKVEKGDFQGLVEIMGHLMAVKERQSNTDEMFEPLKQTIELLKTYEQELPETVFKQLEELPEKWNNIKKVAITVKQQVAPLQANEVTLLRQRCTAFDAEQQQFWEQFHKEAPFRFDSIHPHQMLDARHIEIQQMESTMASISESASLFEVNVPDYKQLRQCRKEVCQLKELWDTIGMVTSSIHAWETTPWRNINVEAMELECKQFARHIRNLDKEVRAWDAFTGLESTVWNTLSSLRAVAELQNPAIRERHWRQLMQATGVSFTMDQDTTLAHLLQLQLHHYEDEVRGIVDKAAKEMGMEKTLKELQTTWAGMEFQYEPHPRTNVPLLCSDEDLIEVLEDNQVQLQNLVMSKYVAFFLEEVSGWQKKLSTVDAVISIWFEVQRTWTHLESIFTGSEDIRAQLPQDSKRFEGIDIDFKELAYDAQKIPNVVQTTNKPGLYEKLEDIQGRLCLCEKALAEYLDTKRLAFPRFYFLSSSDLLDILSNGTAPQQVQRHLSKLFDNMAKMRFQLDASGEPTKTSLGMYSKEEEYVAFSEPCDCSGQVEIWLNHVLGHMKATVRHEMTEGVTAYEEKPREQWLFDHPAQVALTCTQIWWTTEVGMAFARLEEGYESAMKDYYKKQVAQLKTLITMLIGQLSKGDRQKIMTICTIDVHARDVVAKMIAQKVDNAQAFLWLSQLRHRWDDEVKHCFANICDAQFLYSYEYLGNTPRLVITPLTDRCYITLTQSLHLTMSGAPAGPAGTGKTETTKDLGRALGILVYVFNCSEQMDYKSCGNIYKGLAQTGAWGCFDEFNRISVEVLSVVAVQVKSIQDAIRDKKQWFSFLGEEISLNPSVGIFITMNPGYAGRTELPENLKSLFRPCAMVVPDFELICEIMLVAEGFIEAQSLARKFITLYQLCKELLSKQDHYDWGLRAIKSVLVVAGSLKRGDPDRPEDQVLMRSLRDFNIPKIVTDDMPIFMGLIGDLFPALDVPRRRDPNFEALVRKAIVDLKLQAEDNFVLKVVQLEELLAVRHSVFVVGGAGTGKSQVLRSLHKTYQIMKRRPVWTDLNPKAVTNDELFGIINPATGEWKDGLFSSIMRELANITHDGPKWILLDGDIDPMWIESLNTVMDDNKVLTLASNERIPLNPTMKLLFEISHLRTATPATVSRAGILYINPADLGWNPPVSSWIEKREIQTERANLTILFDKYLPTCLDTLRTRFKKIIPIPEQSMVQMVCHLLECLLTTEDIPADCPKEIYEHYFVFAAIWAFGGAMVQDQLVDYRAEFSKWWLTEFKTVKFPSQGTIFDYYIDPETKKFEPWSKLVPQFEFDPEMPLQACLVHTSETIRVCYFMERLMARQRPVMLVGTAGTGKSVLVGAKLASLDPEAYLVKNVPFNYYTTSAMLQAVLEKPLEKKAGRNYGPPGNKKLIYFIDDMNMPEVDAYGTVQPHTIIRQHLDYGHWYDRSKLSLKEITNVQYVSCMNPTAGSFTINPRLQRHFSVFVLSFPGADALSSIYSIILTQHLKLGNFPASLQKSIPPLIDLALAFHQKIATTFLPTGIKFHYIFNLRDFANIFQGILFSSVECVKSTWDLIRLYLHESNRVYRDKMVEEKDFDLFDKIQTEVLKKTFDDIEDPVEQTQSPNLYCHFANGIGEPKYMPVQSWELLTQTLVEALENHNEVNTVMDLVLFEDAMRHVCHINRILESPRGNALLVGVGGSGKQSLTRLAAFISSMDVFQITLRKGYQIQDFKMDLASLCLKAGVKNLNTVFLMTDAQVADERFLVLINDLLASGEIPDLYSDDEVENIISNVRNEVKSQGLVDNRENCWKFFIDRIRRQLKVTLCFSPVGNKLRVRSRKFPAIVNCTAIHWFHEWPQQALESVSLRFLQNTEGIEPTVKQSISKFMAFVHTSVNQTSQSYLSNEQRYNYTTPKSFLEFIRLYQSLLHRHRKELKCKTERLENGLLKLHSTSAQVDDLKAKLAAQEVELKQKNEDADKLIQVVGVETDKVSREKAMADEEEQKVAVIMLEVKQKQKDCEEDLAKAEPALTAAQAALNTLNKTNLTELKSFGSPPLAVSNVSAAVMVLMAPRGRVPKDRSWKAAKVTMAKVDGFLDSLINFNKENIHENCLKAIRPYLQDPEFNPEFVATKSYAAAGLCSWVINIVRFYEVFCDVEPKRQALNKATADLTAAQEKLAAIKAKIAHLNENLAKLTARFEKATADKLKCQQEAEVTAVTISLANRLVGGLASENVRWADAVQNFKQQERTLCGDILLITAFISYLGFFTKKYRQSLLDRTWRPYLSQLKTPIPVTPALDPLRMLMDDADVAAWQNEGLPADRMSVENATILINCERWPLMVDPQLQGIKWIKNKYGEDLRVTQIGQKGYLQIIEQALEAGAVVLIENLEESIDPVLGPLLGREVIKKGRFIKIGDKECEYNPKFRLILHTKLANPHYQPELQAQATLINFTVTRDGLEDQLLAAVVSMERPDLEQLKSDLTKQQNGFKITLKTLEDSLLSRLSSASGNFLGETVLVENLEITKQTAAEVEKKVQEAKVTEVKINEAREHYRPAAARASLLYFIMNDLSKIHPMYQFSLKAFSIVFQKAVERAAPDESLRERVANLIDSITFSVYQYTIRGLFECDKLTYLAQLTFQILLMNREVNAVELDFLLRSPVQTGTASPVEFLSHQAWGAVKVLSSMEEFSNLDRDIEGSAKSWKKFVESECPEKEKLPQEWKNKTALQRLCMLRAMRPDRMTYALRDFVEEKLGSKYVVGRALDFATSFEESGPATPMFFILSPGVDPLKDVESQGRKLGYTFNNQNFHNVSLGQGQEVVAEAALDLAAKKGHWVILQNIHLVAKWLSTLEKKLEEHSENSHPEFRVFMSAEPAPSPEGHIIPQGILENSIKITNEPPTGMHANLHKALDNFTQDTLEMCSRETEFKSILFALCYFHAVVAERRKFGPQGWNRSYPFNTGDLTISVNVLYNFLEANAKVPYDDLRYLFGEIMYGGHITDDWDRRLCRTYLGEFIRPEMLEGELSLAPGFPLPGNMDYNGYHQYIDAELPPESPYLYGLHPNAEIGFLTQTSEKLFRTVLELQPRDSQARDGAGATREEKVKALLEEILERVTDEFNIPELMAKVEERTPYIVVAFQECGRMNILTREIQRSLRELELGLKGELTMTSHMENLQNALYFDMVPESWARRAYPSTAGLAAWFPDLLNRIKELEAWTGDFTMPSTVWLTGFFNPQSFLTAIMQSTARKNEWPLDQMALQCDMTKKNREEFRSPPREGAYIHGLFMEGACWDTQAGIITEAKLKDLTPPMPVMFIKAIPADKQDCRSVYSCPVYKTSQRGPTYVWTFNLKTKENPSKWVLAGVALLLQI

SEQ ID NO: 19937 - protein, 4410 aa, Homo sapiens
MRLAEERAALAAENADGEPGADRRLRLLGTYVAMSLRPAAGAWERCAGSAEAEQLLQAFLGRDAAEGPRPLLVVRPGPRGLAIRPGLEVGPESGLAGAKALFFLRTGPEPPGPDSFRGAVVCGDLPAAPLEHLAALFSEVVLPVLANEKNRLNWPHMICEDVRRHAHSLQCDLSVILEQVKGKTLLPLPAGSEKMEFADSKSETVLDSIDKSVIYAIESAVIKWSYQVQVVLKRESSQPLLQGENPTPKVELEFWKSRYEDLKYIYNQLRTITVRGMAKLLDKLQSSYFPAFKAMYRDVVAALAEAQDIHVHLIPLQRHLEALENAEFPEVKPQLRPLLHVVCLIWATCKSYRSPGRLTVLLQEICNLLIQQASNYLSPEDLLRSEVEESQRKLQVVSDTLSFFKQEFQDRRENLHTYFKENQEVKEWDFQSSLVFVRLDGFLGQLHVVEGLLKTALDFHKLGKVEFSGVRGNALSQQVQQMHEEFQEMYRLLSGSSSDCLYLQSTDFENDVSEFNQKVEDLDRRLGTIFIQAFDDAPGLEHAFKLLDIAGNLLERPLVARDTSDKYLVLIQMFNKDLDAVRMIYSQHVQEEAELGFSPVHKNMPTVAGGLRWAQELRQRIQGPFSNFGRITHPCMESAEGKRMQQKYEDMLSLLEKYETRLYEDWCRTVSEKSQYNLSQPLLKRDPETKEITINFNPQLISVLKEMSYLEPREMKHMPETAAAMFSSRDFYRQLVANLELMANWYNKVMKTLLEVEFPLVEEELQNIDLRLRAAEETLNWKTEGICDYVTEITSSIHDLEQRIQKTKDNVEEIQNIMKTWVTPIFKTKDGKRESLLSLDDRHDRMEKYYNLIKESGLKIHALVQENLGLFSADPTSNIWKTYVNSIDNLLLNGFFLAIECSLKYLLENTECKAGLTPIFEAQLSLAIPELVFYPSLESGVKGGFCDIVEGLITSIFRIPSLVPRLSPQNGSPHYQVDLDGIPDLANMRRTLMERVQRMMGLCCGYQSTFSQYSYLYVEDRKEVLGQFLLYGHILTPEEIEDHVEDGIPENPPLLSQFKVQIDSYETLYEEVCRLEPIKVFDGWMKIDIRPFKASLLNIIKRWSLLFKQHLVDHVTHSLANLDAFIKKSESGLLKKVEKGDFQGLVEIMGHLMAVKERQSNTDEMFEPLKQTIELLKTYEQELPETVFKQLEELPEKWNNIKKVAITVKQQVAPLQANEVTLLRQRCTAFDAEQQQFWEQFHKEAPFRFDSIHPHQMLDARHIEIQQMESTMASISESASLFEVNVPDYKQLRQCRKEVCQLKELWDTIGMVTSSIHAWETTPWRNINVEAMELECKQFARHIRNLDKEVRAWDAFTGLESTVWNTLSSLRAVAELQNPAIRERHWRQLMQATGVSFTMDQDTTLAHLLQLQLHHYEDEVRGIVDKAAKEMGMEKTLKELQTTWAGMEFQYEPHPRTNVPLLCSDEDLIEVLEDNQVQLQNLVMSKYVAFFLEEVSGWQKKLSTVDAVISIWFEVQRTWTHLESIFTGSEDIRAQLPQDSKRFEGIDIDFKELAYDAQKIPNVVQTTNKPGLYEKLEDIQGRLCLCEKALAEYLDTKRLAFPRFYFLSSSDLLDILSNGTAPQQVQRHLSKLFDNMAKMRFQLDASGEPTKTSLGMYSKEEEYVAFSEPCDCSGQVEIWLNHVLGHMKATVRHEMTEGVTAYEEKPREQWLFDHPAQVALTCTQIWWTTEVGMAFARLEEGYESAMKDYYKKQVAQLKTLITMLIGQLSKGDRQKIMTICTIDVHARDVVAKMIAQKVDNAQAFLWLSQLRHRWDDEVKHCFANICDAQFLYSYEYLGNTPRLVITPLTDRCYITLTQSLHLTMSGAPAGPAGTGKTETTKDLGRALGILVYVFNCSEQMDYKSCGNIYKGLAQTGAWGCFDEFNRISVEVLSVVAVQVKSIQDAIRDKKQWFSFLGEEISLNPSVGIFITMNPGYAGRTELPENLKSLFRPCAMVVPDFELICEIMLVAEGFIEAQSLARKFITLYQLCKELLSKQDHYDWGLRAIKSVLVVAGSLKRGDPDRPEDQVLMRSLRDFNIPKIVTDDMPIFMGLIGDLFPALDVPRRRDPNFEALVRKAIVDLKLQAEDNFVLKVVQLEELLAVRHSVFVVGGAGTGKSQVLRSLHKTYQIMKRRPVWTDLNPKAVTNDELFGIINPATGEWKDGLFSSIMRELANITHDGPKWILLDGDIDPMWIESLNTVMDDNKVLTLASNERIPLNPTMKLLFEISHLRTATPATVSRAGILYINPADLGWNPPVSSWIEKREIQTERANLTILFDKYLPTCLDTLRTRFKKIIPIPEQSMVQMVCHLLECLLTTEDIPADCPKEIYEHYFVFAAIWAFGGAMVQDQLVDYRAEFSKWWLTEFKTVKFPSQGTIFDYYIDPETKKFEPWSKLVPQFEFDPEMPLQACLVHTSETIRVCYFMERLMARQRPVMLVGTAGTGKSVLVGAKLASLDPEAYLVKNVPFNYYTTSAMLQAVLEKPLEKKAGRNYGPPGNKKLIYFIDDMNMPEVDAYGTVQPHTIIRQHLDYGHWYDRSKLSLKEITNVQYVSCMNPTAGSFTINPRLQRHFSVFVLSFPGADALSSIYSIILTQHLKLGNFPASLQKSIPPLIDLALAFHQKIATTFLPTGIKFHYIFNLRDFANIFQGILFSSVECVKSTWDLIRLYLHESNRVYRDKMVEEKDFDLFDKIQTEVLKKTFDDIEDPVEQTQSPNLYCHFANGIGEPKYMPVQSWELLTQTLVEALENHNEVNTVMDLVLFEDAMRHVCHINRILESPRGNALLVGVGGSGKQSLTRLAAFISSMDVFQITLRKGYQIQDFKMDLASLCLKAGVKNLNTVFLMTDAQVADERFLVLINDLLASGEIPDLYSDDEVENIISNVRNEVKSQGLVDNRENCWKFFIDRIRRQLKVTLCFSPVGNKLRVRSRKFPAIVNCTAIHWFHEWPQQALESVSLRFLQNTEGIEPTVKQSISKFMAFVHTSVNQTSQSYLSNEQRYNYTTPKSFLEFIRLYQSLLHRHRKELKCKTERLENGLLKLHSTSAQVDDLKAKLAAQEVELKQKNEDADKLIQVVGVETDKVSREKAMADEEEQKVAVIMLEVKQKQKDCEEDLAKAEPALTAAQAALNTLNKTNLTELKSFGSPPLAVSNVSAAVMVLMAPRGRVPKDRSWKAAKVTMAKVDGFLDSLINFNKENIHENCLKAIRPYLQDPEFNPEFVATKSYAAAGLCSWVINIVRFYEVFCDVEPKRQALNKATADLTAAQEKLAAIKAKIAHLNENLAKLTARFEKATADKLKCQQEAEVTAVTISLANRLVGGLASENVRWADAVQNFKQQERTLCGDILLITAFISYLGFFTKKYRQSLLDRTWRPYLSQLKTPIPVTPALDPLRMLMDDADVAAWQNEGLPADRMSVENATILINCERWPLMVDPQLQGIKWIKNKYGEDLRVTQIGQKGYLQIIEQALEAGAVVLIENLEESIDPVLGPLLGREVIKKGRFIKIGDKECEYNPKFRLILHTKLANPHYQPELQAQATLINFTVTRDGLEDQLLAAVVSMERPDLEQLKSDLTKQQNGFKITLKTLEDSLLSRLSSASGNFLGETVLVENLEITKQTAAEVEKKVQEAKVTEVKINEAREHYRPAAARASLLYFIMNDLSKIHPMYQFSLKAFSIVFQKAVERAAPDESLRERVANLIDSITFSVYQYTIRGLFECDKLTYLAQLTFQILLMNREVNAVELDFLLRSPVQTGTASPVEFLSHQAWGAVKVLSSMEEFSNLDRDIEGSAKSWKKFVESECPEKEKLPQEWKNKTALQRLCMLRAMRPDRMTYALRDFVEEKLGSKYVVGRALDFATSFEESGPATPMFFILSPGVDPLKDVESQGRKLGYTFNNQNFHNVSLGQGQEVVAEAALDLAAKKGHWVILQNTLEMCSRETEFKSILFALCYFHAVVAERRKFGPQGWNRSYPFNTGDLTISVNVLYNFLEANAKVPYDDLRYLFGEIMYGGHITDDWDRRLCRTYLGEFIRPEMLEGELSLAPGFPLPGNMDYNGYHQYIDAELPPESPYLYGLHPNAEIGFLTQTSEKLFRTVLELQPRDSQARDGAGATREEKVKALLEEILERVTDEFNIPELMAKVEERTPYIVVAFQECGRMNILTREIQRSLRELELGLKGELTMTSHMENLQNALYFDMVPESWARRAYPSTAGLAAWFPDLLNRIKELEAWTGDFTMPSTVWLTGFFNPQSFLTAIMQSTARKNEWPLDQMALQCDMTKKNREEFRSPPREGAYIHGLFMEGACWDTQAGIITEAKLKDLTPPMPVMFIKAIPADKQDCRSVYSCPVYKTSQRGPTYVWTFNLKTKENPSKWVLAGVALLLQI

SEQ ID NO: 19938 - protein, 798 aa, Homo sapiens
MNDLSKIHPMYQFSLKAFSIVFQKAVERAAPDESLRERVANLIDSITFSVYQYTIRGLFECDKLTYLAQLTFQILLMNREVNAVELDFLLRSPVQTGTASPVEFLSHQAWGAVKVLSSMEEFSNLDRDIEGSAKSWKKFVESECPEKEKLPQEWKNKTALQRLCMLRAMRPDRMTYALRDFVEEKLGSKYVVGRALDFATSFEESGPATPMFFILSPGVDPLKDVESQGRKLGYTFNNQNFHNVSLGQGQEVVAEAALDLAAKKGHWVILQNIHLVAKWLSTLEKKLEEHSENSHPEFRVFMSAEPAPSPEGHIIPQGILENSIKITNEPPTGMHANLHKALDNFTQDTLEMCSRETEFKSILFALCYFHAVVAERRKFGPQGWNRSYPFNTGDLTISVNVLYNFLEANAKVPYDDLRYLFGEIMYGGHITDDWDRRLCRTYLGEFIRPEMLEGELSLAPGFPLPGNMDYNGYHQYIDAELPPESPYLYGLHPNAEIGFLTQTSEKLFRTVLELQPRDSQARDGAGATREEKVKALLEEILERVTDEFNIPELMAKVEERTPYIVVAFQECGRMNILTREIQRSLRELELGLKGELTMTSHMENLQNALYFDMVPESWARRAYPSTAGLAAWFPDLLNRIKELEAWTGDFTMPSTVWLTGFFNPQSFLTAIMQSTARKNEWPLDQMALQCDMTKKNREEFRSPPREGAYIHGLFMEGACWDTQAGIITEAKLKDLTPPMPVMFIKAIPADKQDCRSVYSCPVYKTSQRGPTYVWTFNLKTKENPSKWVLAGVALLLQI

SEQ ID NO: 19939 - protein, 822 aa, Homo sapiens
MSNAMYNKMWHQTQEALGALLDKEPQKMIEPQRNQVFIFQTLATFYVKYVQIFRNLENVYDQFVHPQKRILIRKVLDGVMGRILELKNEMVELELTEFHYFDDILQDLKLAPQQLDIPIPKYFLKEKLEVIKGREKILAQILADSGIDTSDMKYPVKSIPFDEAVKLIQIAERARQGRLRALFMKQIYLQEYRAKQSKMLGKKVTDTWAAALRIQKVWRRFHQRKETEKLREEEMIFLGMNPPPLFNEVSATVIQAEKVDRLRNEVQIKHEEDYREALVTIKNDLKLIEGVDIKENLQDQIRHWFIECRNLTGTFPDYPDVEEGGSAIIFSDKTIQQVIEDIIANQEEEEKNKKKKKKKEKQPKKAKKQKKGTKEKNKEEDEKWKMSPSLFLPAMKEGCNAYKEIWMKKDESWNFSQDYDPELIKEEKRKELQSEIRIQVDELMRQELKNLKLAVDRERERPVKAGKKKDKKGKKGKKKEKKAKKDKDLTADRTIESLYKELVEEGLLIQALKVNLSDYIGEYSYLGTTLRQVSIEPMPSLLDVRQLITLYGIWPLGSAAVHEKAPLVKSLLLAGPSGVGKKMLVHAICTETGANLFNLSSSNIAGKYPGKNGLQMMLHAVFKVARQLQPSVVWIEDTEKTFYKKVPNAEKMNEPKRLKKHLPQILKLLKPDDRILIVGTTRRPFDAELQSFCKVYQKIILVPRPDYASRYVLWKQIIERNGGVLTSALNVSCLAKVTDGFTQGHIVEVVKGVLTDQRIRRQIHKPLTAVEFITAITSMNPVYKEEEESFKNWYAKTPLGKKRALAITGGSTEKAKDKGKRK

SEQ ID NO: 19940 - protein, 679 aa, Homo sapiens
MSNAMYNKMWHQTQEALGALLDKEPQKMIEPQRNQVFIFQTLATFYVKYVQIFRNLENVYDQFVHPQKRILIRKVLDGVMGRILELKNEMVELELTEFHYFDDILQDLKLAPQQLDIPIPKYFLKEKLEVIKGREKILAQILADSGIDTSDMKYPVKSIPFDEAVKLIQIAERARQGRLRALFMKQIYLQEYRAKQSKMLGKKVTDTWAAALRIQKVWRRFHQRKETEKLREEEMIFLGMNPPPLFNEVSATVIQAEKVDRLRNEVQIKHEEDYREALVTIKNDLKLIEGVDIKENLQDQIRHWFIECRNLTGTFPDYPDVEEGGSAIIFSDKTIQQVIEDIIANQEEEEKNKKKKKKKEKQPKKAKKQKKGTKEKNKEEDEKWKMSPSLFLPAMKEGCNAYKEIWMKKDESWNFSQDYDPELIKEEKRKELQSEIRIQVDELMRQELKNLKLAVDRERERPVKAGKKKDKKKGKKGKKKEKKAKKDKDLTADRTIESLYKELVEEGLLIQALKVNLSDYIGEYSYLGTTLRQVSIEPMPSLLDVRQLITLYGIWPLGSAAVHEKAPLVKSLLLAGPSGVGKKMLVHAICTETGANLFNLSSSNIAGKYPGKNGLQMMLHAVFKVARQLQPSVVWIEDTEKTFYKKVPNAEKMFTPSAGEVAALQKNLKRSTSRMNLNA

SEQ ID NO: 19941 - protein, 781 aa, Homo sapiens
MSNAMYNKMWHQTQEALGALLDKEPQKMIEPQRNQVFIFQTLATFYVKYVQIFRNLENVYDQFVHPQKRILIRKVLDGVMGRILELKNEMVELELTEFHYFDDILQDLKLAPQQLDIPIPKYFLKEKLEVIKGREKILAQILADSGIDTSDMKYPVKSIPFDEAVKLIQIAERARQGRLRALFMKQIYLQEYRAKQSKMLGKKVTDTWAAALRIQKVWRRFHQRKETEKLREEEMIFLGMNPPPLFNEVSATVIQAEKVDRLRNEVQIKHEEDYREALVTIKNDLKLIEGVDIKENLQDQIRHWFIECRNLTGTFPDYPDVEEGGSAIIFSDKTIQQEEDEKWKMSPSLFLPAMKEGCNAYKEIWMKKDESWNFSQDYDPELIKEEKRKELQSEIRIQVDELMRQELKNLKLAVDRERERPVKAGKKKDKKGKKGKKKEKKAKKDKDLTADRTIESLYKELVEEGLLIQALKVNLSDYIGEYSYLGTTLRQVSIEPMPSLLDVRQLITLYGIWPLGSAAVHEKAPLVKSLLLAGPSGVGKKMLVHAICTETGANLFNLSSSNIAGKYPGKNGLQMMLHAVFKVARQLQPSVVWIEDTEKTFYKKVPNAEKMNEPKRLKKHLPQILKLLKPDDRILIVGTTRRPFDAELQSFCKVYQKIILVPRPDYASRYVLWKQIIERNGGVLTSALNVSCLAKVTDGFTQGHIVEVVKGVLTDQRIRRQIHKPLTAVEFITAITSMNPVYKEEEESFKNWYAKTPLGKKRALAITGGSTEKAKDKGKRK

SEQ ID NO: 19942 - protein, 523 aa, Homo sapiens
MNQPCNSMEPRVMDDDMLKLAVGDQGPQEEAGQLAKQEGILFKDVLSLQLDFRNILRIDNLWQFENLRKLQLDNNIIEKIEGLENLAHLVWLDLSFNNIETIEGLDTLVNLEDLSLFNNRISKIDSLDALVKLQVLSLGNNRIDNMMNIIYLRRFKCLRTLSLSRNPISEAEDYKMFICAYLPDLMYLDYRRIDDHTKKLAEAKHQYSIDELKHQENLMQAQLEDEQAQREELEKHKTAFVEHLNGSFLFDSMYAEDSEGNNLSYLPGVGELLETYKDKFVIICVNIFEYGLKQQEKRKTELDTFSECVREAIQENQEQGKRKIAKFEEKHLSSLSAIREELELPNIEKMILECSADISELFDALMTLEMQLVEQLEETINMFERNIVDMVGLFIENVQSLMAQCRDLENHHHEKLLEISISTLEKIVEGDLDEDLPNDLRALFVDKDTIVNAVGASHDIHLLKIDNREDELVTRINSWCTRLIDRIHKDEIMRNRKRVKEINQYIDHMQSELDNLECGDILD

SEQ ID NO: 19943 - protein, 457 aa, Homo sapiens
MNQPCNSMEPRVMDDDMLKLAVGDQGPQEEAGQLAKQEGILFKDVLSLQLDFRNILRIDNLWQFENLRKLQLDNNIIEKIEGLENLAHLVWLDLSFNNIETIEGLDTLVNLEDLSLFNNRISKIDSLDALVKLQVLSLGNNRIDNMMNIIYLRRFKCLRTLSLSRNPISEAEDYKMFICAYLPDLMYLDYRRIDDHTKKLAEAKHQYSIDELKHQENLMQAQLEDEQAQREELEKHKTAFVEHLNGSFLFDSMYAEDSEGNNLSYLPGVGELLETYKDKFVIICVNIFEYGLKQQEKRKTELDTFSECVREAIQENQEQGKRKIAKFEEKHLSSLSAIREELELPNIEKMILECSADISELFDALMTLEMQLVEQLEETINMFERNIVDMVGLFIENVQSLMAQCRDLENHHHEKLLEISISTLEKIVEGDLDEDLPNDLRAGRFQKFNYVEASGTF

SEQ ID NO: 19944 - protein, 269 aa, Homo sapiens
MPLGLKPTCSVCKTTSSSMWKKGAQGEILCHHCTGRGGAGSGGAGSGAAGGTGGSGGGGFGAATFASTSATPPQSNGGGGGKQSKQEIHRRSARLRNTKYKSAPAAEKKVSTKGKGRRHIFKLKNPIKAPESVSTIITAESIFYKGVYYQIGDVVSVIDEQDGKPYYAQIRGFIQDQYCEKSAALTWLIPTLSSPRDQFDPASYIIGPEEDLPRKMEYLEFVCHAPSEYFKSRSSPFPTVPTRPEKGYIWTHVGPTPAITIKESVANHL

SEQ ID NO: 19945 - protein, 735 aa, Homo sapiens
MTPELMIKACSFYTGHLVKTHFCTWRDIARTNENVVLAEKMNRAVTCYNFRLQKSVFHHWHSYMEDQKEKLKNILLRIQQIIYCHKLTIILTKWRNTARHKSKKKEDELILKHELQLKKWKNRLILKRAAAEESNFPERSSSEVFLVDETLKCDISLLPERAILQIFFYLSLKDVIICGQVNHAWMLMTQLNSLWNAIDFSSVKNVIPDKYIVSTLQRWRLNVLRLNFRGCLLRPKTFRSVSHCRNLQELNVSDCPTFTDESMRHISEGCPGVLCLNLSNTTITNRTMRLLPRHFHNLQNLSLAYCRRFTDKGLQYLNLGNGCHKLIYLDLSGCTQISVQGFRYIANSCTGIMHLTINDMPTLTDNCVKALVEKCSRITSLVFTGAPHISDCTFRALSACKLRKIRFEGNKRVTDASFKFIDKNYPNLSHIYMADCKGITDSSLRSLSPLKQLTVLNLANCVRIGDMGLKQFLDGPASMRIRELNLSNCVRLSDASVMKLSERCPNLNYLSLRNCEHLTAQGIGYIVNIFSLVSIDLSGTDISNEGLNVLSRHKKLKELSVSECYRITDDGIQAFCKSSLILEHLDVSYCSQLSDMIIKALAIYCINLTSLSIAGCPKITDSAMEMLSAKCHYLHILDISGCVLLTDQILEDLQIGCKQLRILKMQYCTNISKKAAQRMSSKVQQQEYNTNDPPRWFGYDREGNPVTELDNITSSKGALELTVKKSTYSSEDQAA

SEQ ID NO: 19946 - protein, 707 aa, Homo sapiens
MTPELMIKACSFYTGHLVKTHFCTWRDIARTNENVVLAEKMNRAVTCYNFRLQKSVFHHWHSYMEDQKEKLKNILLRIQQIIYCHKLTIILTKWRNTARHKSKKKEDELILKHELQLKKWKNRLILKRAAAEESNFPERSSSEVFLVDETLKCDISLLPERAILQIFFYLSLKDVIICGQVNHAWMLMTQLNSLWNAIDFSSVKNVIPDKYIVSTLQRWRLNVLRLNFRGCLLRPKTFRSVSHCRNLQELNVSDCPTFTDESMRHISEGCPGVLCLNLSNTTITNRTMRLLPRHFHNLQNLSLAYCRRFTDKGLQYLNLGNGCHKLIYLDLSGCTQISVQGFRYIANSCTGIMHLTINDMPTLTDNCVKALVEKCSRITSLVFTGAPHISDCTFRALSACKLRKIRFEGNKRVTDASFKFIDKNYPNLSHIYMADCKGITDSSLRSLSPLKQLTVLNLANCVRIGDMGLKQFLDGPASMRIRELNLSNCVRLSDASVMKLSERCPNLNYLSLRNCEHLTAQGIGYIVNIFSLVSIDLSGTDISNEAFCKSSLILEHLDVSYCSQLSDMIIKALAIYCINLTSLSIAGCPKITDSAMEMLSAKCHYLHILDISGCVLLTDQILEDLQIGCKQLRILKMQYCTNISKKAAQRMSSKVQQQEYNTNDPPRWFGYDREGNPVTELDNITSSKGALELTVKKSTYSSEDQAA

SEQ ID NO: 19947 - protein, 690 aa, Homo sapiens
MTPELMIKACSFYTGHLVKTHFCTWRDIARTNENVVLAEKMNRAVTCYNFRLQKSVFHHWHSYMEDQKEKLKNILLRIQQIIYCHKLTIILTKWRNTARHKSKKKEDELILKHELQLKKWKNRLILKRAAAEESNFPERSSSEVFLVDETLKCDISLLPERAILQIFFYLSLKDVIICGQVNHAWMLMTQLNSLWNAIDFSSVKNVIPDKYIVSTLQRWRLNVLRLNFRGCLLRPKTFRSVSHCRNLQELNVSDCPTFTDESMRHISEGCPGVLCLNLSNTTITNRTMRLLPRHFHNLQNLSLAYCRRFTDKGLQYLNLGNGCHKLIYLDLSGCTQISVQGFRYIANSCTGIMHLTINDMPTLTDNCVKALVEKCSRITSLVFTGAPHISDCTFRALSACKLRKIRFEGNKRVTDASFKFIDKNYPNLSHIYMADCKGITDSSLRSLSPLKQLTVLNLANCVRIGDMGLKQFLDGPASMRIRELNLSNCVRLSDASVMKLSERCPNLNYLSLRNCEHLTAQGIGYIVNIFSLVSIDLSGTDISNEGLNVLSRHKKLKELSVSECYRITDDGIQITDSAMEMLSAKCHYLHILDISGCVLLTDQILEDLQIGCKQLRILKMQYCTNISKKAAQRMSSKVQQQEYNTNDPPRWFGYDREGNPVTELDNITSSKGALELTVKKSTYSSEDQAA

SEQ ID NO: 19948 - protein, 453 aa, Homo sapiens
MTPELMIKACSFYTGHLVKTHFCTWRDIARTNENVVLAEKMNRAVTCYNFRLQKSVFHHWHSYMEDQKEKLKNILLRIQQIIYCHKLTIILTKWRNTARHKSKKKEDELILKHELQLKKWKNRLILKRAAAEESNFPERSSSEVFLVDETLKCDISLLPERAILQIFFYLSLKDVIICGQVNHAWMLMTQLNSLWNAIDFSSVKNVIPDKYIVSTLQRWRLNVLRLNFRGCLLRPKTFRSVSHCRNLQELNVSDCPTFTDESMRHISEGCPGVLCLNLSNTTITNRTMRLLPRHFHNLQNLSLAYCRRFTDKGLQYLNLGNGCHKLIYLDLSGCTQITDSAMEMLSAKCHYLHILDISGCVLLTDQILEDLQIGCKQLRILKMQYCTNISKKAAQRMSSKVQQQEYNTNDPPRWFGYDREGNPVTELDNITSSKGALELTVKKSTYSSEDQAA

SEQ ID NO: 19949 - protein, 117 aa, Homo sapiens
MKFVYKEEHPFEKRRSEGEKIRKKYPDRVPVIVEKAPKARIGDLDKKKYLVPSDLTVGQFYFLIRKRIHLRAEDALFFFVNNVIPPTSATMGQLYQEHHEEDFFLYIAYSDESVYGL

SEQ ID NO: 19950 - protein, 501 aa, Homo sapiens
MQDTVTTSALLDPSHSSVSTQDNSSTGGHTSSTSPQLSKPSITPVPAKSRNPHPRANIRRMRRIIAEDPEWSLAIVPLLTELCIQHIIRNFQKNPILKQMLPEHQQKVLNHLSPDLPLAVTANLIDSENYWLRCCMHRWPVCHVAHHGGSWKRMFFERHLENLLKHFIPGTTDPAVILDLLPLCRNYVRRVHVDQFLPPVQLPAQLRPGDQSDSGSEGEMEEPTVDHYQLGDLVAGLSHLEELDLVYDVKDCGMNFEWNLFLFTYRDCLSLAAAIKACHTLKIFKLTRSKVDDDKARIIIRSLLDHPVLEELDLSQNLIGDRGARGAAKLLSHSRLRVLNLANNQVRAPGAQSLAHALAHNTNLISLNLRLNCIEDEGGQALAHALQTNKCLTTLHLGGNELSEPTATLLSQVLAINTTLTSINLSCNHIGLDGGKQLLEGMSDNKTLLEFDLRLSDVAQESEYLIGQALYANREAARQRALNPSHFMSTITANGPENSVG

SEQ ID NO: 19951 - protein, 412 aa, Homo sapiens
MGDGAVKQGFLYLQQQQTFGKKWRRFGASLYGGSDCALARLELQEGPEKPRRCEAARKVIRLSDCLRVAEAGGEASSPRDTSAFFLETKERLYLLAAPAAERGDWVQAICLLAFPGQRKELSGPEGKQSRPCMEENELYSSAVTVGPHKEFAVTMRPTEASERCHLRGSYTLRAGESALELWGGPEPGTQLYDWPYRFLRRFGRDKVTFSFEAGRRCVSGEGNFEFETRQGNEIFLALEEAISAQKNAAPATPQPQPATIPASLPRPDSPYSRPHDSLPPPSPTTPVPAPRPRGQEGEYAVPFDAVARSLGKNFRGILAVPPQLLADPLYDSIEETLPPRPDHIYDEPEGVAALSLYDSPQEPRGEAWRRQATADRDPAGLQHVQPAGQDFSASGWQPGTEYDNVVLKKGPK

SEQ ID NO: 19952 - protein, 419 aa, Homo sapiens
MGNRSTADADGLLAGRGPAAGASAGASAGLAGQGAAALVGGVLLIGAVLAGNSLVCVSVATERALQTPTNSFIVSLAAADLLLALLVLPLFVYSEVQGGAWLLSPRLCDALMAMDVMLCTASIFNLCAISVDRFVAVAVPLRYNRQGGSRRQLLLIGATWLLSAAVAAPVLCGLNDVRGRDPAVCRLEDRDYVVYSSVCSFFLPCPLMLLLYWATFRGLQRWEVARRAKLHGRAPRRPSGPGPPSPTPPAPRLPQDPCGPDCAPPAPGLPRGPCGPDCAPAAPSLPQDPCGPDCAPPAPGLPPDPCGSNCAPPDAVRAAALPPQTPPQTRRRRRAKITGRERKAMRVLPVVVGAFLLCWTPFFVVHITQALCPACSVPPRLVSAVTWLGYVNSALNPVIYTVFNAEFRNVFRKALRACC

SEQ ID NO: 19953 - protein, 110 aa, Homo sapiens
MAAVVAKREGPPFISEAAVRGNAAVLDYCRTSVSALSGATAGILGLTGLYGFIFYLLASVLLSLLLILKAGRRWNKYFKSRRPLFTGGLIGGLFTYVLFWTFLYGMVHVY

SEQ ID NO: 19954 - protein, 117 aa, Homo sapiens
MRASSFLIVVVFLIAGTLVLEAAVTGVPVKGQDTVKGRVPFNGQDPVKGQVSVKGQDKVKAQEPVKGPVSTKPGSCPIILIRCAMLNPPNRCLKDTDCPGIKKCCEGSCGMACFVPQ

SEQ ID NO: 19955 - protein, 2030 aa, Homo sapiens
MWTPTEEEKYGVVICSFRGSVPQGLVLEIGETVQILEKCEGWYRGVSTKKPNVKGIFPANYIHLKKAIVSNRGQYETVVPLEDSIVTEVTATLQEWASLWKQLYVKHKVDLFYKLRHVMNELIDLRRQLLSGHLTQDQVREVKRHITVRLDWGNEHLGLDLVPRKDFEVVDSDQISVSDLYKMHLSSRQSVQQSTSQVDTMRPRHGETCRMPVPHHFFLSLKSFTYNTIGEDTDVFFSLYDMREGKQISERFLVRLNKNGGPRNPEKIERMCALFTDLSSKDMKRDLYIVAHVIRIGRMLLNDSKKGPPHLHYRRPYGCAVLSILDVLQSLTEVKEEKDFVLKVYTCNNESEWSQIHENIIRKSSAKYSAPSASHGLIISLQLLRGDMEQIRRENPMIFNRGLAITRKLGFPDVIMPGDIRNDLYLTLEKGDFERGGKSVQKNIEVTMYVLYADGEILKDCISLGSGEPNRSSYHSFVLYHSNSPRWGEIIKLPIPIDRFRGSHLRFEFRHCSTKDKGEKKLFGFAFSTLMRDDGTTLSDDIHELYVYKCDENSTFNNHALYLGLPCCKEDYNGCPNIPSSLIFQRSTKESFFISTQLSSTKLTQNVDLLALLKWKAFPDRIMDVLGRLRHVSGEEIVKFLQDILDTLFVILDDNTEKYGLLVFQSLVFIINLLRDIKYFHFRPVMDTYIQKHFAGALAYKELIRCLKWYMDCSAELIRQDHIQEAMRALEYLFKFIVQSRILYSRATCGMEEEQFRSSIQELFQSIRFVLSLDSRNSETLLFTQAALLNSFPTIFDELLQMFTVQEVAEFVRGTLGSMPSTVHIGQSMDVVKLQSIARTVDSRLFSFSESRRILLPVVLHHIHLHLRQQKELLICSGILGSIFSIVKTSSLEADVMEEVEMMVESLLDVLLQTLLTIMSKSHAQEAVRGQRCPQCTAEITGEYVSCLLSLLRQMCDTHFQHLLDNFQSKDELKEFLLKIFCVFRNLMKMSVFPRDWMVMRLLTSNIIVTTVQYLSSALHKNFTETDFDFKVWNSYFSLAVLFINQPSLQLEIITSAKRKKILDKYGDMRVMMAYELFSMWQNLGEHKIHFIPGMIGPFLGVTLVPQPEVRNIMIPIFHDMMDWEQRKNGNFKQVEAELIDKLDSMVSEGKGDESYRELFSLLTQLFGPYPSLLEKVEQETWRETGISFVTSVTRLMERLLDYRDCMKGEETENKKIGCTVNLMNFYKSEINKEEMYIRYIHKLCDMHLQAENYTEAAFTLLLYCELLQWEDRPLREFLHYPSQTEWQRKEGLCRKIIHYFNKGKSWEFGIPLCRELACQYESLYDYQSLSWIRKMEASYYDNIMEQQRLEPEFFRVGFYGRKFPFFLRNKEYVCRGHDYERLEAFQQRMLSEFPQAVAMQHPNHPDDAILQCDAQYLQIYAVTPIPDYVDVLQMDRVPDRVKSFYRVNNVRKFRYDRPFHKGPKDKENEFKSLWIERTTLTLTHSLPGISRWFEVERRELVEVSPLENAIQVVENKNQELRSLISQYQHKQVHGNINLLSMCLNGVIDAAVNGGIARYQEAFFDKDYINKHPGDAEKITQLKELMQEQVHVLGVGLAVHEKFVHPEMRPLHKKLIDQFQMMRASLYHEFPGLDKLSPACSGTSTPRGNVLASHSPMSPESIKMTHRHSPMNLMGTGRHSSSSLSSHASSEAGNMVMLGDGSMGDAPEDLYHHMQLAYPNPRYQGSVTNVSVLSSSQASPSSSSLSSTHSAPSQMITSAPSSARGSPSLPDKYRHAREMMLLLPTYRDRPSSAMYPAAILENGQPPNFQRALFQQVVGACKPCSDPNLSVAEKGHYSLHFDAFHHPLGDTPPALPARTLRKSPLHPIPASPTSPQSGLDGSNSTLSGSASSGVSSLSESNFGHSSEAPPRTDTMDSMPSQAWNADEDLEPPYLPVHYSLSESAVLDSIKAQPCRSHSAPGCVIPQDPMDPPALPPKPYHPRLPALEHDEGVLLREETERPRGLHRKAPLPPGSAKEEQARMAWEHGRGEQ

SEQ ID NO: 19956 - protein, 594 aa, Homo sapiens
MNADFLLPYYTAQSGSSMSMFNTTMGKLQRQLYKGEYDIFKYAPIFESDFIQITKRGEVIDVHNRVRMVTMGIARTSPILPLPDVMLLARPATGCEEYAGHGQATKRKKRKAAKNLELTRLLPLRFVRISVQDHEKQQLRLKFATGRSCYLQLCPALDTRDDLFAYWEKLIYLLRPPMESNSSTCGIPAEDMMWMPVFQEDRRSLGAVNLQGKGDQDQVSIQSLHMVSEVCGATSAAYAGGEGLQNDFNKPTNVLNASIPKTSTELAEEPATGGIKEAAAAGAAAGAATGTVAGALSVAAANSAPGQVSAAIAGAATIGAGGNKGNMALAGTASMAPNSTKVAVAGAAGKSSEHVSSASMSLSREGSVSLAIAGVVLTSRTAAEADMDAAAGPPVSTRQSKSSLSGQHGRERTQASAEGCKEGRERREKDRALGRSSHRRRTGESRHKTRGDKIAQKSSSRSSFSHRANRDDKKEKGCGNPGSSRHRDSHKGVSHTPISKESRTSHKSGRSLWTTSSGSSKGLGRVSSFLRNVRANLTTKVVGTPHGRDVNVMAKMAERSTNVAIAETAEGGQGLETVGSMTPDIMETVTFEAH

SEQ ID NO: 19957 - protein, 398 aa, Homo sapiens
MVTLITEKLQSQSLDDLTCKAEAGPLQYSAETLNKSGRLFPLELNDQSPWKVFSGGPPVRSQAATGPDFSFLPGLSAAAHTMGLQWQPQSPRPGAGLGAASTVDPSESTGSSTAPPTKRHCRSLSEPEELVRCRSPWRPGSSKVWTPVSKRRCDSGGSATRQGSPGAVLPRSAVWSTGPTSPATPRPSSASGGFVDSSEGSAGSGPLWCSAESCLPSTRRRPSLSQERLAGAGTPLPWASSSPTSTPALGGRRGLLRCRSQPCVLSGKRSRRKRRREEDARWTRPSLDFLKMTQTLKNSKSLCSLNYEDDDEDDTPVKTVLSSPCDSRGLPGITMPGCSQRGLRTSPVHPNLWASRESVTSDGSRRSSGDPRDGDSVGEEGVFPRARWELDLEQIENN

SEQ ID NO: 19958 - protein, 1186 aa, Homo sapiens
MGVQGLWKLLECSGRQVSPEALEGKILAVDISIWLNQALKGVRDRHGNSIENPHLLTLFHRLCKLLFFRIRPIFVFDGDAPLLKKQTLVKRRQRKDLASSDSRKTTEKLLKTFLKRQAIKTAFRSKRDEALPSLTQVRRENDLYVLPPLQEEEKHSSEEEDEKEWQERMNQKQALQEEFFHNPQAIDIESEDFSSLPPEVKHEILTDMKEFTKRRRTLFEAMPEESDDFSQYQLKGLLKKNYLNQHIEHVQKEMNQQHSGHIRRQYEDEGGFLKEVESRRVVSEDTSHYILIKGIQAKTVAEVDSESLPSSSKMHGMSFDVKSSPCEKLKTEKEPDATPPSPRTLLAMQAALLGSSSEEELESENRRQARGRNAPAAVDEGSISPRTLSAIKRALDDDEDVKVCAGDDVQTGGPGAEEMRINSSTENSDEGLKVRDGKGIPFTATLASSSVNSAEEHVASTNEGREPTDSVPKEQMSLVHVGTEAFPISDESMIKDRKDRLPLESAVVRHSDAPGLPNGRELTPASPTCTNSVSKNETHAEVLEQQNELCPYESKFDSSLLSSDDETKCKPNSASEVIGPVSLQETSSIVSVPSEAVDNVENVVSFNAKEHENFLETIQEQQTTESAGQDLISIPKAVEPMEIDSEESESDGSFIEVQSVISDEELQAEFPETSKPPSEQGEEELVGTREGEAPAESESLLRDNSERDDVDGEPQEAEKDAEDSLHEWQDINLEELETLESNLLAQQNSLKAQKQQQERIAATVTGQMFLESQELLRLFGIPYIQAPMEAEAQCAILDLTDQTSGTITDDSDIWLFGARHVYRNFFNKNKFVEYYQYVDFHNQLGLDRNKLINLAYLLGSDYTEGIPTVGCVTAMEILNEFPGHGLEPLLKFSEWWHEAQKNPKIRPNPHDTKVKKKLRTLQLTPGFPNPAVAEAYLKPVVDDSKGSFLWGKPDLDKIREFCQRYFGWNRTKTDESLFPVLKQLDAQQTQLRIDSFFRLAQQEKEDAKRIKSQRLNRAVTCMLRKEKEAAASEIEAVSVAMEKEFELLDKAKGKTQKRGITNTLEESSSLKRKRLSDSKGKNTCGGFLGETCLSESSDGSSSEDAESSSLMNVQRRTAAKEPKTSASDSQNSVKEAPVKNGGATTSSSSDSDDDGGKEKMVLVTARSVFGKKRRKLRRARGRKRKT

SEQ ID NO: 19959 - protein, 419 aa, Homo sapiens
MFLESQELLRLFGIPYIQAPMEAEAQCAILDLTDQTSGTITDDSDIWLFGARHVYRNFFNKNKFVEYYQYVDFHNQLGLDRNKLINLAYLLGSDYTEGIPTVGCVTAMEILNEFPGHGLEPLLKFSEWWHEAQKNPKIRPNPHDTKVKKKLRTLQLTPGFPNPAVAEAYLKPVVDDSKGSFLWGKPDLDKIREFCQRYFGWNRTKTDESLFPVLKQLDAQQTQLRIDSFFRLAQQEKEDAKRIKSQRLNRAVTCMLRKEKEAAASEIEAVSVAMEKEFELLDKAKGKTQKRGITNTLEESSSLKRKRLSDSKGKNTCGGFLGETCLSESSDGSSSEDAESSSLMNVQRRTAAKEPKTSASDSQNSVKEAPVKNGGATTSSSSDSDDDGGKEKMVLVTARSVFGKKRRKLRRARGRKRKT

SEQ ID NO: 19960 - protein, 232 aa, Homo sapiens
MGVQGLWKLLECSGRQVSPEALEGKILAVDISIWLNQALKGVRDRHGNSIENPHLLTLFHRLCKLLFFRIRPIFVFDGDAPLLKKQTLVKRRQRKDLASSDSRKTTEKLLKTFLKRQAIKTAFRSKRDEALPSLTQVRRENDLYVLPPLQEEEKHSSEEEDEKEWQERMNQKQALQEEFFHNPQAIDIESEDFSSLPPEVKHEILTDMKEFTKRRRTLFEAMPEVYLPLLQP

SEQ ID NO: 19961 - protein, 190 aa, Homo sapiens
MKASQCCCCLSHLLASVLLLLLLPELSGPLAVLLQAAEAAPGLGPPDPRPRTLPPLPPGPTPAQQPGRGLAEAAGPRGSEGGNGSNPVAGLETDDHGGKAGEGSVGGGLAVSPNPGDKPMTQRALTVLMVVSGAVLVYFVVRTVRMRRRNRKTRRYGVLDTNIENMELTPLEQDDEDDDNTLFDANHPRR

SEQ ID NO: 19962 - protein, 307 aa, Homo sapiens
MAALYACTKCHQRFPFEALSQGQQLCKECRIAHPVVKCTYCRTEYQQESKTNTICKKCAQNVQLYGTPKPCQYCNIIAAFIGNKCQRCTNSEKKYGPPYSCEQCKQQCAFDRKDDRKKVDGKLLCWLCTLSYKRVLQKTKEQRKHLSSSSRAGHQEKEQYSRLSGGGHYNSQKTLSTSSIQNEIPKKKSKFESITTNGDSFSPDLALDSPGTDHFVIIAQLKEEVATLKKMLHQKDQMILEKEKKITELKADFQYQESQMRAKMNQMEKTHKEVTEQLQAKNRELLKQAAALSKSKKSEKSGAITSP

SEQ ID NO: 19963 - protein, 278 aa, Homo sapiens
MAALYACTKCHQRFPFEALSQGQQLCKECRIAHPVVKCTYCRTEYQQESKTNTICKKCAQNVQLYGTPKPCQYCNIIAAFIGNKCQRCTNSEKKYGPPYSCEQCKQQCAFDRKDDRKKVDGKLLCWLCTLSYKRVLQKTKEQRKHLSSSSRAGHQEKEQYSRLSGGGHYNSFSPDLALDSPGTDHFVIIAQLKEEVATLKKMLHQKDQMILEKEKKITELKADFQYQESQMRAKMNQMEKTHKEVTEQLQAKNRELLKQAAALSKSKKSEKSGAITSP

SEQ ID NO: 19964 - protein, 341 aa, Homo sapiens
MAALYACTKCHQRFPFEALSQGQQLCKECRIAHPVVKCTYCRTEYQQERLECNGTISAHCNLHLPGSSDSPASSSRVAGITGIKTNTICKKCAQNVQLYGTPKPCQYCNIIAAFIGNKCQRCTNSEKKYGPPYSCEQCKQQCAFDRKDDRKKVDGKLLCWLCTLSYKRVLQKTKEQRKHLSSSSRAGHQEKEQYSRLSGGGHYNSQKTLSTSSIQNEIPKKKSKFESITTNGDSFSPDLALDSPGTDHFVIIAQLKEEVATLKKMLHQKDQMILEKEKKITELKADFQYQESQMRAKMNQMEKTHKEVTEQLQAKNRELLKQAAALSKSKKSEKSGAITSP

SEQ ID NO: 19965 - protein, 312 aa, Homo sapiens
MAALYACTKCHQRFPFEALSQGQQLCKECRIAHPVVKCTYCRTEYQQERLECNGTISAHCNLHLPGSSDSPASSSRVAGITGIKTNTICKKCAQNVQLYGTPKPCQYCNIIAAFIGNKCQRCTNSEKKYGPPYSCEQCKQQCAFDRKDDRKKVDGKLLCWLCTLSYKRVLQKTKEQRKHLSSSSRAGHQEKEQYSRLSGGGHYNSFSPDLALDSPGTDHFVIIAQLKEEVATLKKMLHQKDQMILEKEKKITELKADFQYQESQMRAKMNQMEKTHKEVTEQLQAKNRELLKQAAALSKSKKSEKSGAITSP

SEQ ID NO: 19966 - protein, 227 aa, Homo sapiens
MAALYACTKCHQRFPFEALSQGQQLCKECRIAHPVVKCTYCRTEYQQESKTNTICKKCAQNVQLYGTVDGKLLCWLCTLSYKRVLQKTKEQRKHLSSSSRAGHQEKEQYSRLSGGGHYNSFSPDLALDSPGTDHFVIIAQLKEEVATLKKMLHQKDQMILEKEKKITELKADFQYQESQMRAKMNQMEKTHKEVTEQLQAKNRELLKQAAALSKSKKSEKSGAITSP

SEQ ID NO: 19967 - protein, 112 aa, Homo sapiens
MEAYEQVQKGPLKLKGVAELGVTKRKKKKKDKDKAKLLEAMGTSKKNEEEKRRGLDKRTPAQAAFEKMQEKRQMERILKKASKTHKQRVEDFNRHLDTLTEHYDIPKVSWTK

SEQ ID NO: 19968 - protein, 107 aa, Homo sapiens
MEAYEQVQKGPLKLKGVAELGVTKRKKKKKDKDKAKLLEAMGTSKKNEEEKRRGLDKRTPAQAAFEKMQEKRQGHQTSCIATGFQGHKANAARSYAWIQNWYCVPSS

SEQ ID NO: 19969 - protein, 92 aa, Homo sapiens
MSFSRKKKKKDKDKAKLLEAMGTSKKNEEEKRRGLDKRTPAQAAFEKMQEKRQMERILKKASKTHKQRVEDFNRHLDTLTEHYDIPKVSWTK

SEQ ID NO: 19970 - protein, 746 aa, Homo sapiens
MGQTGKKSEKGPVCWRKRVKSEYMRLRQLKRFRRADEVKSMFSSNRQKILERTEILNQEWKQRRIQPVHILTSVSSLRGTRECSVTSDLDFPTQVIPLKTLNAVASVPIMYSWSPLQQNFMVEDETVLHNIPYMGDEVLDQDGTFIEELIKNYDGKVHGDRECGFINDEIFVELVNALGQYNDDDDDDDGDDPEEREEKQKDLEDHRDDKESRPPRKFPSDKIFEAISSMFPDKGTAEELKEKYKELTEQQLPGALPPECTPNIDGPNAKSVQREQSLHSFHTLFCRRCFKYDCFLHPFHATPNTYKRKNTETALDNKPCGPQCYQHLEGAKEFAAALTAERIKTPPKRPGGRRRGRLPNNSSRPSTPTINVLESKDTDSDREAGTETGGENNDKEEEEKKDETSSSSEANSRCQTPIKMKPNIEPPENVEWSGAEASMFRVLIGTYYDNFCAIARLIGTKTCRQVYEFRVKESSIIAPAPAEDVDTPPRKKKRKHRLWAAHCRKIQLKKDGSSNHVYNYQPCDHPRQPCDSSCPCVIAQNFCEKFCQCSSECQNRFPGCRCKAQCNTKQCPCYLAVRECDPDLCLTCGAADHWDSKNVSCKNCSIQRGSKKHLLLAPSDVAGWGIFIKDPVQKNEFISEYCGEIISQDEADRRGKVYDKYMCSFLFNLNNDFVVDATRKGNKIRFANHSVNPNCYAKVMMVNGDHRIGIFAKRAIQTGEELFFDYRYSQADALKYVGIEREMEIP

SEQ ID NO: 19971 - protein, 751 aa, Homo sapiens
MGQTGKKSEKGPVCWRKRVKSEYMRLRQLKRFRRADEVKSMFSSNRQKILERTEILNQEWKQRRIQPVHILTSVSSLRGTRECSVTSDLDFPTQVIPLKTLNAVASVPIMYSWSPLQQNFMVEDETVLHNIPYMGDEVLDQDGTFIEELIKNYDGKVHGDRECGFINDEIFVELVNALGQYNDDDDDDDGDDPEEREEKQKDLEDHRDDKESRPPRKFPSDKIFEAISSMFPDKGTAEELKEKYKELTEQQLPGALPPECTPNIDGPNAKSVQREQSLHSFHTLFCRRCFKYDCFLHRKCNYSFHATPNTYKRKNTETALDNKPCGPQCYQHLEGAKEFAAALTAERIKTPPKRPGGRRRGRLPNNSSRPSTPTINVLESKDTDSDREAGTETGGENNDKEEEEKKDETSSSSEANSRCQTPIKMKPNIEPPENVEWSGAEASMFRVLIGTYYDNFCAIARLIGTKTCRQVYEFRVKESSIIAPAPAEDVDTPPRKKKRKHRLWAAHCRKIQLKKDGSSNHVYNYQPCDHPRQPCDSSCPCVIAQNFCEKFCQCSSECQNRFPGCRCKAQCNTKQCPCYLAVRECDPDLCLTCGAADHWDSKNVSCKNCSIQRGSKKHLLLAPSDVAGWGIFIKDPVQKNEFISEYCGEIISQDEADRRGKVYDKYMCSFLFNLNNDFVVDATRKGNKIRFANHSVNPNCYAKVMMVNGDHRIGIFAKRAIQTGEELFFDYRYSQADALKYVGIEREMEIP

SEQ ID NO: 19972 - protein, 707 aa, Homo sapiens
MGQTGKKSEKGPVCWRKRVKSEYMRLRQLKRFRRADEVKSMFSSNRQKILERTEILNQEWKQRRIQPVHILTSVSSLRGTREVEDETVLHNIPYMGDEVLDQDGTFIEELIKNYDGKVHGDRECGFINDEIFVELVNALGQYNDDDDDDDGDDPEEREEKQKDLEDHRDDKESRPPRKFPSDKIFEAISSMFPDKGTAEELKEKYKELTEQQLPGALPPECTPNIDGPNAKSVQREQSLHSFHTLFCRRCFKYDCFLHPFHATPNTYKRKNTETALDNKPCGPQCYQHLEGAKEFAAALTAERIKTPPKRPGGRRRGRLPNNSSRPSTPTINVLESKDTDSDREAGTETGGENNDKEEEEKKDETSSSSEANSRCQTPIKMKPNIEPPENVEWSGAEASMFRVLIGTYYDNFCAIARLIGTKTCRQVYEFRVKESSIIAPAPAEDVDTPPRKKKRKHRLWAAHCRKIQLKKDGSSNHVYNYQPCDHPRQPCDSSCPCVIAQNFCEKFCQCSSECQNRFPGCRCKAQCNTKQCPCYLAVRECDPDLCLTCGAADHWDSKNVSCKNCSIQRGSKKHLLLAPSDVAGWGIFIKDPVQKNEFISEYCGEIISQDEADRRGKVYDKYMCSFLFNLNNDFVVDATRKGNKIRFANHSVNPNCYAKVMMVNGDHRIGIFAKRAIQTGEELFFDYRYSQADALKYVGIEREMEIP

SEQ ID NO: 19973 - protein, 737 aa, Homo sapiens
MGQTGKKSEKGPVCWRKRVKSEYMRLRQLKRFRRADEVKSMFSSNRQKILERTEILNQEWKQRRIQPVHILTSCSVTSDLDFPTQVIPLKTLNAVASVPIMYSWSPLQQNFMVEDETVLHNIPYMGDEVLDQDGTFIEELIKNYDGKVHGDRECGFINDEIFVELVNALGQYNDDDDDDDGDDPEEREEKQKDLEDHRDDKESRPPRKFPSDKIFEAISSMFPDKGTAEELKEKYKELTEQQLPGALPPECTPNIDGPNAKSVQREQSLHSFHTLFCRRCFKYDCFLHPFHATPNTYKRKNTETALDNKPCGPQCYQHLEGAKEFAAALTAERIKTPPKRPGGRRRGRLPNNSSRPSTPTINVLESKDTDSDREAGTETGGENNDKEEEEKKDETSSSSEANSRCQTPIKMKPNIEPPENVEWSGAEASMFRVLIGTYYDNFCAIARLIGTKTCRQVYEFRVKESSIIAPAPAEDVDTPPRKKKRKHRLWAAHCRKIQLKKDGSSNHVYNYQPCDHPRQPCDSSCPCVIAQNFCEKFCQCSSECQNRFPGCRCKAQCNTKQCPCYLAVRECDPDLCLTCGAADHWDSKNVSCKNCSIQRGSKKHLLLAPSDVAGWGIFIKDPVQKNEFISEYCGEIISQDEADRRGKVYDKYMCSFLFNLNNDFVVDATRKGNKIRFANHSVNPNCYAKVMMVNGDHRIGIFAKRAIQTGEELFFDYRYSQADALKYVGIEREMEIP

SEQ ID NO: 19974 - protein, 695 aa, Homo sapiens
MGQTGKKSEKGPVCWRKRVKSEYMRLRQLKRFRRADEVKSMFSSNRQKILERTEILNQEWKQRRIQPVHILTSCSVTSDLDFPTQVIPLKTLNAVASVPIMYSWSPLQQNFMVEDETVLHNIPYMGDEVLDQDGTFIEELIKNYDGKVHGDRECGFINDEIFVELVNALGQYNDDDDDDDGDDPEEREEKQKDLEDHRDDKESRPPRKFPSDKIFEAISSMFPDKGTAEELKEKYKELTEQQLPGALPPECTPNIDGPNAKSVQREQSLHSFHTLFCRRCFKYDCFLHPFHATPNTYKRKNTETALDNKPCGPQCYQHLEGAKEFAAALTAERIKTPPKRPGGRRRGRLPNNSSRPSTPTINVLESKDTDSDREAGTETGGENNDKEEEEKKDETSSSSEANSRCQTPIKMKPNIEPPENVEWSGAEASMFRVLIGTYYDNFCAIARLIGTKTCRQVYEFRVKESSIIAPAPAEDVDTPPRKKKRKHRLWAAHCRKIQLKKGQNRFPGCRCKAQCNTKQCPCYLAVRECDPDLCLTCGAADHWDSKNVSCKNCSIQRGSKKHLLLAPSDVAGWGIFIKDPVQKNEFISEYCGEIISQDEADRRGKVYDKYMCSFLFNLNNDFVVDATRKGNKIRFANHSVNPNCYAKVMMVNGDHRIGIFAKRAIQTGEELFFDYRYSQADALKYVGIEREMEIP

SEQ ID NO: 19975 - protein, 236 aa, Homo sapiens
MPTDMEHTGHYLHLAFLMTTVFSLSPGTKANYTRLWANSTSSWDSVIQNKTGRNQNENINTNPITPEVDYKGNSTNMPETSHIVALTSKSEQELYIPSVVSNSPSTVQSIENTSKSHGEIFKKDVCAENNNNMAMLICLIIIAVLFLICTFLFLSTVVLANKVSSLRRSKQVGKRQPRSNGDFLASGLWPAESDTWKRTKQLTGPNLVMQSTGVLTATRERKDEEGTEKLTNKQIG

SEQ ID NO: 19976 - protein, 259 aa, Homo sapiens
MLLRSWFGNKDFQALPILARLPSMPTDMEHTGHYLHLAFLMTTVFSLSPGTKANYTRLWANSTSSWDSVIQNKTGRNQNENINTNPITPEVDYKGNSTNMPETSHIVALTSKSEQELYIPSVVSNSPSTVQSIENTSKSHGEIFKKDVCAENNNNMAMLICLIIIAVLFLICTFLFLSTVVLANKVSSLRRSKQVGKRQPRSNGDFLASGLWPAESDTWKRTKQLTGPNLVMQSTGVLTATRERKDEEGTEKLTNKQIG

SEQ ID NO: 19977 - protein, 453 aa, Homo sapiens
MAGAAAGGRGGGAWGPGRGGAGGLRRGCSPPAPAGSPRAGLQPLRATIPFQLQQPHQRRDGGGRAASVPCSVAPEKSVCRPQPLQVRRTFSLDTILSSYLLGQWPRDADGAFTCCTNDKATQTPLSWQELEGERASSCAHKRSASWGSTDHRKEISKLKQQLQRTKLSRSGKEKERGSPLLGDHAVRGALRASPPSFPSGSPVLRLSPCLHRSLEGLNQELEEVFVKEQGEEELLRILDIPDGHRAPAPPQSGSCDHPLLLLEPGNLASSPSMSLASPQPCGLASHEEHRGAAEELASTPNDKASSPGHPAFLEDGSPSPVLAFAASPRPNHSYIFKREPPEGCEKVRVFEEATSPGPDLAFLTSCPDKNKVHFNPTGSAFCPVNLMKPLFPGMGFIFRNCPSNPGSPLPPASPRPPPRKDPEASKASPLPFEPWQRTPPSEEPVLFQSSLMV

SEQ ID NO: 19978 - protein, 181 aa, Homo sapiens
MSLASPQPCGLASHEEHRGAAEELASTPNDKASSPGHPAFLEDGSPSPVLAFAASPRPNHSYIFKREPPEGCEKVRVFEEATSPGPDLAFLTSCPDKNKVHFNPTGSAFCPVNLMKPLFPGMGFIFRNCPSNPGSPLPPASPRPPPRKDPEASKASPLPFEPWQRTPPSEEPVLFQSSLMV

SEQ ID NO: 19979 - protein, 114 aa, Homo sapiens
MVSLWVEGTFPPPGFGLAHVACSGHGMKQKRKPASSEPTPEDALGGSAVPVRFHLHPEGLLWCSRCFFSHGPKGSEPPGRSAGLQGATERSGRPSVQAQAQACENLVPATVWDG

SEQ ID NO: 19980 - protein, 448 aa, Homo sapiens
MDPKYFILILFCGHLNNTFFSKTETITTEKQSQPTLFTSSMSQVLANSQNTTGNPLGQPTQFSDTFSGQSISPAKVTAGQPTPAVYTSSEKPEAHTSAGQPLAYNTKQPTPIANTSSQQAVFTSARQLPSARTSTTQPPKSFVYTFTQQSSSVQIPSRKQITVHNPSTQPTSTVKNSPRSTPGFILDTTSNKQTPQKNNYNSIAAILIGVLLTSMLVAIIIIVLWKCLRKPVLNDQNWAGRSPFADGETPDICMDNIRENEISTKRTSIISLTPWKPSKSTLLADDLEIKLFESSENIEDSNNPKTEKIKDQVNGTSEDSADGSTVGTAVSSSDDADLPPPPPLLDLEGQESNQSDKPTMTIVSPLPNDSTSLPPSLDCLNQDCGDHKSEIIQSFPPLDSLNLPLPPVDFMKNQEDSNLEIQCQEFSIPPNSDQDLNESLPPPPAELL

SEQ ID NO: 19981 - protein, 463 aa, Homo sapiens
MLFRYAEKITRKYSEMDPKYFILILFCGHLNNTFFSKTETITTEKQSQPTLFTSSMSQVLANSQNTTGNPLGQPTQFSDTFSGQSISPAKVTAGQPTPAVYTSSEKPEAHTSAGQPLAYNTKQPTPIANTSSQQAVFTSARQLPSARTSTTQPPKSFVYTFTQQSSSVQIPSRKQITVHNPSTQPTSTVKNSPRSTPGFILDTTSNKQTPQKNNYNSIAAILIGVLLTSMLVAIIIIVLWKCLRKPVLNDQNWAGRSPFADGETPDICMDNIRENEISTKRTSIISLTPWKPSKSTLLADDLEIKLFESSENIEDSNNPKTEKIKDQVNGTSEDSADGSTVGTAVSSSDDADLPPPPPLLDLEGQESNQSDKPTMTIVSPLPNDSTSLPPSLDCLNQDCGDHKSEIIQSFPPLDSLNLPLPPVDFMKNQEDSNLEIQCQEFSIPPNSDQDLNESLPPPPAELL

SEQ ID NO: 19982 - protein, 276 aa, Homo sapiens
MAASAGGPGSWSENILEYFLRNSQITAEDGAEITWYHAANHKAQTNEALKSTAHMIEADVLLPSDGSEHSQPIMAHPPETNSDNTLQEWLTEVMKSNKGIKLDFKSLAVVEPSMMLLENVKRHLKRPVWINADILPGPNGNSKVIDAKPFLDTVISFFPDVTFSLGWTTGWHPEKVNEGYSWTMVKEMEYICNELSQPVTFPVRAALVRQSCSQLLWLLKKSNRYSLTIWTGKNDNYSVEDLLYIRDHFDKKQVFYDILEPQNHEFKQAIGIKVNL

SEQ ID NO: 19983 - protein, 301 aa, Homo sapiens
MQASADQVERDILETQKRLQQDRLNSEQSQALQHQQETGSSLKEAEVLLKDLFLDVDKARRLKHPQAEETEKDIEQLHERVTQECAEYCALYEKMVLPPRRGIQGRLGTRAGAETEAGLRRPVWAGHGGAGGTDRGAQHRAEGDQRPRRAAAEPGGAGCRHHPEPIPRPTEGGVVARAEPGQPVHALQGCTWQLSALAEQQRRILQQDWSDLMADPAGVRREYEHFKQHELLSQEQSVNQLEEDGKRMVELRHPAVGPIQAHQEALKMEWQNFLNLCICQETQLQHVEDYSRILCPSSSPH

SEQ ID NO: 19984 - protein, 472 aa, Homo sapiens
MFRGAWMWPGKDAAALTICCCCCCWAPRPSDKPCADSERAQRWRLSLASLLFFTVLLADHLWLCAGARPRARELSSAMRPPWGAGRERQPVPPRAVLPLPPPPPGEPSAPPGTCGPRYSNLTKAAPAAGSRPVCGGVPEPTGLDAACTKLQSLQRLFEPTTPAPPLRPPDSLSRAPAEFPSAKKNLLKGHFRNFTLSFCDTYTVWDLLLGMDRPDSLDCSLDTLMGDLLAVVASPGSGAWEACSNCIEAYQRLDRHAQEKYDEFDLVLHKYLQAEEYSIRSCTKGCKAVYKAWLCSEYFSVTQQECQRWVPCKQYCLEVQTRCPFILPDNEEMVYGGLPGFICTGLLDTSPKRLETKCCDVQWVSCEAKKKKFKESEAPKTHQQQFHHSYFHHYHQQYHHYHPHHDPPGRVSNKPALLPVSGGSRLSPSRIRLCVLVLMLLHTVVSFSSNQGGGGLGLETLPALEEGLTREE

SEQ ID NO: 19985 - protein, 441 aa, Homo sapiens
MKAAVDLKPTLTIIKTEKVDLELFPSPDMECADVPLLTPSSKEMMSQALKATFSGFTKEQQRLGIPKDPRQWTETHVRDWVMWAVNEFSLKGVDFQKFCMNGAALCALGKDCFLELAPDFVGDILWEHLEILQKEDVKPYQVNGVNPAYPESRYTSDYFISYGIEHAQCVPPSEFSEPSFITESYQTLHPISSEELLSLKYENDYPSVILRDPLQTDTLQNDYFAIKQEVVTPDNMCMGRTSRGKLGGQDSFESIESYDSCDRLTQSWSSQSSFNSLQRVPSYDSFDSEDYPAALPNHKPKGTFKDYVRDRADLNKDKPVIPAAALAGYTGSGPIQLWQFLLELLTDKSCQSFISWTGDGWEFKLSDPDEVARRWGKRKNKPKMNYEKLSRGLRYYYDKNIIHKTAGKRYVYRFVCDLQSLLGYTPEELHAMLDVKPDADE

SEQ ID NO: 19986 - protein, 354 aa, Homo sapiens
MKAAVDLKPTLTIIKTEKVDLELFPSPDMECADVPLLTPSSKEMMSQALKATFSGFTKEQQRLGIPKDPRQWTETHVRDWVMWAVNEFSLKGVDFQKFCMNGAALCALGKDCFLELAPDFVGDILWEHLEILQKEDVKPYQVNGVNPAYPESRYTSDYFISYGIEHAQCVPPSEFSEPSFITESYQTLHPISSEELLSLKYENDYPSVILRDPLQTDTLQNDYFAIKQEVVTPDNMCMGRTSRGSGPIQLWQFLLELLTDKSCQSFISWTGDGWEFKLSDPDEVARRWGKRKNKPKMNYEKLSRGLRYYYDKNIIHKTAGKRYVYRFVCDLQSLLGYTPEELHAMLDVKPDADE

SEQ ID NO: 19987 - protein, 485 aa, Homo sapiens
MSYFVDSAGSSPVPYSAPRPAVVRQGPSNTYEDPRMNCGFQSNYHQQRPCYPFWDEMATQEVPTGLEHCVSDMECADVPLLTPSSKEMMSQALKATFSGFTKEQQRLGIPKDPRQWTETHVRDWVMWAVNEFSLKGVDFQKFCMNGAALCALGKDCFLELAPDFVGDILWEHLEILQKEDVKPYQVNGVNPAYPESRYTSDYFISYGIEHAQCVPPSEFSEPSFITESYQTLHPISSEELLSLKYENDYPSVILRDPLQTDTLQNDYFAIKQEVVTPDNMCMGRTSRGKLGGQDSFESIESYDSCDRLTQSWSSQSSFNSLQRVPSYDSFDSEDYPAALPNHKPKGTFKDYVRDRADLNKDKPVIPAAALAGYTGSGPIQLWQFLLELLTDKSCQSFISWTGDGWEFKLSDPDEVARRWGKRKNKPKMNYEKLSRGLRYYYDKNIIHKTAGKRYVYRFVCDLQSLLGYTPEELHAMLDVKPDADE

SEQ ID NO: 19988 - protein, 225 aa, Homo sapiens
MKAAVDLKPTLTIIKTEKVDLELFPSPGKLGGQDSFESIESYDSCDRLTQSWSSQSSFNSLQRVPSYDSFDSEDYPAALPNHKPKGTFKDYVRDRADLNKDKPVIPAAALAGYTGSGPIQLWQFLLELLTDKSCQSFISWTGDGWEFKLSDPDEVARRWGKRKNKPKMNYEKLSRGLRYYYDKNIIHKTAGKRYVYRFVCDLQSLLGYTPEELHAMLDVKPDADE

SEQ ID NO: 19989 - protein, 272 aa, Homo sapiens
MKAAVDLKPTLTIIKTEKVDLELFPSPDMECADVPLLTPSSKEMMSQALKATFSGFTKEQQRLGIPKDPRQWTETHVRDWVMWAVNEFSLKGVDFQKFCMNGAALCALGKDCFLELAPDFVGDILWEHLEILQKEDVKPYQVNGVNPAYPESRYTSDYFISYGIEHAQCVPPSEFSEPSFITESYQTLHPISSEELLSLKYENDYPSVILRDPLQTDTLQNDYFAIKQEVVTPDNMCMGRTSRGKLGGQDSFESIESYDSCGQEMGKEEKQT

SEQ ID NO: 19990 - protein, 383 aa, Homo sapiens
MGPLFTTIPGAHSGPMRPLPKKHVEPMAVRQLLLGNSTMIRHTCPMSVPLSRQVKEVAAQKPSEDIYKNWQQQQQQQQQQQQQQLDLLFHQRIQISLWPRKQKRRKTEQHSHPFVKKAFRFSAGSGCGRPSSNKMLRSMGGGQRPTGLGSEFFRLLHDLHLLAFAMKRIWIHRRGEATARPRAPEHPAPPATAVRGRDAASQNLKRRPGSGTDGLRLQGAEPSRLLRTYAGGAVIPTGTPERAQPPPPQDPLGRRRWLSRNTWGPWPGTTQPPSPQLLRNDWGSCGFMVPEAARGKVFQDSQEGAHIRRETVSKSVCAEPWRHQRARDPAPTNFPLRCQKQRGASASSGQHEGRVNLVFFIGSPTVIAVPDLQCPTKYSGMLY

SEQ ID NO: 19991 - protein, 476 aa, Homo sapiens
MMERIRKEMILMERGLHSPTAGKRFSNLSNSAGNAVLEALENSQHPARLSPRLPSAPLHSALGELPAKGKFEIDTLFNLQHTGSESTVSSEISSAAESRKKPGHYSEAAAEADMSSDVEVGCSALRSPGGLGAAQLKENNGKGYAESGSAAGTTTSASGSGLGSLHGGSGGSGGSAALGGSGSGADQVRRYRTAFTREQIARLEKEFYRENYVSRPRRCELAAALNLPETTIKVWFQNRRMKDKRQRLAMSWPHPADPSFYTYMMTHAAATGSLPYPFHSHVPLHYYPHVGVTAAAAAAAASGAAAAASSPFATSIRPLDTFRALSHPYSRPELLCSFRHPGLYQAPAAAAGLNSAASAAAAAAAAAAAASSAAAAGAPPSGGSAPCSCLSCHSSQSAAAAAAAAAAALGSRGGGGGGGGGGGGGGGGAGAGGGSDFGCSAAAPRSESGFLPYSAAVLSKTAVSPPDQRDEAPLTR

SEQ ID NO: 19992 - protein, 458 aa, Homo sapiens
MTRGAWMCRQYDDGLKIWLAAPRENEKPFIDSERAQKWRLSLASLLFFTVLLSDHLWFCAEAKLTRARDKEHQQQQRQQQQQQQQQRQRQQQQQQRRQQEPSWPALLASMGESSPAAQAHRLLSASSSPTLPPSPGDGGGGGGKGNRGKDDRGKALFLGNSAKPVWRLETCYPQGASSGQCFTVENADAVCARNWSRGAAGGDGQEVRSKHPTPLWNLSDFYLSFCNSYTLWELFSGLSSPNTLNCSLDVVLKEGGEMTTCRQCVEAYQDYDHHAQEKYEEFESVLHKYLQSEEYSVKSCPEDCKIVYKAWLCSQYFEVTQFNCRKTIPCKQYCLEVQTRCPFILPDNDEVIYGGLSSFICTGLYETFLTNDEPECCDVRREEKSNNPSKGTVEKSGSCHRTSLTVSSATRLCNSRLKLCVLVLILLHTVLTASAAQNTAGLSFGGINTLEENSTNEE

SEQ ID NO: 19993 - protein, 562 aa, Homo sapiens
MLACLPGPGDLSFQLLSHTQMNTGLQKWDTTQKMRTAHYPTPAELDAYAKKVANNPLTIKIFPNSVKVPQRKHVRRTVNGLDTSAQRYSPYPTQAATKAGLLAIVKVPAKSILKDFDGTRARLLPEAIMNPPVAPYATVAPSTLAHPQAQALARQQALQHAQTLAHAPPQTLQHPQGIPPPQALSHPQSLQQPQGLGHPQPMAQTQGLVHPQALAHQGLQHPHNPLLHGGRKMPDSDAPPNVTVSTSTIPLSMAATLQHSQPPDLSSIVHQINQFCQTRAGISTTSVCEGQIANPSPISRSLLINASTRVSTHSVPTPMPSCVVNPMEHTHAATAALPAAGPVNLPTGISRVPTGYPSDLKPVTWNQHQLAHLQQMCSEASGTPAPGLTGKHAAGRELAGPGFVGKAPAYPQELCLAQSFHLKPPLEKPTPSPPVNGMAAPLAYPNGHYFQPLWNNILPTPNSDSSGSQDLAMPFHGGQPTGAPLDCAAAPGAHYRAGTGGGPVASQNSLMQTVDYLSGDFQQACFREQSLAMLSKAHRAPGNRAPDPTESRSLHIQHPGYR

SEQ ID NO: 19994 - protein, 154 aa, Homo sapiens
MGSLSGLRLAAGSCFRLCERDVSSSLRLTRSSDLKRINGFCTKPQESPGAPSRTYNRVPLHKPTDWQKKILIWSGRFKKEDEIPETVSLEMLDAAKNKMRVKISYLMIALTVVGCIFMVIEGKKAAQRHETLTSLNLEKKARLKEEAAMKAKTE

SEQ ID NO: 19995 - protein, 406 aa, Homo sapiens
MHPAVFLSLPDLRCSLLLLVTWVFTPVTTEITSLDTENIDEILNNADVALVNFYADWCRFSQMLHPIFEEASDVIKEEFPNENQVVFARVDCDQHSDIAQRYRISKYPTLKLFRNGMMMKREYRGQRSVKALADYIRQQKSDPIQEIRDLAEITTLDRSKRNIIGYFEQKDSDNYRVFERVANILHDDCAFLSAFGDVSKPERYSGDNIIYKPPGHSAPDMVYLGAMTNFDVTYNWIQDKCVPLVREITFENGEELTEEGLPFLILFHMKEDTESLEIFQNEVARQLISEKGTINFLHADCDKFRHPLLHIQKTPADCPVIAIDSFRHMYVFGDFKDVLIPGKLKQFVFDLHSGKLHREFHHGPDPTDTAPGEQAQDVASSPPESSFQKLAPSEYRYTLLRDRDEL

SEQ ID NO: 19996 - protein, 122 aa, Homo sapiens
MYVQEHRLWGLMDKPHSAPCLMSLSLSFLICNKGRNAIRVQQSTDERMDAMLLWQCPTQGTRKNHESNSSLHHVPNWIFHSTIIPPNKGSKRCLRKVDWLLPRAGGVGGKRGVTADGDRVSF

SEQ ID NO: 19997 - protein, 133 aa, Homo sapiens [sequence omitted]

SEQ ID NO: 19998 - protein, 505 aa, Homo sapiens
MSGASSSEQNNNSYETKTPNLRMSEKKCSWASYMTNSPTLIVMIGLPARGKTYVSKKLTRYLNWIGVPTKVFNLGVYRREAVKSYKSYDFFRHDNEEAMKIRKQCALVALEDVKAYLTEENGQIAVFDATNTTRERRDMILNFAEQNSFKVFFVESVCDDPDVIAANILEVKVSSPDYPERNRENVMEDFLKRIECYKVTYRPLDPDNYDKDLSFIKVINVGQRFLVNRVQDYIQSKIVYYLMNIHVQPRTIYLCRHGESEFNLLGKIGGDSGLSVRGKQFAQALRKFLEEQEITDLKVWTSQLKRTIQTAESLGVPYEQWKILNEIDAGVCEEMTYAEIEKRYPEEFALRDQEKYLYRYPGGESYQDLVQRLEPVIMELERQGNVLVISHQAVMRCLLAYFLDKGADELPYLRCPLHTIFKLTPVAYGCKVETIKLNVEAVNTHRDKPTNNFPKNQTPVRMRRNSFTPLSSSNTIRRPRNYSVGSRPLKPLSPLRAQDMQEGAD

SEQ ID NO: 19999 - protein, 471 aa, Homo sapiens
MSGASSSEQNNNSYETKTPNLRMSEKKCSWASYMTNSPTLIVMIGLPARGKTYVSKKLTRYLNWIGVPTKVFNLGVYRREAVKSYKSYDFFRHDNEEAMKIRKQCALVALEDVKAYLTEENGQIAVFDATNTTRERRDMILNFAEQNSFKVFFVESVCDDPDVIAANILEVKVSSPDYPERNRENVMEDFLKRIECYKVTYRPLDPDNYDKDLSFIKVINVGQRFLVNRVQDYIQSKIVYYLMNIHVQPRTIYLCRHGESEFNLLGKIGGDSGLSVRGKQFAQALRKFLEEQEITDLKVWTSQLKRTIQTAESLGVPYEQWKILNEIDAGVCEEMTYAEIEKRYPEEFALRDQEKYLYRYPGGESYQDLVQRLEPVIMELERQGNVLVISHQAVMRCLLAYFLDKGADELPYLRCPLHTIFKLTPVAYGCKVETIKLNVEAVNTHRDKPTAAETTLAVRRRPSAASLMLPC

SEQ ID NO: 20000 - protein, 113 aa, Homo sapiens
MGIFQLLRDRRISSRGPGLHTPKAEPRRRKGLTTGLMTQAERQKQAHQRQAAMRETALWCTGHIRPRTHTHTGTHTQTDRERERNTQRLRDRERRENGRHTHTYTHRHTHRVL

SEQ ID NO: 20001 - protein, 515 aa, Homo sapiens
MVSIPEYYEGKNVLLTGATGFLGKVLLEKLLRSCPKVNSVYVLVRQKAGQTPQERVEEVLSGKLFDRLRDENPDFREKIIAINSELTQPKLALSEEDKEVIIDSTNIIFHCAATVRFNENLRDAVQLNVIATRQLILLAQQMKNLEVFMHVSTAYAYCNRKHIDEVVYPPPVDPKKLIDSLEWMDDGLVNDITPKLIGDRPNTYIYTKALAEYVVQQEGAKLNVAIVRPSIVGASWKEPFPGWIDNFNGPSGLFIAAGKGILRTIRASNNALADLVPVDVVVNMSLAAAWYSGVNRPRNIMVYNCTTGSTNPFHWGEVEYHVISTFKRNPLEQAFRRPNVNLTSNHLLYHYWIAVSHKAPAFLYDIYLRMTGRSPRMMKTITRLHKAMVFLEYFTSNSWVWNTENVNMLMNQLNPEDKKTFNIDVRQLHWAEYIENYCLGTKKYVLNEEMSGLPAARKHLNKLRNIRYGFNTILVILIWRIFIARSQMARNIWYFVVSLCYKFLSYFRASSTMRY

SEQ ID NO: 20002 - protein, 140 aa, Homo sapiens
MSRFLNVLRSWLVMVSIIAMGNTLQSFRDHTFLYEKLYTGKPNLVNGLQARTFGIWTLLSSVIRCLCAIDIHNKTLYHITLWTFLLALGHFLSELFVYGTAAPTIGVLAPLMVASFSILGMLVGLRYLEVEPVSRQKKRN

SEQ ID NO: 20003 - protein, 374 aa, Homo sapiens
MGCSSSALNKAGDSSRFPSVTSNEHFSTAEESESCFAQPKPHALGRESTVDGNVQRESRPPLQKLKVSAEPTANGVKPLQEQPLAKDVAPGRDATDQSGSTEKTQPGEGLEESGPPQPGGKEDAPAAEGKKKDAGAGTEAESLKGNAEAQPLGPEAKGQPLQAAVEKDSLRAVEVTENPQTAAEMKPLGTTENVLTLQIAGELQPQGTVGKDEQAPLLETISKENESPEILEGSQFVETAEEQQLQATLGKEEQPQLLERIPKENVTPEVLDRSQLVEKPVMNDPFHKTPEGPGNMEQIQPEGIVGSMEHPARNVEAGAYVEMIRNIHTNEEDQRIEGETGEKVETDMENEKVSEGAETKEEETGEVVDLSAAT

SEQ ID NO: 20004 - protein, 56 aa, Homo sapiens
MGCSSSALNKAGDSSRFPSGETGEKVETDMENEKVSEGAETKEEETGEVVDLSAAT

SEQ ID NO: 20005 - protein, 725 aa, Homo sapiens
MAMAMSDSGASRLRRQLESGGFEARLYVKQLSQQSDGDRDLQEHRQRIQALAEETAQNLKRNVYQNYRQFIETAREISYLESEMYQLSHLLTEQKSSLESIPLTLLPAAAAAGAAAASGGEEGVGGAGGRDHLRGQAGFFSTPGGASRDGSGPGEEGKQRTLTTLLEKVEGCRHLLETPGQYLVYNGDLVEYDADHMAQLQRVHGFLMNDCLLVATWLPQRRGMYRYNALYSLDGLAVVNVKDNPPMKDMFKLLMFPESRIFQAENAKIKREWLEVLEDTKRALSEKRRREQEEAAAPRGPPQVTSKATNPFEDDEEEEPAVPEVEEEKVDLSMEWIQELPEDLDVCIAQRDFEGAVDLLDKLNHYLEDKPSPPPVKELRAKVEERVRQLTEVLVFELSPDRSLRGGPKATRRAVSQLIRLGQCTKACELFLRNRAAAVHTAIRQLRIEGATLLYIHKLCHVFFTSLLETAREFEIDFAGTDSGCYSAFVVWARSAMGMFVDAFSKQVFDSKESLSTAAECVKVAKEHCQQLGDIGLDLTFIIHALLVKDIQGALHSYKEIIIEATKHRNSEEMWRRMNLMTPEALGKLKEEMKSCGVSNFEQYTGDDCWVNLSYTVVAFTKQTMGFLEEALKLYFPELHMVLLESLVEIILVAVQHVDYSLRCEQDPEKKAFIRQNASFLYETVLPVVEKRFEEGVGKPAKQLQDLRNASRLIRVNPESTTSVV

SEQ ID NO: 20006 - protein, 121 aa, Homo sapiens
MSQKQEEENPAEETGEEKQDTQEKEGILPERAEEAKLKAKYPSLGQKPGGSDFLMKRLQKGQKYFDSGDYNMAKAKMKNKQLPSAGPDKNLVTGDHIPTPQDLPQRKSSLVTSKLAGGQVE

SEQ ID NO: 20007 - protein, 117 aa, Homo sapiens
MSQKQEEENPAEETGEEKQDTQEKEGILPERAEEAKLKAKYPSLGQKPGGSDFLMKRLQKGQKYFDSGDYNMAKAKMKNKQLPSAGPDKNLVTGDHIPTPQDLPQRKSSLVTSKLAG

SEQ ID NO: 20008 - protein, 137 aa, Homo sapiens
MSQKQEEENPAEETGEEKQDTQEKEGILPERAEEAKLKAKYPSLGQKPGGSDFLMKRLQKGDYKSLHWSVLLCADEMQKYFDSGDYNMAKAKMKNKQLPSAGPDKNLVTGDHIPTPQDLPQRKSSLVTSKLAGGQVE

SEQ ID NO: 20009 - protein, 140 aa, Homo sapiens
MSQKQEEENPAEETGEEKQDTQEKEGILPERAEEAKLKAKYPSLGQKPGGSDFLMKRLQKGVWGIASYPLSLGLKEVLRMKSVEQKYFDSGDYNMAKAKMKNKQLPSAGPDKNLVTGDHIPTPQDLPQRKSSLVTSKLAG

SEQ ID NO: 20010 - protein, 117 aa, Homo sapiens
MAGGLGCDVCYWFVEDTQEKEGILPERAEEAKLKAKYPSLGQKPGGSDFLMKRLQKGQKYFDSGDYNMAKAKMKNKQLPSAGPDKNLVTGDHIPTPQDLPQRKSSLVTSKLAGGQVE

SEQ ID NO: 20011 - protein, 113 aa, Homo sapiens
MAGGLGCDVCYWFVEDTQEKEGILPERAEEAKLKAKYPSLGQKPGGSDFLMKRLQKGQKYFDSGDYNMAKAKMKNKQLPSAGPDKNLVTGDHIPTPQDLPQRKSSLVTSKLAG

SEQ ID NO: 20012 - protein, 133 aa, Homo sapiens
MAGGLGCDVCYWFVEDTQEKEGILPERAEEAKLKAKYPSLGQKPGGSDFLMKRLQKGDYKSLHWSVLLCADEMQKYFDSGDYNMAKAKMKNKQLPSAGPDKNLVTGDHIPTPQDLPQRKSSLVTSKLAGGQVE

SEQ ID NO: 20013 - protein, 105 aa, Homo sapiens
MSQKQEEENPAEETGEEKQDTQEKEGILPERAEEAKLKAKYPSLGQKPGGSDFLMKRLQKGVWGIVSYPLSLELKEVLRMKSVEVLLDPFLEVLLLNRSRGEFEI

SEQ ID NO: 20014 - protein, 133 aa, Homo sapiens
MSQKQEEENPAEETGEEKQDTQEKEGILPERAEEAKLKAKYPSLGQKPGGSDFLMKRLQKGDYKSLHWSVLLCADEMQKYFDSGDYNMAKAKMKNKQLPSAGPDKNLVTGDHIPTPQDLPQRKSSLVTSKLAG

SEQ ID NO: 20015 - protein, 464 aa, Homo sapiens
MMARRDPTSWAKRLVRAQTLQKQRRAPVGPRAPPPDEEDPRLKCKNCGAFGHTARSTRCPMKCWKAALVPATLGKKEGKENLKPWKPRGEANPGPLNKDKGEKEERPRQQDPQRKALLHMFSGKPPEKPLPNGKGSTEPSDYLRVASGPMPVHTTSKRPRLDPVLADRSATEMSGRGSVLASLSPLRKASLSSSSSLGPKERQTGAAADMPQPAVRHQGREPLLVVKPTHSRPEGGCREVPQAASKTHGLLQAARPQAQDKRPAVTSQPCPPAATHSLGLGSNLSFGPGAKRPAQAPIQACLNFPKKPRLGPFQIPESAIQGGELGAPENLQPPPAATELGPSTSPQMGRRTPAQVPSVDRQPPHSRPCLPTAQACTMSHHPAASHDGAQPLRVLFRRLENGRWSSSLLAAPSFHSPEKPGAFLAQSPHVSEKSEAPCVRVPPSVLYEDLQVSSSSEDSDSDLE

SEQ ID NO: 20016 - protein, 479 aa, Homo sapiens
MASTIKEALSVVSEDQSLFECAYGTPHLAKTEMTASSSSDYGQTSKMSPRVPQQDWLSQPPARVTIKMECNPSQVNGSRNSPDECSVAKGGKMVGSPDTVGMNYGSYMEEKHMPPPNMTTNERRVIVPADPTLWSTDHVRQWLEWAVKEYGLPDVNILLFQNIDGKELCKMTKDDFQRLTPSYNADILLSHLHYLRETPLPHLTSDDVDKALQNSPRLMHARNTGGAAFIFPNTSVYPEATQRITTRPDLPYEPPRRSAWTGHGHPTPQSKAAQPSPSTVPKTEDQRPQLDPYQILGPTSSRLANPGSGQIQLWQFLLELLSDSSNSSCITWEGTNGEFKMTDPDEVARRWGERKSKPNMNYDKLSRALRYYYDKNIMTKVHGKRYAYKFDFHGIAQALQPHPPESSLYKYPSDLPYMGSYHAHPQKMNFVAPHPPALPVTSSSFFAAPNPYWNSPTGGIYPNTRLPTSHMPSHLGTYY

SEQ ID NO: 20017 - protein, 486 aa, Homo sapiens
MIQTVPDPAAHIKEALSVVSEDQSLFECAYGTPHLAKTEMTASSSSDYGQTSKMSPRVPQQDWLSQPPARVTIKMECNPSQVNGSRNSPDECSVAKGGKMVGSPDTVGMNYGSYMEEKHMPPPNMTTNERRVIVPADPTLWSTDHVRQWLEWAVKEYGLPDVNILLFQNIDGKELCKMTKDDFQRLTPSYNADILLSHLHYLRETPLPHLTSDDVDKALQNSPRLMHARNTGGAAFIFPNTSVYPEATQRITTRPDLPYEPPRRSAWTGHGHPTPQSKAAQPSPSTVPKTEDQRPQLDPYQILGPTSSRLANPGSGQIQLWQFLLELLSDSSNSSCITWEGTNGEFKMTDPDEVARRWGERKSKPNMNYDKLSRALRYYYDKNIMTKVHGKRYAYKFDFHGIAQALQPHPPESSLYKYPSDLPYMGSYHAHPQKMNFVAPHPPALPVTSSSFFAAPNPYWNSPTGGIYPNTRLPTSHMPSHLGTYY

SEQ ID NO: 20018 - protein, 462 aa, Homo sapiens
MIQTVPDPAAHIKEALSVVSEDQSLFECAYGTPHLAKTEMTASSSSDYGQTSKMSPRVPQQDWLSQPPARVTIKMECNPSQVNGSRNSPDECSVAKGGKMVGSPDTVGMNYGSYMEEKHMPPPNMTTNERRVIVPADPTLWSTDHVRQWLEWAVKEYGLPDVNILLFQNIDGKELCKMTKDDFQRLTPSYNADILLSHLHYLRETPLPHLTSDDVDKALQNSPRLMHARNTDLPYEPPRRSAWTGHGHPTPQSKAAQPSPSTVPKTEDQRPQLDPYQILGPTSSRLANPGSGQIQLWQFLLELLSDSSNSSCITWEGTNGEFKMTDPDEVARRWGERKSKPNMNYDKLSRALRYYYDKNIMTKVHGKRYAYKFDFHGIAQALQPHPPESSLYKYPSDLPYMGSYHAHPQKMNFVAPHPPALPVTSSSFFAAPNPYWNSPTGGIYPNTRLPTSHMPSHLGTYY

SEQ ID NO: 20019 - protein, 363 aa, Homo sapiens
MVGSPDTVGMNYGSYMEEKHMPPPNMTTNERRVIVPADPTLWSTDHVRQWLEWAVKEYGLPDVNILLFQNIDGKELCKMTKDDFQRLTPSYNADILLSHLHYLRETPLPHLTSDDVDKALQNSPRLMHARNTDLPYEPPRRSAWTGHGHPTPQSKAAQPSPSTVPKTEDQRPQLDPYQILGPTSSRLANPGSGQIQLWQFLLELLSDSSNSSCITWEGTNGEFKMTDPDEVARRWGERKSKPNMNYDKLSRALRYYYDKNIMTKVHGKRYAYKFDFHGIAQALQPHPPESSLYKYPSDLPYMGSYHAHPQKMNFVAPHPPALPVTSSSFFAAPNPYWNSPTGGIYPNTRLPTSHMPSHLGTYY

SEQ ID NO: 20020 - protein, 317 aa, Homo sapiens
MIQTVPDPAAHIKEALSVVSEDQSLFECAYGTPHLAKTEMTASSSSDYGQTSKMSPRVPQQDWLSQPPARVTIKMECNPSQVNGSRNSPDECSVAKGGKMVGSPDTVGMNYGSYMEEKHMPPPNMTTNERRVIVPADPTLWSTDHVRQWLEWAVKEYGLPDVNILLFQNIDGKELCKMTKDDFQRLTPSYNADILLSHLHYLRETPLPHLTSDDVDKALQNSPRLMHARNTGGAAFIFPNTSVYPEATQRITTRPDLPYEPPRRSAWTGHGHPTPQSKAAQPSPSTVPKTEDQRPQLDPYQILGPTSSRLANPGWTQ

SEQ ID NO: 20021 - protein, 325 aa, Homo sapiens
MIQTVPDPAAHIKEALSVVSEDQSLFECAYGTPHLAKTEMTASSSSDYGQTSKMSPRVPQQDWLSQPPARVTIKMECNPSQVNGSRNSPDECSVAKGGKMVGSPDTVGMNYGSYMEEKHMPPPNMTTNERRVIVPADPTLWSTDHVRQWLEWAVKEYGLPDVNILLFQNIDGKELCKMTKDDFQRLTPSYNADILLSHLHYLRETPLPHLTSDDVDKALQNSPRLMHARNTGGAAFIFPNTSVYPEATQRITTRPGTKTPLCDLFIERHPRCPAEIRALSHVIQRELIPELKPVPDSLILPLLIWRLNPLKPFHSKTTLKELRAD

SEQ ID NO: 20022 - protein, 870 aa, Homo sapiens
MTADKEKKRSSSERRKEKSRDAARCRRSKETEVFYELAHELPLPHSVSSHLDKASIMRLAISFLRTHKLLSSVCSENESEAEADQQMDNLYLKALEGFIAVVTQDGDMIFLSENISKFMGLTQVELTGHSIFDFTHPCDHEEIRENLSLKNGSGFGKKSKDMSTERDFFMRMKCTVTNRGRTVNLKSATWKVLHCTGQVKVYNNCPPHNSLCGYKEPLLSCLIIMCEPIQHPSHMDIPLDSKTFLSRHSMDMKFTYCDDRITELIGYHPEELLGRSAYEFYHALDSENMTKSHQNLCTKGQVVSGQYRMLAKHGGYVWLETQGTVIYNPRNLQPQCIMCVNYVLSEIEKNDVVFSMDQTESLFKPHLMAMNSIFDSSGKGAVSEKSNFLFTKLKEEPEELAQLAPTPGDAIISLDFGNQNFEESSAYGKAILPPSQPWATELRSHSTQSEAGSLPAFTVPQAAAPGSTTPSATSSSSSCSTPNSPEDYYTSLDNDLKIEVIEKLFAMDTEAKDQCSTQTDFNELDLETLAPYIPMDGEDFQLSPICPEERLLAENPQSTPQHCFSAMTNIFQPLAPVAPHSPFLLDKFQQQLESKKTEPEHRPMSSIFFDAGSKASLPPCCGQASTPLSSMGGRSNTQWPPDPPLHFGPTKWAVGDQRTEFLGAAPLGPPVSPPHVSTFKTRSAKGFGARGPDVLSPAMVALSNKLKLKRQLEYEEQAFQDLSGGDPPGGSTSHLMWKRMKNLRGGSCPLMPDKPLSANVPNDKFTQNPMRGLGHPLRHLPLPQPPSAISPGENSKSRFPPQCYATQYQDYSLSSAHKVSGMASRLLGPSFESYLLPELTRYDCEVNVPVLGSSTLLQGGDLLRALDQAT

SEQ ID NO: 20023 - protein, 423 aa, Homo sapiens
MSSQVVGIEPLYIKAEPASPDSPKGSSETETEPPVALAPGPAPTRCLPGHKEEEDGEGAGPGEQGGGKLVLSSLPKRLCLVCGDVASGYHYGVASCEACKAFFKRTIQGSIEYSCPASNECEITKRRRKACQACRFTKCLRVGMLKEGVRLDRVRGGRQKYKRRPEVDPLPFPGPFPAGPLAVAGGPRKTAAPVNALVSHLLVVEPEKLYAMPDPAGPDGHLPAVATLCDLFDREIVVTISWAKSIPGFSSLSLSDQMSVLQSVWMEVLVLGVAQRSLPLQDELAFAEDLVLDEEGARAAGLGELGAALLQLVRRLQALRLEREEYVLLKALALANSDSVHIEDAEAVEQLREALHEALLEYEAGRAGPGGGAERRRAGRLLLTLPLLRQTAGKVLAHFYGVKLEGKVPMHKLFLEMLEAMMD

SEQ ID NO: 20024 - protein, 422 aa, Homo sapiens
MSSQVVGIEPLYIKAEPASPDSPKGSSETETEPPVALAPGPAPTRCLPGHKEEEDGEGAGPGEQGGGKLVLSSLPKRLCLVCGDVASGYHYGVASCEACKAFFKRTIQGSIEYSCPASNECEITKRRRKACQACRFTKCLRVGMLKEGVRLDRVRGGRQKYKRRPEVDPLPFPGPFPAGPLAVAGGPRKTAPVNALVSHLLVVEPEKLYAMPDPAGPDGHLPAVATLCDLFDREIVVTISWAKSIPGFSSLSLSDQMSVLQSVWMEVLVLGVAQRSLPLQDELAFAEDLVLDEEGARAAGLGELGAALLQLVRRLQALRLEREEYVLLKALALANSDSVHIEDAEAVEQLREALHEALLEYEAGRAGPGGGAERRRAGRLLLTLPLLRQTAGKVLAHFYGVKLEGKVPMHKLFLEMLEAMMD

SEQ ID NO: 20025 - protein, 235 aa, Homo sapiens
MAAANPWDPASAPNGAGLVLGHFIASGMVNQEMLNMSKKTVSCFVNFTRLQQITNIQAEIYQKNLEIELLKLEKDTADVVHPFFLAQKCHTLQSMNNHLEAVLKEKRSLRQRLLKPMCQENLPIEAVYHRYMVHLLELAVTFIERLETHLETIRNIPHLAANLKKMNQALAKMDILVTETEELAENILKWRKQQNEVSSCIPKILAEESYLYKHDIIMPPLPFTSKVHVQTINAK

SEQ ID NO: 20026 - protein, 141 aa, Homo sapiens
MNNHLEAVLKEKRSLRQRLLKPMCQENLPIEAVYHRYMVHLLELAVTFIERLETHLETIRNIPHLAANLKKMNQALAKMDILVTETEELAENILKWRKQQNEVSSCIPKILAEESYLYKHDIIMPPLPFTSKVHVQTINAK

SEQ ID NO: 20027 - protein, 204 aa, Homo sapiens
MAAANPWDPASAPNGAGLVLGHFIASGMVNQKNLEIELLKLEKDTADVVHPFFLAQKCHTLQSMNNHLEAVLKEKRSLRQRLLKPMCQENLPIEAVYHRYMVHLLELAVTFIERLETHLETIRNIPHLAANLKKMNQALAKMDILVTETEELAENILKWRKQQNEVSSCIPKILAEESYLYKHDIIMPPLPFTSKVHVQTINAK

SEQ ID NO: 20028 - protein, 147 aa, Homo sapiens
MASSLKIWGTLLALLCILCTLLVQSKEVSWREFMKQHYLSPSREFREYKCDVLMRENEALKDKSSHMFIYISWYKIEHICTSDNWMDRFRNAYVWVQNPLKVLKCHQENSKNSYTESRSFNYIEFHCSMDGYVDSIEDLKMVEPIGN

SEQ ID NO: 20029 - protein, 186 aa, Homo sapiens
MHVMAASMARGGVSARVLLQAARGTWWNRPGGTSGSGEGVALGTTRKFQATGSRPAGEEDAGGPERPGDVVNVVFVDRSGQRIPVSGRVGDNVLHLAQRHGVDLEGACEASLACSTCHVYVSEDHLDLLPPPEEREDDMLDMAPLLQENSRLGCQIVLTPELEGAEFTLPKITRNFYVDGHVPKPH

SEQ ID NO: 20030 - protein, 145 aa, Homo sapiens
MHVMAASMARGGVSARVLLQAARGTWWNRPGGTSGSGEGVALGTTRKFQATGSRPAGEEDAGGPERPGDVVNVVFVDRSGQRIPVSGRVGDNVLHLAQRHGVDLEGACEASLACSTCHVYVSEDHLDLLPPPEERRTRGWAARLC

SEQ ID NO: 20031 - protein, 2477 aa, Homo sapiens
MLRGPGPGLLLLAVQCLGTAVPSTGASKSKRQAQQMVQPQSPVAVSQSKPGCYDNGKHYQINQQWERTYLGNALVCTCYGGSRGFNCESKPEAEETCFDKYTGNTYRVGDTYERPKDSMIWDCTCIGAGRGRISCTIANRCHEGGQSYKIGDTWRRPHETGGYMLECVCLGNGKGEWTCKPIAEKCFDHAAGTSYVVGETWEKPYQGWMMVDCTCLGEGSGRITCTSRNRCNDQDTRTSYRIGDTWSKKDNRGNLLQCICTGNGRGEWKCERHTSVQTTSSGSGPFTDVRAAVYQPQPHPQPPPYGHCVTDSGVVYSVGMQWLKTQGNKQMLCTCLGNGVSCQETAVTQTYGGNSNGEPCVLPFTYNGRTFYSCTTEGRQDGHLWCSTTSNYEQDQKYSFCTDHTVLVQTRGGNSNGALCHFPFLYNNHNYTDCTSEGRRDNMKWCGTTQNYDADQKFGFCPMAAHEEICTTNEGVMYRIGDQWDKQHDMGHMMRCTCVGNGRGEWTCIAYSQLRDQCIVDDITYNVNDTFHKRHEEGHMLNCTCFGQGRGRWKCDPVDQCQDSETGTFYQIGDSWEKYVHGVRYQCYCYGRGIGEWHCQPLQTYPSSSGPVEVFITETPSQPNSHPIQWNAPQPSHISKYILRWRPKNSVGRWKEATIPGHLNSYTIKGLKPGVVYEGQLISIQQYGHQEVTRFDFTTTSTSTPVTSNTVTGETTPFSPLVATSESVTEITASSFVVSWVSASDTVSGFRVEYELSEEGDEPQYLDLPSTATSVNIPDLLPGRKYIVNVYQISEDGEQSLILSTSQTTAPDAPPDTTVDQVDDTSIVVRWSRPQAPITGYRIVYSPSVEGSSTELNLPETANSVTLSDLQPGVQYNITIYAVEENQESTPVVIQQETTGTPRSDTVPSPRDLQFVEVTDVKVTIMWTPPESAVTGYRVDVIPVNLPGEHGQRLPISRNTFAEVTGLSPGVTYYFKVFAVSHGRESKPLTAQQTTKLDAPTNLQFVNETDSTVLVRWTPPRAQITGYRLTVGLTRRGQPRQYNVGPSVSKYPLRNLQPASEYTVSLVAIKGNQESPKATGVFTTLQPGSSIPPYNTEVTETTIVITWTPAPRIGFKLGVRPSQGGEAPREVTSDSGSIVVSGLTPGVEYVYTIQVLRDGQERDAPIVNKVVTPLSPPTNLHLEANPDTGVLTVSWERSTTPDITGYRITTTPTNGQQGNSLEEVVHADQSSCTFDNLSPGLEYNVSVYTVKDDKESVPISDTIIPEVPQLTDLSFVDITDSSIGLRWTPLNSSTIIGYRITVVAAGEGIPIFEDFVDSSVGYYTVTGLEPGIDYDISVITLINGGESAPTTLTQQTAVPPPTDLRFTNIGPDTMRVTWAPPPSIDLTNFLVRYSPVKNEEDVAELSISPSDNAVVLTNLLPGTEYVVSVSSVYEQHESTPLRGRQKTGLDSPTGIDFSDITANSFTVHWIAPRATITGYRIRHHPEHFSGRPREDRVPHSRNSITLTNLTPGTEYVVSIVALNGREESPLLIGQQSTVSDVPRDLEVVAATPTSLLISWDAPAVTVRYYRITYGETGGNSPVQEFTVPGSKSTATISGLKPGVDYTITVYAVTGRGDSPASSKPISINYRTEIDKPSQMQVTDVQDNSISVKWLPSSSPVTGYRVTTTPKNGPGPTKTKTAGPDQTEMTIEGLQPTVEYVVSVYAQNPSGESQPLVQTAVTNIDRPKGLAFTDVDVDSIKIAWESPQGQVSRYRVTYSSPEDGIHELFPAPDGEEDTAELQGLRPGSEYTVSVVALHDDMESQPLIGTQSTAIPAPTDLKFTQVTPTSLSAQWTPPNVQLTGYRVRVTPKEKTGPMKEINLAPDSSSVVVSGLMVATKYEVSVYALKDTLTSRPAQGVVTTLENVSPPRRARVTDATETTITISWRTKTETITGFQVDAVPANGQTPIQRTIKPDVRSYTITGLQPGTDYKIYLYTLNDNARSSPVVIDASTAIDAPSNLRFLATTPNSLLVSWQPPRARITGYIIKYEKPGSPPREVVPRPRPGVTEATITGLEPGTEYTIYVIALKNNQKSEPLIGRKKTDELPQLVTLPHPNLHGPEILDVPSTVQKTPFVTHPGYDTGNGIQLPGTSGQQPSVGQQMIFEEHGFRRTTPPTTATPIRHRPRPYPPNVGEEIQIGHIPREDVDYHLYPHGPGLNPNASTGQEALSQTTISWAPFQDTSEYIISCHPVGTDEEPLQFRVPGTSTSATLTGLTRGATYNVIVEALKDQQRHKVREEVVTVGNSVNEGLNQPTDDSCFDPYTVSHYAVGDEWERMSESGFKLLCQCLGFGSGHFRCDSSRWCHDNGVNYKIGEKWDRQGENGQMMSCTCLGNGKGEFKCDPHEATCYDDGKTYHVGEQWQKEYLGAICSCTCFGGQRGWRCDNCRRPGGEPSPEGTTGQSYNQYSQRYHQRTNTNVNCPIECFMPLDVQADREDSRE

SEQ ID NO: 20032 - protein, 2386 aa, Homo sapiens
MLRGPGPGLLLLAVQCLGTAVPSTGASKSKRQAQQMVQPQSPVAVSQSKPGCYDNGKHYQINQQWERTYLGNALVCTCYGGSRGFNCESKPEAEETCFDKYTGNTYRVGDTYERPKDSMIWDCTCIGAGRGRISCTIANRCHEGGQSYKIGDTWRRPHETGGYMLECVCLGNGKGEWTCKPIAEKCFDHAAGTSYVVGETWEKPYQGWMMVDCTCLGEGSGRITCTSRNRCNDQDTRTSYRIGDTWSKKDNRGNLLQCICTGNGRGEWKCERHTSVQTTSSGSGPFTDVRAAVYQPQPHPQPPPYGHCVTDSGVVYSVGMQWLKTQGNKQMLCTCLGNGVSCQETAVTQTYGGNSNGEPCVLPFTYNGRTFYSCTTEGRQDGHLWCSTTSNYEQDQKYSFCTDHTVLVQTRGGNSNGALCHFPFLYNNHNYTDCTSEGRRDNMKWCGTTQNYDADQKFGFCPMAAHEEICTTNEGVMYRIGDQWDKQHDMGHMMRCTCVGNGRGEWTCIAYSQLRDQCIVDDITYNVNDTFHKRHEEGHMLNCTCFGQGRGRWKCDPVDQCQDSETGTFYQIGDSWEKYVHGVRYQCYCYGRGIGEWHCQPLQTYPSSSGPVEVFITETPSQPNSHPIQWNAPQPSHISKYILRWRPKNSVGRWKEATIPGHLNSYTIKGLKPGVVYEGQLISIQQYGHQEVTRFDFTTTSTSTPVTSNTVTGETTPFSPLVATSESVTEITASSFVVSWVSASDTVSGFRVEYELSEEGDEPQYLDLPSTATSVNIPDLLPGRKYIVNVYQISEDGEQSLILSTSQTTAPDAPPDTTVDQVDDTSIVVRWSRPQAPITGYRIVYSPSVEGSSTELNLPETANSVTLSDLQPGVQYNITIYAVEENQESTPVVIQQETTGTPRSDTVPSPRDLQFVEVTDVKVTIMWTPPESAVTGYRVDVIPVNLPGEHGQRLPISRNTFAEVTGLSPGVTYYFKVFAVSHGRESKPLTAQQTTKLDAPTNLQFVNETDSTVLVRWTPPRAQITGYRLTVGLTRRGQPRQYNVGPSVSKYPLRNLQPASEYTVSLVAIKGNQESPKATGVFTTLQPGSSIPPYNTEVTETTIVITWTPAPRIGFKLGVRPSQGGEAPREVTSDSGSIVVSGLTPGVEYVYTIQVLRDGQERDAPIVNKVVTPLSPPTNLHLEANPDTGVLTVSWERSTTPDITGYRITTTPTNGQQGNSLEEVVHADQSSCTFDNLSPGLEYNVSVYTVKDDKESVPISDTIIPAVPPPTDLRFTNIGPDTMRVTWAPPPSIDLTNFLVRYSPVKNEEDVAELSISPSDNAVVLTNLLPGTEYVVSVSSVYEQHESTPLRGRQKTGLDSPTGIDFSDITANSFTVHWIAPRATITGYRIRHHPEHFSGRPREDRVPHSRNSITLTNLTPGTEYVVSIVALNGREESPLLIGQQSTVSDVPRDLEVVAATPTSLLISWDAPAVTVRYYRITYGETGGNSPVQEFTVPGSKSTATISGLKPGVDYTITVYAVTGRGDSPASSKPISINYRTEIDKPSQMQVTDVQDNSISVKWLPSSSPVTGYRVTTTPKNGPGPTKTKTAGPDQTEMTIEGLQPTVEYVVSVYAQNPSGESQPLVQTAVTNIDRPKGLAFTDVDVDSIKIAWESPQGQVSRYRVTYSSPEDGIHELFPAPDGEEDTAELQGLRPGSEYTVSVVALHDDMESQPLIGTQSTAIPAPTDLKFTQVTPTSLSAQWTPPNVQLTGYRVRVTPKEKTGPMKEINLAPDSSSVVVSGLMVATKYEVSVYALKDTLTSRPAQGVVTTLENVSPPRRARVTDATETTITISWRTKTETITGFQVDAVPANGQTPIQRTIKPDVRSYTITGLQPGTDYKIYLYTLNDNARSSPVVIDASTAIDAPSNLRFLATTPNSLLVSWQPPRARITGYIIKYEKPGSPPREVVPRPRPGVTEATITGLEPGTEYTIYVIALKNNQKSEPLIGRKKTDELPQLVTLPHPNLHGPEILDVPSTVQKTPFVTHPGYDTGNGIQLPGTSGQQPSVGQQMIFEEHGFRRTTPPTTATPIRHRPRPYPPNVGEEIQIGHIPREDVDYHLYPHGPGLNPNASTGQEALSQTTISWAPFQDTSEYIISCHPVGTDEEPLQFRVPGTSTSATLTGLTRGATYNVIVEALKDQQRHKVREEVVTVGNSVNEGLNQPTDDSCFDPYTVSHYAVGDEWERMSESGFKLLCQCLGFGSGHFRCDSSRWCHDNGVNYKIGEKWDRQGENGQMMSCTCLGNGKGEFKCDPHEATCYDDGKTYHVGEQWQKEYLGAICSCTCFGGQRGWRCDNCRRPGGEPSPEGTTGQSYNQYSQRYHQRTNTNVNCPIECFMPLDVQADREDSRE

SEQ ID NO: 20033 - protein, 642 aa, Homo sapiens
MLRGPGPGLLLLAVQCLGTAVPSTGASKSKRQAQQMVQPQSPVAVSQSKPGCYDNGKHYQINQQWERTYLGNALVCTCYGGSRGFNCESKPEAEETCFDKYTGNTYRVGDTYERPKDSMIWDCTCIGAGRGRISCTIANRCHEGGQSYKIGDTWRRPHETGGYMLECVCLGNGKGEWTCKPIAEKCFDHAAGTSYVVGETWEKPYQGWMMVDCTCLGEGSGRITCTSRNRCNDQDTRTSYRIGDTWSKKDNRGNLLQCICTGNGRGEWKCERHTSVQTTSSGSGPFTDVRAAVYQPQPHPQPPPYGHCVTDSGVVYSVGMQWLKTQGNKQMLCTCLGNGVSCQETAVTQTYGGNSNGEPCVLPFTYNDRTDSTTSNYEQDQKYSFCTDHTVLVQTRGGNSNGALCHFPFLYNNHNYTDCTSEGRRDNMKWCGTTQNYDADQKFGFCPMAAHEEICTTNEGVMYRIGDQWDKQHDMGHMMRCTCVGNGRGEWTCIAYSQLRDQCIVDDITYNVNDTFHKRHEEGHMLNCTCFGQGRGRWKCDPVDQCQDSETGTFYQIGDSWEKYVHGVRYQCYCYGRGIGEWHCQPLQTYPSSSGPVEVFITETPSQPNSHPIQWNAPQPSHISKYILRWRPVSIPPRNLGY

SEQ ID NO: 20034 - protein, 2355 aa, Homo sapiens
MLRGPGPGLLLLAVQCLGTAVPSTGASKSKRQAQQMVQPQSPVAVSQSKPGCYDNGKHYQINQQWERTYLGNALVCTCYGGSRGFNCESKPEAEETCFDKYTGNTYRVGDTYERPKDSMIWDCTCIGAGRGRISCTIANRCHEGGQSYKIGDTWRRPHETGGYMLECVCLGNGKGEWTCKPIAEKCFDHAAGTSYVVGETWEKPYQGWMMVDCTCLGEGSGRITCTSRNRCNDQDTRTSYRIGDTWSKKDNRGNLLQCICTGNGRGEWKCERHTSVQTTSSGSGPFTDVRAAVYQPQPHPQPPPYGHCVTDSGVVYSVGMQWLKTQGNKQMLCTCLGNGVSCQETAVTQTYGGNSNGEPCVLPFTYNGRTFYSCTTEGRQDGHLWCSTTSNYEQDQKYSFCTDHTVLVQTRGGNSNGALCHFPFLYNNHNYTDCTSEGRRDNMKWCGTTQNYDADQKFGFCPMAAHEEICTTNEGVMYRIGDQWDKQHDMGHMMRCTCVGNGRGEWTCIAYSQLRDQCIVDDITYNVNDTFHKRHEEGHMLNCTCFGQGRGRWKCDPVDQCQDSETGTFYQIGDSWEKYVHGVRYQCYCYGRGIGEWHCQPLQTYPSSSGPVEVFITETPSQPNSHPIQWNAPQPSHISKYILRWRPKNSVGRWKEATIPGHLNSYTIKGLKPGVVYEGQLISIQQYGHQEVTRFDFTTTSTSTPVTSNTVTGETTPFSPLVATSESVTEITASSFVVSWVSASDTVSGFRVEYELSEEGDEPQYLDLPSTATSVNIPDLLPGRKYIVNVYQISEDGEQSLILSTSQTTAPDAPPDTTVDQVDDTSIVVRWSRPQAPITGYRIVYSPSVEGSSTELNLPETANSVTLSDLQPGVQYNITIYAVEENQESTPVVIQQETTGTPRSDTVPSPRDLQFVEVTDVKVTIMWTPPESAVTGYRVDVIPVNLPGEHGQRLPISRNTFAEVTGLSPGVTYYFKVFAVSHGRESKPLTAQQTTKLDAPTNLQFVNETDSTVLVRWTPPRAQITGYRLTVGLTRRGQPRQYNVGPSVSKYPLRNLQPASEYTVSLVAIKGNQESPKATGVFTTLQPGSSIPPYNTEVTETTIVITWTPAPRIGFKLGVRPSQGGEAPREVTSDSGSIVVSGLTPGVEYVYTIQVLRDGQERDAPIVNKVVTPLSPPTNLHLEANPDTGVLTVSWERSTTPDITGYRITTTPTNGQQGNSLEEVVHADQSSCTFDNLSPGLEYNVSVYTVKDDKESVPISDTIIPAVPPPTDLRFTNIGPDTMRVTWAPPPSIDLTNFLVRYSPVKNEEDVAELSISPSDNAVVLTNLLPGTEYVVSVSSVYEQHESTPLRGRQKTGLDSPTGIDFSDITANSFTVHWIAPRATITGYRIRHHPEHFSGRPREDRVPHSRNSITLTNLTPGTEYVVSIVALNGREESPLLIGQQSTVSDVPRDLEVVAATPTSLLISWDAPAVTVRYYRITYGETGGNSPVQEFTVPGSKSTATISGLKPGVDYTITVYAVTGRGDSPASSKPISINYRTEIDKPSQMQVTDVQDNSISVKWLPSSSPVTGYRVTTTPKNGPGPTKTKTAGPDQTEMTIEGLQPTVEYVVSVYAQNPSGESQPLVQTAVTNIDRPKGLAFTDVDVDSIKIAWESPQGQVSRYRVTYSSPEDGIHELFPAPDGEEDTAELQGLRPGSEYTVSVVALHDDMESQPLIGTQSTAIPAPTDLKFTQVTPTSLSAQWTPPNVQLTGYRVRVTPKEKTGPMKEINLAPDSSSVVVSGLMVATKYEVSVYALKDTLTSRPAQGVVTTLENVSPPRRARVTDATETTITISWRTKTETITGFQVDAVPANGQTPIQRTIKPDVRSYTITGLQPGTDYKIYLYTLNDNARSSPVVIDASTAIDAPSNLRFLATTPNSLLVSWQPPRARITGYIIKYEKPGSPPREVVPRPRPGVTEATITGLEPGTEYTIYVIALKNNQKSEPLIGRKKTDELPQLVTLPHPNLHGPEILDVPSTVQKTPFVTHPGYDTGNGIQLPGTSGQQPSVGQQMIFEEHGFRRTTPPTTATPIRHRPRPYPPNVGQEALSQTTISWAPFQDTSEYIISCHPVGTDEEPLQFRVPGTSTSATLTGLTRGATYNVIVEALKDQQRHKVREEVVTVGNSVNEGLNQPTDDSCFDPYTVSHYAVGDEWERMSESGFKLLCQCLGFGSGHFRCDSSRWCHDNGVNYKIGEKWDRQGENGQMMSCTCLGNGKGEFKCDPHEATCYDDGKTYHVGEQWQKEYLGAICSCTCFGGQRGWRCDNCRRPGGEPSPEGTTGQSYNQYSQRYHQRTNTNVNCPIECFMPLDVQADREDSRE

SEQ ID NO: 20035 - protein, 2031 aa, Homo sapiens
MLRGPGPGLLLLAVQCLGTAVPSTGASKSKRQAQQMVQPQSPVAVSQSKPGCYDNGKHYQINQQWERTYLGNALVCTCYGGSRGFNCESKPEAEETCFDKYTGNTYRVGDTYERPKDSMIWDCTCIGAGRGRISCTIANRCHEGGQSYKIGDTWRRPHETGGYMLECVCLGNGKGEWTCKPIAEKCFDHAAGTSYVVGETWEKPYQGWMMVDCTCLGEGSGRITCTSRNRCNDQDTRTSYRIGDTWSKKDNRGNLLQCICTGNGRGEWKCERHTSVQTTSSGSGPFTDVRAAVYQPQPHPQPPPYGHCVTDSGVVYSVGMQWLKTQGNKQMLCTCLGNGVSCQETAVTQTYGGNSNGEPCVLPFTYNGRTFYSCTTEGRQDGHLWCSTTSNYEQDQKYSFCTDHTVLVQTRGGNSNGALCHFPFLYNNHNYTDCTSEGRRDNMKWCGTTQNYDADQKFGFCPMAAHEEICTTNEGVMYRIGDQWDKQHDMGHMMRCTCVGNGRGEWTCIAYSQLRDQCIVDDITYNVNDTFHKRHEEGHMLNCTCFGQGRGRWKCDPVDQCQDSETGTFYQIGDSWEKYVHGVRYQCYCYGRGIGEWHCQPLQTYPSSSGPVEVFITETPSQPNSHPIQWNAPQPSHISKYILRWRPKNSVGRWKEATIPGHLNSYTIKGLKPGVVYEGQLISIQQYGHQEVTRFDFTTTSTSTPVTSNTVTGETTPFSPLVATSESVTEITASSFVVSWVSASDTVSGFRVEYELSEEGDEPQYLDLPSTATSVNIPDLLPGRKYIVNVYQISEDGEQSLILSTSQTTAPDAPPDTTVDQVDDTSIVVRWSRPQAPITGYRIVYSPSVEGSSTELNLPETANSVTLSDLQPGVQYNITIYAVEENQESTPVVIQQETTGTPRSDTVPSPRDLQFVEVTDVKVTIMWTPPESAVTGYRVDVIPVNLPGEHGQRLPISRNTFAEVTGLSPGVTYYFKVFAVSHGRESKPLTAQQTTKLDAPTNLQFVNETDSTVLVRWTPPRAQITGYRLTVGLTRRGQPRQYNVGPSVSKYPLRNLQPASEYTVSLVAIKGNQESPKATGVFTTLQPGSSIPPYNTEVTETTIVITWTPAPRIGFKLGVRPSQGGEAPREVTSDSGSIVVSGLTPGVEYVYTIQVLRDGQERDAPIVNKVVTPLSPPTNLHLEANPDTGVLTVSWERSTTPDITGYRITTTPTNGQQGNSLEEVVHADQSSCTFDNLSPGLEYNVSVYTVKDDKESVPISDTIIPAVPPPTDLRFTNIGPDTMRVTWAPPPSIDLTNFLVRYSPVKNEEDVAELSISPSDNAVVLTNLLPGTEYVVSVSSVYEQHESTPLRGRQKTGLDSPTGIDFSDITANSFTVHWIAPRATITGYRIRHHPEHFSGRPREDRVPHSRNSITLTNLTPGTEYVVSIVALNGREESPLLIGQQSTVSDVPRDLEVVAATPTSLLISWDAPAVTVRYYRITYGETGGNSPVQEFTVPGSKSTATISGLKPGVDYTITVYAVTGRGDSPASSKPISINYRTEIDKPSQMQVTDVQDNSISVKWLPSSSPVTGYRVTTTPKNGPGPTKTKTAGPDQTEMTIEGLQPTVEYVVSVYAQNPSGESQPLVQTAVTNIDRPKGLAFTDVDVDSIKIAWESPQGQVSRYRVTYSSPEDGIHELFPAPDGEEDTAELQGLRPGSEYTVSVVALHDDMESQPLIGTQSTAIPAPTDLKFTQVTPTSLSAQWTPPNVQLTGYRVRVTPKEKTGPMKEINLAPDSSSVVVSGLMVATKYEVSVYALKDTLTSRPAQGVVTTLENVSPPRRARVTDATETTITISWRTKTETITGFQVDAVPANGQTPIQRTIKPDVRSYTITGLQPGTDYKIYLYTLNDNARSSPVVIDASTAIDAPSNLRFLATTPNSLLVSWQPPRARITGYIIKYEKPGSPPREVVPRPRPGVTEATITGLEPGTEYTIYVIALKNNQKSEPLIGRKKTGQEALSQTTISWAPFQDTSEYIISCHPVGTDEEPLQSTKA

SEQ ID NO: 20036 - protein, 2211 aa, Homo sapiens
MLRGPGPGLLLLAVQCLGTAVPSTGASKSKRQAQQMVQPQSPVAVSQSKPGCYDNGKHYQINQQWERTYLGNALVCTCYGGSRGFNCESKPEAEETCFDKYTGNTYRVGDTYERPKDSMIWDCTCIGAGRGRISCTIANRCHEGGQSYKIGDTWRRPHETGGYMLECVCLGNGKGEWTCKPIAEKCFDHAAGTSYVVGETWEKPYQGWMMVDCTCLGEGSGRITCTSRNRCNDQDTRTSYRIGDTWSKKDNRGNLLQCICTGNGRGEWKCERHTSVQTTSSGSGPFTDVRAAVYQPQPHPQPPPYGHCVTDSGVVYSVGMQWLKTQGNKQMLCTCLGNGVSCQETAVTQTYGGNSNGEPCVLPFTYNGRTFYSCTTEGRQDGHLWCSTTSNYEQDQKYSFCTDHTVLVQTRGGNSNGALCHFPFLYNNHNYTDCTSEGRRDNMKWCGTTQNYDADQKFGFCPMAAHEEICTTNEGVMYRIGDQWDKQHDMGHMMRCTCVGNGRGEWTCIAYSQLRDQCIVDDITYNVNDTFHKRHEEGHMLNCTCFGQGRGRWKCDPVDQCQDSETGTFYQIGDSWEKYVHGVRYQCYCYGRGIGEWHCQPLQTYPSSSGPVEVFITETPSQPNSHPIQWNAPQPSHISKYILRWRPKNSVGRWKEATIPGHLNSYTIKGLKPGVVYEGQLISIQQYGHQEVTRFDFTTTSTSTPVTSNTVTGETTPFSPLVATSESVTEITASSFVVSWVSASDTVSGFRVEYELSEEGDEPQYLDLPSTATSVNIPDLLPGRKYIVNVYQISEDGEQSLILSTSQTTAPDAPPDTTVDQVDDTSIVVRWSRPQAPITGYRIVYSPSVEGSSTELNLPETANSVTLSDLQPGVQYNITIYAVEENQESTPVVIQQETTGTPRSDTVPSPRDLQFVEVTDVKVTIMWTPPESAVTGYRVDVIPVNLPGEHGQRLPISRNTFAEVTGLSPGVTYYFKVFAVSHGRESKPLTAQQTTKLDAPTNLQFVNETDSTVLVRWTPPRAQITGYRLTVGLTRRGQPRQYNVGPSVSKYPLRNLQPASEYTVSLVAIKGNQESPKATGVFTTLQPGSSIPPYNTEVTETTIVITWTPAPRIGFKLGVRPSQGGEAPREVTSDSGSIVVSGLTPGVEYVYTIQVLRDGQERDAPIVNKVVTPLSPPTNLHLEANPDTGVLTVSWERSTTPDITGYRITTTPTNGQQGNSLEEVVHADQSSCTFDNLSPGLEYNVSVYTVKDDKESVPISDTIIPAVPPPTDLRFTNIGPDTMRVTWAPPPSIDLTNFLVRYSPVKNEEDVAELSISPSDNAVVLTNLLPGTEYVVSVSSVYEQHESTPLRGRQKTGLDSPTGIDFSDITANSFTVHWIAPRATITGYRIRHHPEHFSGRPREDRVPHSRNSITLTNLTPGTEYVVSIVALNGREESPLLIGQQSTVSDVPRDLEVVAATPTSLLISWDAPAVTVRYYRITYGETGGNSPVQEFTVPGSKSTATISGLKPGVDYTITVYAVTGRGDSPASSKPISINYRTEIDKPSQMQVTDVQDNSISVKWLPSSSPVTGYRVTTTPKNGPGPTKTKTAGPDQTEMTIEGLQPTVEYVVSVYAQNPSGESQPLVQTAVTNIDRPKGLAFTDVDVDSIKIAWESPQGQVSRYRVTYSSPEDGIHELFPAPDGEEDTAELQGLRPGSEYTVSVVALHDDMESQPLIGTQSTAIPAPTDLKFTQVTPTSLSAQWTPPNVQLTGYRVRVTPKEKTGPMKEINLAPDSSSVVVSGLMVATKYEVSVYALKDTLTSRPAQGVVTTLENVSPPRRARVTDATETTITISWRTKTETITGFQVDAVPANGQTPIQRTIKPDVRSYTITGLQPGTDYKIYLYTLNDNARSSPVVIDASTAIDAPSNLRFLATTPNSLLVSWQPPRARITGYIIKYEKPGSPPREVVPRPRPGVTEATITGLEPGTEYTIYVIALKNNQKSEPLIGRKKTGQEALSQTTISWAPFQDTSEYIISCHPVGTDEEPLQFRVPGTSTSATLTGLTRGATYNVIVEALKDQQRHKVREEVVTVGNSRWCHDNGVNYKIGEKWDRQGENGQMMSCTCLGNGKGEFKCDPHEATCYDDGKTYHVGEQWQKEYLGAICSCTCFGGQRGWRCDNCRRPGGEPSPEGTTGQSYNQYSQRYHQRTNTNVNCPIECFMPLDVQADREDSRE

SEQ ID NO: 20037 - protein, 2184 aa, Homo sapiens
MLRGPGPGLLLLAVQCLGTAVPSTGASKSKRQAQQMVQPQSPVAVSQSKPGCYDNGKHYQINQQWERTYLGNALVCTCYGGSRGFNCESKPEAEETCFDKYTGNTYRVGDTYERPKDSMIWDCTCIGAGRGRISCTIANRCHEGGQSYKIGDTWRRPHETGGYMLECVCLGNGKGEWTCKPIAEKCFDHAAGTSYVVGETWEKPYQGWMMVDCTCLGEGSGRITCTSRNRCNDQDTRTSYRIGDTWSKKDNRGNLLQCICTGNGRGEWKCERHTSVQTTSSGSGPFTDVRAAVYQPQPHPQPPPYGHCVTDSGVVYSVGMQWLKTQGNKQMLCTCLGNGVSCQETAVTQTYGGNSNGEPCVLPFTYNGRTFYSCTTEGRQDGHLWCSTTSNYEQDQKYSFCTDHTVLVQTRGGNSNGALCHFPFLYNNHNYTDCTSEGRRDNMKWCGTTQNYDADQKFGFCPMAAHEEICTTNEGVMYRIGDQWDKQHDMGHMMRCTCVGNGRGEWTCIAYSQLRDQCIVDDITYNVNDTFHKRHEEGHMLNCTCFGQGRGRWKCDPVDQCQDSETGTFYQIGDSWEKYVHGVRYQCYCYGRGIGEWHCQPLQTYPSSSGPVEVFITETPSQPNSHPIQWNAPQPSHISKYILRWRPKNSVGRWKEATIPGHLNSYTIKGLKPGVVYEGQLISIQQYGHQEVTRFDFTTTSTSTPVTSNTVTGETTPFSPLVATSESVTEITASSFVVSWVSASDTVSGFRVEYELSEEGDEPQYLDLPSTATSVNIPDLLPGRKYIVNVYQISEDGEQSLILSTSQTTAPDAPPDTTVDQVDDTSIVVRWSRPQAPITGYRIVYSPSVEGSSTELNLPETANSVTLSDLQPGVQYNITIYAVEENQESTPVVIQQETTGTPRSDTVPSPRDLQFVEVTDVKVTIMWTPPESAVTGYRVDVIPVNLPGEHGQRLPISRNTFAEVTGLSPGVTYYFKVFAVSHGRESKPLTAQQTTKLDAPTNLQFVNETDSTVLVRWTPPRAQITGYRLTVGLTRRGQPRQYNVGPSVSKYPLRNLQPASEYTVSLVAIKGNQESPKATGVFTTLQPGSSIPPYNTEVTETTIVITWTPAPRIGFKLGVRPSQGGEAPREVTSDSGSIVVSGLTPGVEYVYTIQVLRDGQERDAPIVNKVVTPLSPPTNLHLEANPDTGVLTVSWERSTTPDITGYRITTTPTNGQQGNSLEEVVHADQSSCTFDNLSPGLEYNVSVYTVKDDKESVPISDTIIPAVPPPTDLRFTNIGPDTMRVTWAPPPSIDLTNFLVRYSPVKNEEDVAELSISPSDNAVVLTNLLPGTEYVVSVSSVYEQHESTPLRGRQKTGLDSPTGIDFSDITANSFTVHWIAPRATITGYRIRHHPEHFSGRPREDRVPHSRNSITLTNLTPGTEYVVSIVALNGREESPLLIGQQSTVSDVPRDLEVVAATPTSLLISWDAPAVTVRYYRITYGETGGNSPVQEFTVPGSKSTATISGLKPGVDYTITVYAVTGRGDSPASSKPISINYRTEIDKPSQMQVTDVQDNSISVKWLPSSSPVTGYRVTTTPKNGPGPTKTKTAGPDQTEMTIEGLQPTVEYVVSVYAQNPSGESQPLVQTAVTNIDRPKGLAFTDVDVDSIKIAWESPQGQVSRYRVTYSSPEDGIHELFPAPDGEEDTAELQGLRPGSEYTVSVVALHDDMESQPLIGTQSTAIPAPTDLKFTQVTPTSLSAQWTPPNVQLTGYRVRVTPKEKTGPMKEINLAPDSSSVVVSGLMVATKYEVSVYALKDTLTSRPAQGVVTTLENVSPPRRARVTDATETTITISWRTKTETITGFQVDAVPANGQTPIQRTIKPDVRSYTITGLQPGTDYKIYLYTLNDNARSSPVVIDASTAIDAPSNLRFLATTPNSLLVSWQPPRARITGYIIKYEKPGSPPREVVPRPRPGVTEATITGLEPGTEYTIYVIALKNNQKSEPLIGRKKTVNEGLNQPTDDSCFDPYTVSHYAVGDEWERMSESGFKLLCQCLGFGSGHFRCDSSRWCHDNGVNYKIGEKWDRQGENGQMMSCTCLGNGKGEFKCDPHEATCYDDGKTYHVGEQWQKEYLGAICSCTCFGGQRGWRCDNCRRPGGEPSPEGTTGQSYNQYSQRYHQRTNTNVNCPIECFMPLDVQADREDSRE

SEQ ID NO: 20038 - protein, 2446 aa, Homo sapiens
MLRGPGPGLLLLAVQCLGTAVPSTGASKSKRQAQQMVQPQSPVAVSQSKPGCYDNGKHYQINQQWERTYLGNALVCTCYGGSRGFNCESKPEAEETCFDKYTGNTYRVGDTYERPKDSMIWDCTCIGAGRGRISCTIANRCHEGGQSYKIGDTWRRPHETGGYMLECVCLGNGKGEWTCKPIAEKCFDHAAGTSYVVGETWEKPYQGWMMVDCTCLGEGSGRITCTSRNRCNDQDTRTSYRIGDTWSKKDNRGNLLQCICTGNGRGEWKCERHTSVQTTSSGSGPFTDVRAAVYQPQPHPQPPPYGHCVTDSGVVYSVGMQWLKTQGNKQMLCTCLGNGVSCQETAVTQTYGGNSNGEPCVLPFTYNGRTFYSCTTEGRQDGHLWCSTTSNYEQDQKYSFCTDHTVLVQTRGGNSNGALCHFPFLYNNHNYTDCTSEGRRDNMKWCGTTQNYDADQKFGFCPMAAHEEICTTNEGVMYRIGDQWDKQHDMGHMMRCTCVGNGRGEWTCIAYSQLRDQCIVDDITYNVNDTFHKRHEEGHMLNCTCFGQGRGRWKCDPVDQCQDSETGTFYQIGDSWEKYVHGVRYQCYCYGRGIGEWHCQPLQTYPSSSGPVEVFITETPSQPNSHPIQWNAPQPSHISKYILRWRPKNSVGRWKEATIPGHLNSYTIKGLKPGVVYEGQLISIQQYGHQEVTRFDFTTTSTSTPVTSNTVTGETTPFSPLVATSESVTEITASSFVVSWVSASDTVSGFRVEYELSEEGDEPQYLDLPSTATSVNIPDLLPGRKYIVNVYQISEDGEQSLILSTSQTTAPDAPPDTTVDQVDDTSIVVRWSRPQAPITGYRIVYSPSVEGSSTELNLPETANSVTLSDLQPGVQYNITIYAVEENQESTPVVIQQETTGTPRSDTVPSPRDLQFVEVTDVKVTIMWTPPESAVTGYRVDVIPVNLPGEHGQRLPISRNTFAEVTGLSPGVTYYFKVFAVSHGRESKPLTAQQTTKLDAPTNLQFVNETDSTVLVRWTPPRAQITGYRLTVGLTRRGQPRQYNVGPSVSKYPLRNLQPASEYTVSLVAIKGNQESPKATGVFTTLQPGSSIPPYNTEVTETTIVITWTPAPRIGFKLGVRPSQGGEAPREVTSDSGSIVVSGLTPGVEYVYTIQVLRDGQERDAPIVNKVVTPLSPPTNLHLEANPDTGVLTVSWERSTTPDITGYRITTTPTNGQQGNSLEEVVHADQSSCTFDNLSPGLEYNVSVYTVKDDKESVPISDTIIPEVPQLTDLSFVDITDSSIGLRWTPLNSSTIIGYRITVVAAGEGIPIFEDFVDSSVGYYTVTGLEPGIDYDISVITLINGGESAPTTLTQQTAVPPPTDLRFTNIGPDTMRVTWAPPPSIDLTNFLVRYSPVKNEEDVAELSISPSDNAVVLTNLLPGTEYVVSVSSVYEQHESTPLRGRQKTGLDSPTGIDFSDITANSFTVHWIAPRATITGYRIRHHPEHFSGRPREDRVPHSRNSITLTNLTPGTEYVVSIVALNGREESPLLIGQQSTVSDVPRDLEVVAATPTSLLISWDAPAVTVRYYRITYGETGGNSPVQEFTVPGSKSTATISGLKPGVDYTITVYAVTGRGDSPASSKPISINYRTEIDKPSQMQVTDVQDNSISVKWLPSSSPVTGYRVTTTPKNGPGPTKTKTAGPDQTEMTIEGLQPTVEYVVSVYAQNPSGESQPLVQTAVTNIDRPKGLAFTDVDVDSIKIAWESPQGQVSRYRVTYSSPEDGIHELFPAPDGEEDTAELQGLRPGSEYTVSVVALHDDMESQPLIGTQSTAIPAPTDLKFTQVTPTSLSAQWTPPNVQLTGYRVRVTPKEKTGPMKEINLAPDSSSVVVSGLMVATKYEVSVYALKDTLTSRPAQGVVTTLENVSPPRRARVTDATETTITISWRTKTETITGFQVDAVPANGQTPIQRTIKPDVRSYTITGLQPGTDYKIYLYTLNDNARSSPVVIDASTAIDAPSNLRFLATTPNSLLVSWQPPRARITGYIIKYEKPGSPPREVVPRPRPGVTEATITGLEPGTEYTIYVIALKNNQKSEPLIGRKKTDELPQLVTLPHPNLHGPEILDVPSTVQKTPFVTHPGYDTGNGIQLPGTSGQQPSVGQQMIFEEHGFRRTTPPTTATPIRHRPRPYPPNVGQEALSQTTISWAPFQDTSEYIISCHPVGTDEEPLQFRVPGTSTSATLTGLTRGATYNVIVEALKDQQRHKVREEVVTVGNSVNEGLNQPTDDSCFDPYTVSHYAVGDEWERMSESGFKLLCQCLGFGSGHFRCDSSRWCHDNGVNYKIGEKWDRQGENGQMMSCTCLGNGKGEFKCDPHEATCYDDGKTYHVGEQWQKEYLGAICSCTCFGGQRGWRCDNCRRPGGEPSPEGTTGQSYNQYSQRYHQRTNTNVNCPIECFMPLDVQADREDSRE

SEQ ID NO: 20039 - protein, 2296 aa, Homo sapiens
MLRGPGPGLLLLAVQCLGTAVPSTGASKSKRQAQQMVQPQSPVAVSQSKPGCYDNGKHYQINQQWERTYLGNALVCTCYGGSRGFNCESKPEAEETCFDKYTGNTYRVGDTYERPKDSMIWDCTCIGAGRGRISCTIANRCHEGGQSYKIGDTWRRPHETGGYMLECVCLGNGKGEWTCKPIAEKCFDHAAGTSYVVGETWEKPYQGWMMVDCTCLGEGSGRITCTSRNRCNDQDTRTSYRIGDTWSKKDNRGNLLQCICTGNGRGEWKCERHTSVQTTSSGSGPFTDVRAAVYQPQPHPQPPPYGHCVTDSGVVYSVGMQWLKTQGNKQMLCTCLGNGVSCQETAVTQTYGGNSNGEPCVLPFTYNGRTFYSCTTEGRQDGHLWCSTTSNYEQDQKYSFCTDHTVLVQTRGGNSNGALCHFPFLYNNHNYTDCTSEGRRDNMKWCGTTQNYDADQKFGFCPMAAHEEICTTNEGVMYRIGDQWDKQHDMGHMMRCTCVGNGRGEWTCIAYSQLRDQCIVDDITYNVNDTFHKRHEEGHMLNCTCFGQGRGRWKCDPVDQCQDSETGTFYQIGDSWEKYVHGVRYQCYCYGRGIGEWHCQPLQTYPSSSGPVEVFITETPSQPNSHPIQWNAPQPSHISKYILRWRPKNSVGRWKEATIPGHLNSYTIKGLKPGVVYEGQLISIQQYGHQEVTRFDFTTTSTSTPVTSNTVTGETTPFSPLVATSESVTEITASSFVVSWVSASDTVSGFRVEYELSEEGDEPQYLDLPSTATSVNIPDLLPGRKYIVNVYQISEDGEQSLILSTSQTTAPDAPPDTTVDQVDDTSIVVRWSRPQAPITGYRIVYSPSVEGSSTELNLPETANSVTLSDLQPGVQYNITIYAVEENQESTPVVIQQETTGTPRSDTVPSPRDLQFVEVTDVKVTIMWTPPESAVTGYRVDVIPVNLPGEHGQRLPISRNTFAEVTGLSPGVTYYFKVFAVSHGRESKPLTAQQTTKLDAPTNLQFVNETDSTVLVRWTPPRAQITGYRLTVGLTRRGQPRQYNVGPSVSKYPLRNLQPASEYTVSLVAIKGNQESPKATGVFTTLQPGSSIPPYNTEVTETTIVITWTPAPRIGFKLGVRPSQGGEAPREVTSDSGSIVVSGLTPGVEYVYTIQVLRDGQERDAPIVNKVVTPLSPPTNLHLEANPDTGVLTVSWERSTTPDITGYRITTTPTNGQQGNSLEEVVHADQSSCTFDNLSPGLEYNVSVYTVKDDKESVPISDTIIPAVPPPTDLRFTNIGPDTMRVTWAPPPSIDLTNFLVRYSPVKNEEDVAELSISPSDNAVVLTNLLPGTEYVVSVSSVYEQHESTPLRGRQKTGLDSPTGIDFSDITANSFTVHWIAPRATITGYRIRHHPEHFSGRPREDRVPHSRNSITLTNLTPGTEYVVSIVALNGREESPLLIGQQSTVSDVPRDLEVVAATPTSLLISWDAPAVTVRYYRITYGETGGNSPVQEFTVPGSKSTATISGLKPGVDYTITVYAVTGRGDSPASSKPISINYRTEIDKPSQMQVTDVQDNSISVKWLPSSSPVTGYRVTTTPKNGPGPTKTKTAGPDQTEMTIEGLQPTVEYVVSVYAQNPSGESQPLVQTAVTTIPAPTDLKFTQVTPTSLSAQWTPPNVQLTGYRVRVTPKEKTGPMKEINLAPDSSSVVVSGLMVATKYEVSVYALKDTLTSRPAQGVVTTLENVSPPRRARVTDATETTITISWRTKTETITGFQVDAVPANGQTPIQRTIKPDVRSYTITGLQPGTDYKIYLYTLNDNARSSPVVIDASTAIDAPSNLRFLATTPNSLLVSWQPPRARITGYIIKYEKPGSPPREVVPRPRPGVTEATITGLEPGTEYTIYVIALKNNQKSEPLIGRKKTDELPQLVTLPHPNLHGPEILDVPSTVQKTPFVTHPGYDTGNGIQLPGTSGQQPSVGQQMIFEEHGFRRTTPPTTATPIRHRPRPYPPNVGEEIQIGHIPREDVDYHLYPHGPGLNPNASTGQEALSQTTISWAPFQDTSEYIISCHPVGTDEEPLQFRVPGTSTSATLTGLTRGATYNVIVEALKDQQRHKVREEVVTVGNSVNEGLNQPTDDSCFDPYTVSHYAVGDEWERMSESGFKLLCQCLGFGSGHFRCDSSRWCHDNGVNYKIGEKWDRQGENGQMMSCTCLGNGKGEFKCDPHEATCYDDGKTYHVGEQWQKEYLGAICSCTCFGGQRGWRCDNCRRPGGEPSPEGTTGQSYNQYSQRYHQRTNTNVNCPIECFMPLDVQADREDSRE

SEQ ID NO: 20040 - protein, 2240 aa, Homo sapiens
MLRGPGPGLLLLAVQCLGTAVPSTGASKSKRQAQQMVQPQSPVAVSQSKPGCYDNGKHYQINQQWERTYLGNALVCTCYGGSRGFNCESKPEAEETCFDKYTGNTYRVGDTYERPKDSMIWDCTCIGAGRGRISCTIANRCHEGGQSYKIGDTWRRPHETGGYMLECVCLGNGKGEWTCKPIAEKCFDHAAGTSYVVGETWEKPYQGWMMVDCTCLGEGSGRITCTSRNRCNDQDTRTSYRIGDTWSKKDNRGNLLQCICTGNGRGEWKCERHTSVQTTSSGSGPFTDVRAAVYQPQPHPQPPPYGHCVTDSGVVYSVGMQWLKTQGNKQMLCTCLGNGVSCQETAVTQTYGGNSNGEPCVLPFTYNGRTFYSCTTEGRQDGHLWCSTTSNYEQDQKYSFCTDHTVLVQTRGGNSNGALCHFPFLYNNHNYTDCTSEGRRDNMKWCGTTQNYDADQKFGFCPMAAHEEICTTNEGVMYRIGDQWDKQHDMGHMMRCTCVGNGRGEWTCIAYSQLRDQCIVDDITYNVNDTFHKRHEEGHMLNCTCFGQGRGRWKCDPVDQCQDSETGTFYQIGDSWEKYVHGVRYQCYCYGRGIGEWHCQPLQTYPSSSGPVEVFITETPSQPNSHPIQWNAPQPSHISKYILRWRPKNSVGRWKEATIPGHLNSYTIKGLKPGVVYEGQLISIQQYGHQEVTRFDFTTTSTSTPVTSNTVTGETTPFSPLVATSESVTEITASSFVVSWVSASDTVSGFRVEYELSEEGDEPQYLDLPSTATSVNIPDLLPGRKYIVNVYQISEDGEQSLILSTSQTTAPDAPPDTTVDQVDDTSIVVRWSRPQAPITGYRIVYSPSVEGSSTELNLPETANSVTLSDLQPGVQYNITIYAVEENQESTPVVIQQETTGTPRSDTVPSPRDLQFVEVTDVKVTIMWTPPESAVTGYRVDVIPVNLPGEHGQRLPISRNTFAEVTGLSPGVTYYFKVFAVSHGRESKPLTAQQTTKLDAPTNLQFVNETDSTVLVRWTPPRAQITGYRLTVGLTRRGQPRQYNVGPSVSKYPLRNLQPASEYTVSLVAIKGNQESPKATGVFTTLQPGSSIPPYNTEVTETTIVITWTPAPRIGFKLGVRPSQGGEAPREVTSDSGSIVVSGLTPGVEYVYTIQVLRDGQERDAPIVNKVVTPLSPPTNLHLEANPDTGVLTVSWERSTTPDITGYRITTTPTNGQQGNSLEEVVHADQSSCTFDNLSPGLEYNVSVYTVKDDKESVPISDTIIPAVPPPTDLRFTNIGPDTMRVTWAPPPSIDLTNFLVRYSPVKNEEDVAELSISPSDNAVVLTNLLPGTEYVVSVSSVYEQHESTPLRGRQKTGLDSPTGIDFSDITANSFTVHWIAPRATITGYRIRHHPEHFSGRPREDRVPHSRNSITLTNLTPGTEYVVSIVALNGREESPLLIGQQSTVSDVPRDLEVVAATPTSLLISWDAPAVTVRYYRITYGETGGNSPVQEFTVPGSKSTATISGLKPGVDYTITVYAVTGRGDSPASSKPISINYRTEIDKPSQMQVTDVQDNSISVKWLPSSSPVTGYRVTTTPKNGPGPTKTKTAGPDQTEMTIEGLQPTVEYVVSVYAQNPSGESQPLVQTAVTTIPAPTDLKFTQVTPTSLSAQWTPPNVQLTGYRVRVTPKEKTGPMKEINLAPDSSSVVVSGLMVATKYEVSVYALKDTLTSRPAQGVVTTLENVSPPRRARVTDATETTITISWRTKTETITGFQVDAVPANGQTPIQRTIKPDVRSYTITGLQPGTDYKIYLYTLNDNARSSPVVIDASTAIDAPSNLRFLATTPNSLLVSWQPPRARITGYIIKYEKPGSPPREVVPRPRPGVTEATITGLEPGTEYTIYVIALKNNQKSEPLIGRKKTVQKTPFVTHPGYDTGNGIQLPGTSGQQPSVGQQMIFEEHGFRRTTPPTTATPIRHRPRPYPPNVGQEALSQTTISWAPFQDTSEYIISCHPVGTDEEPLQFRVPGTSTSATLTGLTRGATYNVIVEALKDQQRHKVREEVVTVGNSVNEGLNQPTDDSCFDPYTVSHYAVGDEWERMSESGFKLLCQCLGFGSGHFRCDSSRWCHDNGVNYKIGEKWDRQGENGQMMSCTCLGNGKGEFKCDPHEATCYDDGKTYHVGEQWQKEYLGAICSCTCFGGQRGWRCDNCRRPGGEPSPEGTTGQSYNQYSQRYHQRTNTNVNCPIECFMPLDVQADREDSRE

SEQ ID NO: 20041 - protein, 2176 aa, Homo sapiens
MLRGPGPGLLLLAVQCLGTAVPSTGASKSKRQAQQMVQPQSPVAVSQSKPGCYDNGKHYQINQQWERTYLGNALVCTCYGGSRGFNCESKPEAEETCFDKYTGNTYRVGDTYERPKDSMIWDCTCIGAGRGRISCTIANRCHEGGQSYKIGDTWRRPHETGGYMLECVCLGNGKGEWTCKPIAEKCFDHAAGTSYVVGETWEKPYQGWMMVDCTCLGEGSGRITCTSRNRCNDQDTRTSYRIGDTWSKKDNRGNLLQCICTGNGRGEWKCERHTSVQTTSSGSGPFTDVRAAVYQPQPHPQPPPYGHCVTDSGVVYSVGMQWLKTQGNKQMLCTCLGNGVSCQETAVTQTYGGNSNGEPCVLPFTYNGRTFYSCTTEGRQDGHLWCSTTSNYEQDQKYSFCTDHTVLVQTRGGNSNGALCHFPFLYNNHNYTDCTSEGRRDNMKWCGTTQNYDADQKFGFCPMAAHEEICTTNEGVMYRIGDQWDKQHDMGHMMRCTCVGNGRGEWTCIAYSQLRDQCIVDDITYNVNDTFHKRHEEGHMLNCTCFGQGRGRWKCDPVDQCQDSETGTFYQIGDSWEKYVHGVRYQCYCYGRGIGEWHCQPLQTYPSSSGPVEVFITETPSQPNSHPIQWNAPQPSHISKYILRWRPKNSVGRWKEATIPGHLNSYTIKGLKPGVVYEGQLISIQQYGHQEVTRFDFTTTSTSTPVTSNTVTGETTPFSPLVATSESVTEITASSFVVSWVSASDTVSGFRVEYELSEEGDEPQYLDLPSTATSVNIPDLLPGRKYIVNVYQISEDGEQSLILSTSQTTAPDAPPDTTVDQVDDTSIVVRWSRPQAPITGYRIVYSPSVEGSSTELNLPETANSVTLSDLQPGVQYNITIYAVEENQESTPVVIQQETTGTPRSDTVPSPRDLQFVEVTDVKVTIMWTPPESAVTGYRVDVIPVNLPGEHGQRLPISRNTFAEVTGLSPGVTYYFKVFAVSHGRESKPLTAQQTTKLDAPTNLQFVNETDSTVLVRWTPPRAQITGYRLTVGLTRRGQPRQYNVGPSVSKYPLRNLQPASEYTVSLVAIKGNQESPKATGVFTTLQPGSSIPPYNTEVTETTIVITWTPAPRIGFKLGVRPSQGGEAPREVTSDSGSIVVSGLTPGVEYVYTIQVLRDGQERDAPIVNKVVTPLSPPTNLHLEANPDTGVLTVSWERSTTPDITGYRITTTPTNGQQGNSLEEVVHADQSSCTFDNLSPGLEYNVSVYTVKDDKESVPISDTIIPAVPPPTDLRFTNIGPDTMRVTWAPPPSIDLTNFLVRYSPVKNEEDVAELSISPSDNAVVLTNLLPGTEYVVSVSSVYEQHESTPLRGRQKTGLDSPTGIDFSDITANSFTVHWIAPRATITGYRIRHHPEHFSGRPREDRVPHSRNSITLTNLTPGTEYVVSIVALNGREESPLLIGQQSTVSDVPRDLEVVAATPTSLLISWDAPAVTVRYYRITYGETGGNSPVQEFTVPGSKSTATISGLKPGVDYTITVYAVTGRGDSPASSKPISINYRTEIDKPSQMQVTDVQDNSISVKWLPSSSPVTGYRVTTTPKNGPGPTKTKTAGPDQTEMTIEGLQPTVEYVVSVYAQNPSGESQPLVQTAVTTIPAPTDLKFTQVTPTSLSAQWTPPNVQLTGYRVRVTPKEKTGPMKEINLAPDSSSVVVSGLMVATKYEVSVYALKDTLTSRPAQGVVTTLENVSPPRRARVTDATETTITISWRTKTETITGFQVDAVPANGQTPIQRTIKPDVRSYTITGLQPGTDYKIYLYTLNDNARSSPVVIDASTAIDAPSNLRFLATTPNSLLVSWQPPRARITGYIIKYEKPGSPPREVVPRPRPGVTEATITGLEPGTEYTIYVIALKNNQKSEPLIGRKKTGQEALSQTTISWAPFQDTSEYIISCHPVGTDEEPLQFRVPGTSTSATLTGLTRGATYNVIVEALKDQQRHKVREEVVTVGNSVNEGLNQPTDDSCFDPYTVSHYAVGDEWERMSESGFKLLCQCLGFGSGHFRCDSSRWCHDNGVNYKIGEKWDRQGENGQMMSCTCLGNGKGEFKCDPHEATCYDDGKTYHVGEQWQKEYLGAICSCTCFGGQRGWRCDNCRRPGGEPSPEGTTGQSYNQYSQRYHQRTNTNVNCPIECFMPLDVQADREDSRE

SEQ ID NO: 20042 - protein, 2386 aa, Homo sapiens
MLRGPGPGLLLLAVQCLGTAVPSTGASKSKRQAQQMVQPQSPVAVSQSKPGCYDNGKHYQINQQWERTYLGNALVCTCYGGSRGFNCESKPEAEETCFDKYTGNTYRVGDTYERPKDSMIWDCTCIGAGRGRISCTIANRCHEGGQSYKIGDTWRRPHETGGYMLECVCLGNGKGEWTCKPIAEKCFDHAAGTSYVVGETWEKPYQGWMMVDCTCLGEGSGRITCTSRNRCNDQDTRTSYRIGDTWSKKDNRGNLLQCICTGNGRGEWKCERHTSVQTTSSGSGPFTDVRAAVYQPQPHPQPPPYGHCVTDSGVVYSVGMQWLKTQGNKQMLCTCLGNGVSCQETAVTQTYGGNSNGEPCVLPFTYNGRTFYSCTTEGRQDGHLWCSTTSNYEQDQKYSFCTDHTVLVQTRGGNSNGALCHFPFLYNNHNYTDCTSEGRRDNMKWCGTTQNYDADQKFGFCPMAAHEEICTTNEGVMYRIGDQWDKQHDMGHMMRCTCVGNGRGEWTCIAYSQLRDQCIVDDITYNVNDTFHKRHEEGHMLNCTCFGQGRGRWKCDPVDQCQDSETGTFYQIGDSWEKYVHGVRYQCYCYGRGIGEWHCQPLQTYPSSSGPVEVFITETPSQPNSHPIQWNAPQPSHISKYILRWRPKNSVGRWKEATIPGHLNSYTIKGLKPGVVYEGQLISIQQYGHQEVTRFDFTTTSTSTPVTSNTVTGETTPFSPLVATSESVTEITASSFVVSWVSASDTVSGFRVEYELSEEGDEPQYLDLPSTATSVNIPDLLPGRKYIVNVYQISEDGEQSLILSTSQTTAPDAPPDTTVDQVDDTSIVVRWSRPQAPITGYRIVYSPSVEGSSTELNLPETANSVTLSDLQPGVQYNITIYAVEENQESTPVVIQQETTGTPRSDTVPSPRDLQFVEVTDVKVTIMWTPPESAVTGYRVDVIPVNLPGEHGQRLPISRNTFAEVTGLSPGVTYYFKVFAVSHGRESKPLTAQQTTKLDAPTNLQFVNETDSTVLVRWTPPRAQITGYRLTVGLTRRGQPRQYNVGPSVSKYPLRNLQPASEYTVSLVAIKGNQESPKATGVFTTLQPGSSIPPYNTEVTETTIVITWTPAPRIGFKLGVRPSQGGEAPREVTSDSGSIVVSGLTPGVEYVYTIQVLRDGQERDAPIVNKVVTPLSPPTNLHLEANPDTGVLTVSWERSTTPDITGYRITTTPTNGQQGNSLEEVVHADQSSCTFDNLSPGLEYNVSVYTVKDDKESVPISDTIIPEVPQLTDLSFVDITDSSIGLRWTPLNSSTIIGYRITVVAAGEGIPIFEDFVDSSVGYYTVTGLEPGIDYDISVITLINGGESAPTTLTQQTAVPPPTDLRFSDITANSFTVHWIAPRATITGYRIRHHPEHFSGRPREDRVPHSRNSITLTNLTPGTEYVVSIVALNGREESPLLIGQQSTVSDVPRDLEVVAATPTSLLISWDAPAVTVRYYRITYGETGGNSPVQEFTVPGSKSTATISGLKPGVDYTITVYAVTGRGDSPASSKPISINYRTEIDKPSQMQVTDVQDNSISVKWLPSSSPVTGYRVTTTPKNGPGPTKTKTAGPDQTEMTIEGLQPTVEYVVSVYAQNPSGESQPLVQTAVTNIDRPKGLAFTDVDVDSIKIAWESPQGQVSRYRVTYSSPEDGIHELFPAPDGEEDTAELQGLRPGSEYTVSVVALHDDMESQPLIGTQSTAIPAPTDLKFTQVTPTSLSAQWTPPNVQLTGYRVRVTPKEKTGPMKEINLAPDSSSVVVSGLMVATKYEVSVYALKDTLTSRPAQGVVTTLENVSPPRRARVTDATETTITISWRTKTETITGFQVDAVPANGQTPIQRTIKPDVRSYTITGLQPGTDYKIYLYTLNDNARSSPVVIDASTAIDAPSNLRFLATTPNSLLVSWQPPRARITGYIIKYEKPGSPPREVVPRPRPGVTEATITGLEPGTEYTIYVIALKNNQKSEPLIGRKKTDELPQLVTLPHPNLHGPEILDVPSTVQKTPFVTHPGYDTGNGIQLPGTSGQQPSVGQQMIFEEHGFRRTTPPTTATPIRHRPRPYPPNVGEEIQIGHIPREDVDYHLYPHGPGLNPNASTGQEALSQTTISWAPFQDTSEYIISCHPVGTDEEPLQFRVPGTSTSATLTGLTRGATYNVIVEALKDQQRHKVREEVVTVGNSVNEGLNQPTDDSCFDPYTVSHYAVGDEWERMSESGFKLLCQCLGFGSGHFRCDSSRWCHDNGVNYKIGEKWDRQGENGQMMSCTCLGNGKGEFKCDPHEATCYDDGKTYHVGEQWQKEYLGAICSCTCFGGQRGWRCDNCRRPGGEPSPEGTTGQSYNQYSQRYHQRTNTNVNCPIECFMPLDVQADREDSRE

SEQ ID NO: 20043 - protein, 2008 aa, Homo sapiens
MLRGPGPGLLLLAVQCLGTAVPSTGASKSKRQAQQMVQPQSPVAVSQSKPGCYDNGKHYQINQQWERTYLGNALVCTCYGGSRGFNCESKPEAEETCFDKYTGNTYRVGDTYERPKDSMIWDCTCIGAGRGRISCTIANRCHEGGQSYKIGDTWRRPHETGGYMLECVCLGNGKGEWTCKPIAEKCFDHAAGTSYVVGETWEKPYQGWMMVDCTCLGEGSGRITCTSRNRCNDQDTRTSYRIGDTWSKKDNRGNLLQCICTGNGRGEWKCERHTSVQTTSSGSGPFTDVRAAVYQPQPHPQPPPYGHCVTDSGVVYSVGMQWLKTQGNKQMLCTCLGNGVSCQETAVTQTYGGNSNGEPCVLPFTYNGRTFYSCTTEGRQDGHLWCSTTSNYEQDQKYSFCTDHTVLVQTRGGNSNGALCHFPFLYNNHNYTDCTSEGRRDNMKWCGTTQNYDADQKFGFCPMAAHEEICTTNEGVMYRIGDQWDKQHDMGHMMRCTCVGNGRGEWTCIAYSQLRDQCIVDDITYNVNDTFHKRHEEGHMLNCTCFGQGRGRWKCDPVDQCQDSETGTFYQIGDSWEKYVHGVRYQCYCYGRGIGEWHCQPLQTYPSSSGPVEVFITETPSQPNSHPIQWNAPQPSHISKYILRWRPKNSVGRWKEATIPGHLNSYTIKGLKPGVVYEGQLISIQQYGHQEVTRFDFTTTSTSTPVTSNTVTGETTPFSPLVATSESVTEITASSFVVSWVSASDTVSGFRVEYELSEEGDEPQYLDLPSTATSVNIPDLLPGRKYIVNVYQISEDGEQSLILSTSQTTAPDAPPDTTVDQVDDTSIVVRWSRPQAPITGYRIVYSPSVEGSSTELNLPETANSVTLSDLQPGVQYNITIYAVEENQESTPVVIQQETTGTPRSDTVPSPRDLQFVEVTDVKVTIMWTPPESAVTGYRVDVIPVNLPGEHGQRLPISRNTFAEVTGLSPGVTYYFKVFAVSHGRESKPLTAQQTTKLDAPTNLQFVNETDSTVLVRWTPPRAQITGYRLTVGLTRRGQPRQYNVGPSVSKYPLRNLQPASEYTVSLVAIKGNQESPKATGVFTTLQPGSSIPPYNTEVTETTIVITWTPAPRIGFKLGVRPSQGGEAPREVTSDSGSIVVSGLTPGVEYVYTIQVLRDGQERDAPIVNKVVTPLSPPTNLHLEANPDTGVLTVSWERSTTPDITGYRITTTPTNGQQGNSLEEVVHADQSSCTFDNLSPGLEYNVSVYTVKDDKENSPVQEFTVPGSKSTATISGLKPGVDYTITVYAVTGRGDSPASSKPISINYRTEIDKPSQMQVTDVQDNSISVKWLPSSSPVTGYRVTTTPKNGPGPTKTKTAGPDQTEMTIEGLQPTVEYVVSVYAQNPSGESQPLVQTAVTTIPAPTDLKFTQVTPTSLSAQWTPPNVQLTGYRVRVTPKEKTGPMKEINLAPDSSSVVVSGLMVATKYEVSVYALKDTLTSRPAQGVVTTLENVSPPRRARVTDATETTITISWRTKTETITGFQVDAVPANGQTPIQRTIKPDVRSYTITGLQPGTDYKIYLYTLNDNARSSPVVIDASTAIDAPSNLRFLATTPNSLLVSWQPPRARITGYIIKYEKPGSPPREVVPRPRPGVTEATITGLEPGTEYTIYVIALKNNQKSEPLIGRKKTVQKTPFVTHPGYDTGNGIQLPGTSGQQPSVGQQMIFEEHGFRRTTPPTTATPIRHRPRPYPPNVGQEALSQTTISWAPFQDTSEYIISCHPVGTDEEPLQFRVPGTSTSATLTGLTRGATYNVIVEALKDQQRHKVREEVVTVGNSVNEGLNQPTDDSCFDPYTVSHYAVGDEWERMSESGFKLLCQCLGFGSGHFRCDSSRWCHDNGVNYKIGEKWDRQGENGQMMSCTCLGNGKGEFKCDPHEATCYDDGKTYHVGEQWQKEYLGAICSCTCFGGQRGWRCDNCRRPGGEPSPEGTTGQSYNQYSQRYHQRTNTNVNCPIECFMPLDVQADREDSRE

SEQ ID NO: 20044 - protein, 2267 aa, Homo sapiens
MLRGPGPGLLLLAVQCLGTAVPSTGASKSKRQAQQMVQPQSPVAVSQSKPGCYDNGKHYQINQQWERTYLGNALVCTCYGGSRGFNCESKPEAEETCFDKYTGNTYRVGDTYERPKDSMIWDCTCIGAGRGRISCTIANRCHEGGQSYKIGDTWRRPHETGGYMLECVCLGNGKGEWTCKPIAEKCFDHAAGTSYVVGETWEKPYQGWMMVDCTCLGEGSGRITCTSRNRCNDQDTRTSYRIGDTWSKKDNRGNLLQCICTGNGRGEWKCERHTSVQTTSSGSGPFTDVRAAVYQPQPHPQPPPYGHCVTDSGVVYSVGMQWLKTQGNKQMLCTCLGNGVSCQETAVTQTYGGNSNGEPCVLPFTYNGRTFYSCTTEGRQDGHLWCSTTSNYEQDQKYSFCTDHTVLVQTRGGNSNGALCHFPFLYNNHNYTDCTSEGRRDNMKWCGTTQNYDADQKFGFCPMAAHEEICTTNEGVMYRIGDQWDKQHDMGHMMRCTCVGNGRGEWTCIAYSQLRDQCIVDDITYNVNDTFHKRHEEGHMLNCTCFGQGRGRWKCDPVDQCQDSETGTFYQIGDSWEKYVHGVRYQCYCYGRGIGEWHCQPLQTYPSSSGPVEVFITETPSQPNSHPIQWNAPQPSHISKYILRWRPKNSVGRWKEATIPGHLNSYTIKGLKPGVVYEGQLISIQQYGHQEVTRFDFTTTSTSTPVTSNTVTGETTPFSPLVATSESVTEITASSFVVSWVSASDTVSGFRVEYELSEEGDEPQYLDLPSTATSVNIPDLLPGRKYIVNVYQISEDGEQSLILSTSQTTAPDAPPDTTVDQVDDTSIVVRWSRPQAPITGYRIVYSPSVEGSSTELNLPETANSVTLSDLQPGVQYNITIYAVEENQESTPVVIQQETTGTPRSDTVPSPRDLQFVEVTDVKVTIMWTPPESAVTGYRVDVIPVNLPGEHGQRLPISRNTFAEVTGLSPGVTYYFKVFAVSHGRESKPLTAQQTTKLDAPTNLQFVNETDSTVLVRWTPPRAQITGYRLTVGLTRRGQPRQYNVGPSVSKYPLRNLQPASEYTVSLVAIKGNQESPKATGVFTTLQPGSSIPPYNTEVTETTIVITWTPAPRIGFKLGVRPSQGGEAPREVTSDSGSIVVSGLTPGVEYVYTIQVLRDGQERDAPIVNKVVTPLSPPTNLHLEANPDTGVLTVSWERSTTPDITGYRITTTPTNGQQGNSLEEVVHADQSSCTFDNLSPGLEYNVSVYTVKDDKESVPISDTIIPEVPQLTDLSFVDITDSSIGLRWTPLNSSTIIGYRITVVAAGEGIPIFEDFVDSSVGYYTVTGLEPGIDYDISVITLINGGESAPTTLTQQTAVPPPTDLRFTNIGPDTMRVTWAPPPSIDLTNFLVRYSPVKNEEDVAELSISPSDNAVVLTNLLPGTEYVVSVSSVYEQHESTPLRGRQKTGLDSPTGIDFSDITANSFTVHWIAPRATITGYRIRHHPEHFSGRPREDRVPHSRNSITLTNLTPGTEYVVSIVALNGREESPLLIGQQSTVSDVPRDLEVVAATPTSLLISWDAPAVTVRYYRITYGETGGNSPVQEFTVPGSKSTATISGLKPGVDYTITVYAVTGRGDSPASSKPISINYRTEIDKPSQMQVTDVQDNSISVKWLPSSSPVTGYRVTTTPKNGPGPTKTKTAGPDQTEMTIEGLQPTVEYVVSVYAQNPSGESQPLVQTAVTTIPAPTDLKFTQVTPTSLSAQWTPPNVQLTGYRVRVTPKEKTGPMKEINLAPDSSSVVVSGLMVATKYEVSVYALKDTLTSRPAQGVVTTLENVSPPRRARVTDATETTITISWRTKTETITGFQVDAVPANGQTPIQRTIKPDVRSYTITGLQPGTDYKIYLYTLNDNARSSPVVIDASTAIDAPSNLRFLATTPNSLLVSWQPPRARITGYIIKYEKPGSPPREVVPRPRPGVTEATITGLEPGTEYTIYVIALKNNQKSEPLIGRKKTGQEALSQTTISWAPFQDTSEYIISCHPVGTDEEPLQFRVPGTSTSATLTGLTRGATYNVIVEALKDQQRHKVREEVVTVGNSVNEGLNQPTDDSCFDPYTVSHYAVGDEWERMSESGFKLLCQCLGFGSGHFRCDSSRWCHDNGVNYKIGEKWDRQGENGQMMSCTCLGNGKGEFKCDPHEATCYDDGKTYHVGEQWQKEYLGAICSCTCFGGQRGWRCDNCRRPGGEPSPEGTTGQSYNQYSQRYHQRTNTNVNCPIECFMPLDVQADREDSRE

SEQ ID NO: 20045 - protein, 2265 aa, Homo sapiens
MLRGPGPGLLLLAVQCLGTAVPSTGASKSKRQAQQMVQPQSPVAVSQSKPGCYDNGKHYQINQQWERTYLGNALVCTCYGGSRGFNCESKPEAEETCFDKYTGNTYRVGDTYERPKDSMIWDCTCIGAGRGRISCTIANRCHEGGQSYKIGDTWRRPHETGGYMLECVCLGNGKGEWTCKPIAEKCFDHAAGTSYVVGETWEKPYQGWMMVDCTCLGEGSGRITCTSRNRCNDQDTRTSYRIGDTWSKKDNRGNLLQCICTGNGRGEWKCERHTSVQTTSSGSGPFTDVRAAVYQPQPHPQPPPYGHCVTDSGVVYSVGMQWLKTQGNKQMLCTCLGNGVSCQETAVTQTYGGNSNGEPCVLPFTYNGRTFYSCTTEGRQDGHLWCSTTSNYEQDQKYSFCTDHTVLVQTRGGNSNGALCHFPFLYNNHNYTDCTSEGRRDNMKWCGTTQNYDADQKFGFCPMAAHEEICTTNEGVMYRIGDQWDKQHDMGHMMRCTCVGNGRGEWTCIAYSQLRDQCIVDDITYNVNDTFHKRHEEGHMLNCTCFGQGRGRWKCDPVDQCQDSETGTFYQIGDSWEKYVHGVRYQCYCYGRGIGEWHCQPLQTYPSSSGPVEVFITETPSQPNSHPIQWNAPQPSHISKYILRWRPKNSVGRWKEATIPGHLNSYTIKGLKPGVVYEGQLISIQQYGHQEVTRFDFTTTSTSTPVTSNTVTGETTPFSPLVATSESVTEITASSFVVSWVSASDTVSGFRVEYELSEEGDEPQYLDLPSTATSVNIPDLLPGRKYIVNVYQISEDGEQSLILSTSQTTAPDAPPDTTVDQVDDTSIVVRWSRPQAPITGYRIVYSPSVEGSSTELNLPETANSVTLSDLQPGVQYNITIYAVEENQESTPVVIQQETTGTPRSDTVPSPRDLQFVEVTDVKVTIMWTPPESAVTGYRVDVIPVNLPGEHGQRLPISRNTFAEVTGLSPGVTYYFKVFAVSHGRESKPLTAQQTTKLDAPTNLQFVNETDSTVLVRWTPPRAQITGYRLTVGLTRRGQPRQYNVGPSVSKYPLRNLQPASEYTVSLVAIKGNQESPKATGVFTTLQPGSSIPPYNTEVTETTIVITWTPAPRIGFKLGVRPSQGGEAPREVTSDSGSIVVSGLTPGVEYVYTIQVLRDGQERDAPIVNKVVTPLSPPTNLHLEANPDTGVLTVSWERSTTPDITGYRITTTPTNGQQGNSLEEVVHADQSSCTFDNLSPGLEYNVSVYTVKDDKESVPISDTIIPAVPPPTDLRFTNIGPDTMRVTWAPPPSIDLTNFLVRYSPVKNEEDVAELSISPSDNAVVLTNLLPGTEYVVSVSSVYEQHESTPLRGRQKTGLDSPTGIDFSDITANSFTVHWIAPRATITGYRIRHHPEHFSGRPREDRVPHSRNSITLTNLTPGTEYVVSIVALNGREESPLLIGQQSTVSDVPRDLEVVAATPTSLLISWDAPAVTVRYYRITYGETGGNSPVQEFTVPGSKSTATISGLKPGVDYTITVYAVTGRGDSPASSKPISINYRTEIDKPSQMQVTDVQDNSISVKWLPSSSPVTGYRVTTTPKNGPGPTKTKTAGPDQTEMTIEGLQPTVEYVVSVYAQNPSGESQPLVQTAVTTIPAPTDLKFTQVTPTSLSAQWTPPNVQLTGYRVRVTPKEKTGPMKEINLAPDSSSVVVSGLMVATKYEVSVYALKDTLTSRPAQGVVTTLENVSPPRRARVTDATETTITISWRTKTETITGFQVDAVPANGQTPIQRTIKPDVRSYTITGLQPGTDYKIYLYTLNDNARSSPVVIDASTAIDAPSNLRFLATTPNSLLVSWQPPRARITGYIIKYEKPGSPPREVVPRPRPGVTEATITGLEPGTEYTIYVIALKNNQKSEPLIGRKKTDELPQLVTLPHPNLHGPEILDVPSTVQKTPFVTHPGYDTGNGIQLPGTSGQQPSVGQQMIFEEHGFRRTTPPTTATPIRHRPRPYPPNVGQEALSQTTISWAPFQDTSEYIISCHPVGTDEEPLQFRVPGTSTSATLTGLTRGATYNVIVEALKDQQRHKVREEVVTVGNSVNEGLNQPTDDSCFDPYTVSHYAVGDEWERMSESGFKLLCQCLGFGSGHFRCDSSRWCHDNGVNYKIGEKWDRQGENGQMMSCTCLGNGKGEFKCDPHEATCYDDGKTYHVGEQWQKEYLGAICSCTCFGGQRGWRCDNCRRPGGEPSPEGTTGQSYNQYSQRYHQRTNTNVNCPIECFMPLDVQADREDSRE

SEQ ID NO: 20046 - protein, 657 aa, Homo sapiens
MLRGPGPGLLLLAVQCLGTAVPSTGASKSKRQAQQMVQPQSPVAVSQSKPGCYDNGKHYQINQQWERTYLGNALVCTCYGGSRGFNCESKPEAEETCFDKYTGNTYRVGDTYERPKDSMIWDCTCIGAGRGRISCTIANRCHEGGQSYKIGDTWRRPHETGGYMLECVCLGNGKGEWTCKPIAEKCFDHAAGTSYVVGETWEKPYQGWMMVDCTCLGEGSGRITCTSRNRCNDQDTRTSYRIGDTWSKKDNRGNLLQCICTGNGRGEWKCERHTSVQTTSSGSGPFTDVRAAVYQPQPHPQPPPYGHCVTDSGVVYSVGMQWLKTQGNKQMLCTCLGNGVSCQETAVTQTYGGNSNGEPCVLPFTYNGRTFYSCTTEGRQDGHLWCSTTSNYEQDQKYSFCTDHTVLVQTRGGNSNGALCHFPFLYNNHNYTDCTSEGRRDNMKWCGTTQNYDADQKFGFCPMAAHEEICTTNEGVMYRIGDQWDKQHDMGHMMRCTCVGNGRGEWTCIAYSQLRDQCIVDDITYNVNDTFHKRHEEGHMLNCTCFGQGRGRWKCDPVDQCQDSETGTFYQIGDSWEKYVHGVRYQCYCYGRGIGEWHCQPLQTYPSSSGPVEVFITETPSQPNSHPIQWNAPQPSHISKYILRWRPVSIPPRNLGY

SEQ ID NO: 20047 - protein, 2330 aa, Homo sapiens
MLRGPGPGLLLLAVQCLGTAVPSTGASKSKRQAQQMVQPQSPVAVSQSKPGCYDNGKHYQINQQWERTYLGNALVCTCYGGSRGFNCESKPEAEETCFDKYTGNTYRVGDTYERPKDSMIWDCTCIGAGRGRISCTIANRCHEGGQSYKIGDTWRRPHETGGYMLECVCLGNGKGEWTCKPIAEKCFDHAAGTSYVVGETWEKPYQGWMMVDCTCLGEGSGRITCTSRNRCNDQDTRTSYRIGDTWSKKDNRGNLLQCICTGNGRGEWKCERHTSVQTTSSGSGPFTDVRAAVYQPQPHPQPPPYGHCVTDSGVVYSVGMQWLKTQGNKQMLCTCLGNGVSCQETAVTQTYGGNSNGEPCVLPFTYNGRTFYSCTTEGRQDGHLWCSTTSNYEQDQKYSFCTDHTVLVQTRGGNSNGALCHFPFLYNNHNYTDCTSEGRRDNMKWCGTTQNYDADQKFGFCPMAAHEEICTTNEGVMYRIGDQWDKQHDMGHMMRCTCVGNGRGEWTCIAYSQLRDQCIVDDITYNVNDTFHKRHEEGHMLNCTCFGQGRGRWKCDPVDQCQDSETGTFYQIGDSWEKYVHGVRYQCYCYGRGIGEWHCQPLQTYPSSSGPVEVFITETPSQPNSHPIQWNAPQPSHISKYILRWRPKNSVGRWKEATIPGHLNSYTIKGLKPGVVYEGQLISIQQYGHQEVTRFDFTTTSTSTPVTSNTVTGETTPFSPLVATSESVTEITASSFVVSWVSASDTVSGFRVEYELSEEGDEPQYLDLPSTATSVNIPDLLPGRKYIVNVYQISEDGEQSLILSTSQTTAPDAPPDTTVDQVDDTSIVVRWSRPQAPITGYRIVYSPSVEGSSTELNLPETANSVTLSDLQPGVQYNITIYAVEENQESTPVVIQQETTGTPRSDTVPSPRDLQFVEVTDVKVTIMWTPPESAVTGYRVDVIPVNLPGEHGQRLPISRNTFAEVTGLSPGVTYYFKVFAVSHGRESKPLTAQQTTKLDAPTNLQFVNETDSTVLVRWTPPRAQITGYRLTVGLTRRGQPRQYNVGPSVSKYPLRNLQPASEYTVSLVAIKGNQESPKATGVFTTLQPGSSIPPYNTEVTETTIVITWTPAPRIGFKLGVRPSQGGEAPREVTSDSGSIVVSGLTPGVEYVYTIQVLRDGQERDAPIVNKVVTPLSPPTNLHLEANPDTGVLTVSWERSTTPDITGYRITTTPTNGQQGNSLEEVVHADQSSCTFDNLSPGLEYNVSVYTVKDDKESVPISDTIIPAVPPPTDLRFTNIGPDTMRVTWAPPPSIDLTNFLVRYSPVKNEEDVAELSISPSDNAVVLTNLLPGTEYVVSVSSVYEQHESTPLRGRQKTGLDSPTGIDFSDITANSFTVHWIAPRATITGYRIRHHPEHFSGRPREDRVPHSRNSITLTNLTPGTEYVVSIVALNGREESPLLIGQQSTVSDVPRDLEVVAATPTSLLISWDAPAVTVRYYRITYGETGGNSPVQEFTVPGSKSTATISGLKPGVDYTITVYAVTGRGDSPASSKPISINYRTEIDKPSQMQVTDVQDNSISVKWLPSSSPVTGYRVTTTPKNGPGPTKTKTAGPDQTEMTIEGLQPTVEYVVSVYAQNPSGESQPLVQTAVTNIDRPKGLAFTDVDVDSIKIAWESPQGQVSRYRVTYSSPEDGIHELFPAPDGEEDTAELQGLRPGSEYTVSVVALHDDMESQPLIGTQSTAIPAPTDLKFTQVTPTSLSAQWTPPNVQLTGYRVRVTPKEKTGPMKEINLAPDSSSVVVSGLMVATKYEVSVYALKDTLTSRPAQGVVTTLENVSPPRRARVTDATETTITISWRTKTETITGFQVDAVPANGQTPIQRTIKPDVRSYTITGLQPGTDYKIYLYTLNDNARSSPVVIDASTAIDAPSNLRFLATTPNSLLVSWQPPRARITGYIIKYEKPGSPPREVVPRPRPGVTEATITGLEPGTEYTIYVIALKNNQKSEPLIGRKKTVQKTPFVTHPGYDTGNGIQLPGTSGQQPSVGQQMIFEEHGFRRTTPPTTATPIRHRPRPYPPNVGQEALSQTTISWAPFQDTSEYIISCHPVGTDEEPLQFRVPGTSTSATLTGLTRGATYNVIVEALKDQQRHKVREEVVTVGNSVNEGLNQPTDDSCFDPYTVSHYAVGDEWERMSESGFKLLCQCLGFGSGHFRCDSSRWCHDNGVNYKIGEKWDRQGENGQMMSCTCLGNGKGEFKCDPHEATCYDDGKTYHVGEQWQKEYLGAICSCTCFGGQRGWRCDNCRRPGGEPSPEGTTGQSYNQYSQRYHQRTNTNVNCPIECFMPLDVQADREDSRE

SEQ ID NO: 20048 - protein, 980 aa, Homo sapiens
MPAELLLLLIVAFASPSCQVLSSLRMAAILDDQTVCGRGERLALALAREQINGIIEVPAKARVEVDIFELQRDSQYETTDTMCQILPKGVVSVLGPSSSPASASTVSHICGEKEIPHIKVGPEETPRLQYLRFASVSLYPSNEDVSLAVSRILKSFNYPSASLICAKAECLLRLEELVRGFLISKETLSVRMLDDSRDPTPLLKEIRDDKVSTIIIDANASISHLILRKASELGMTSAFYKYILTTMDFPILHLDGIVEDSSNILGFSMFNTSHPFYPEFVRSLNMSWRENCEASTYLGPALSAALMFDAVHVVVSAVRELNRSQEIGVKPLACTSANIWPHGTSLMNYLRMVEYDGLTGRVEFNSKGQRTNYTLRILEKSRQGHREIGVWYSNRTLAMNATTLDINLSQTLANKTLVVTTILENPYVMRRPNFQALSGNERFEGFCVDMLRELAELLRFRYRLRLVEDGLYGAPEPNGSWTGMVGELINRKADLAVAAFTITAEREKVIDFSKPFMTLGISILYRVHMGRKPGYFSFLDPFSPAVWLFMLLAYLAVSCVLFLAARLSPYEWYNPHPCLRARPHILENQYTLGNSLWFPVGGFMQQGSEIMPRALSTRCVSGVWWAFTLIIISSYTANLAAFLTVQRMEVPVESADDLADQTNIEYGTIHAGSTMTFFQNSRYQTYQRMWNYMQSKQPSVFVKSTEEGIARVLNSRYAFLLESTMNEYHRRLNCNLTQIGGLLDTKGYGIGMPLGSPFRDEITLAILQLQENNRLEILKRKWWEGGRCPKEEDHRAKGLGMENIGGIFIVLICGLIIAVFVAVMEFIWSTRRSAESEEVSVCQEMLQELRHAVSCRKTSRSRRRRRPGGPSRALLSLRAVREMRLSNGKLYSAGAGGDAGSAHGGPQRLLDDPGPPSGARPAAPTPCTHVRVCQECRRIQALRASGAGAPPRGLGVPAEATSPPRPRPGPAGPRELAEHE

SEQ ID NO: 20049 - protein, 981 aa, Homo sapiens
MPAELLLLLIVAFASPSCQVLSSLRMAAILDDQTVCGRGERLALALAREQINGIIEVPAKARVEVDIFELQRDSQYETTDTMCQILPKGVVSVLGPSSSPASASTVSHICGEKEIPHIKVGPEETPRLQYLRFASVSLYPSNEDVSLAVSRILKSFNYPSASLICAKAECLLRLEELVRGFLISKETLSVRMLDDSRDPTPLLKEIRDDKVSTIIIDANASISHLILRKASELGMTSAFYKYILTTMDFPILHLDGIVEDSSNILGFSMFNTSHPFYPEFVRSLNMSWRENCEASTYLGPALSAALMFDAVHVVVSAVRELNRSQEIGVKPLACTSANIWPHGTSLMNYLRMVEYDGLTGRVEFNSKGQRTNYTLRILEKSRQGHREIGVWYSNRTLAMNATTLDINLSQTLANKTLVVTTILENPYVMRRPNFQALSGNERFEGFCVDMLRELAELLRFRYRLRLVEDGLYGAPEPNGSWTGMVGELINRKADLAVAAFTITAEREKVIDFSKPFMTLGISILYRVHMGRKPGYFSFLDPFSPAVWLFMLLAYLAVSCVLFLAARLSPYEWYNPHPCLRARPHILENQYTLGNSLWFPVGGFMQQGSEIMPRALSTRCVSGVWWAFTLIIISSYTANLAAFLTVQRMEVPVESADDLADQTNIEYGTIHAGSTMTFFQNSRYQTYQRMWNYMQSKQPSVFVKSTEEGIARVLNSRYAFLLESTMNEYHRRLNCNLTQIGGLLDTKGYGIGMPLGSPFRDEITLAILQLQENNRLEILKRKWWEGGRCPKEEDHRAKGLGMENIGGIFIVLICGLIIAVFVAVMEFIWSTRRSAESEETPALHPAACQCSALGPRTPLKEPSMLLVKVPSTRVQVAFSRTSLRQVCPFLLQHQLSSLYWIQATNVQICCHFSSLKPSPDLTFPPSHRPLSSLLFTALAAVGGLPDASSFFFPPISSCPPLQSGIGPCHSTEATLVTSNFHV
